(19) United States
(12) Patent Application Publication
(10) Pub. No.: US 2026/0035702 A1
(43) Pub. Date: Feb. 5, 2026

(54) PLASMINOGEN (PLG) iRNA COMPOSITIONS AND METHODS OF USE THEREOF

(71) Applicant: ALNYLAM PHARMACEUTICALS, INC., CAMBRIDGE, MA (US)

(72) Inventors: MARTINA SLINGSBY, WESTON, MA (US); BENJAMIN HOLMES, MARLBOROUGH, MA (US); ELANE FISHILEVICH, ROCHESTER, MA (US); JEFFREY ZUBER, SOMERVILLE, MA (US); ELEFTHERIA MARATOS-FLIER, NEWTON, MA (US); JOHN GANSNER, NEWTON, MA (US)

(73) Assignee: ALNYLAM PHARMACEUTICALS, INC., CAMBRIDGE, MA (US)

(21) Appl. No.: 19/293,414

(22) Filed: Aug. 7, 2025

Related U.S. Application Data
(63) Continuation of application No. 19/118,612.
(60) Provisional application No. 63/378,731, filed on Oct. 7, 2022.
(60) Provisional application No. 63/587,546, filed on Oct. 3, 2023.

(51) Int. Cl. C12N 15/113

(52) U.S. Cl. CPC C12N 15/1137; C12Y 304/21007; C12N 2310/14; C12N 2310/351

(57) ABSTRACT

The invention relates to double-stranded ribonucleic acid (dsRNA) compositions targeting the plasminogen (PLG) gene, as well as methods of inhibiting expression of PLG, and methods of treating subjects that would benefit from reduction in expression of PLG, such as subjects having a PLG-associated disease, disorder, or condition, using such dsRNA compositions.

### CROSS-REFERENCE TO RELATED APPLICATIONS

[0001] This application claims the benefit of priority to U.S. Provisional Application No. 63/378,731, filed on Oct. 7, 2022, and claims the benefit of priority to U.S. Provisional Application No. 63/587,546, filed on Oct. 3, 2023. The entire contents of the foregoing applications are hereby incorporated herein by reference.

### REFERENCE TO A SEQUENCE LISTING

[0002] The official copy of the sequence listing is submitted electronically concurrently with the specification as an XML formatted sequence listing with a file name of ALN492WO_SeqList.xml, created on Oct. 3, 2023, and having a size of 43,460,748 bytes. The sequence listing contained in this XML formatted document is part of the specification and is herein incorporated by reference in its entirety.

### FIELD OF THE INVENTION

[0003] The instant disclosure relates generally to plasminogen (PLG)-targeting RNAi agents and methods.

### BACKGROUND OF THE INVENTION

[0004] Plasminogen (PLG) is the precursor of the enzyme plasmin which is a serine protease that acts to break down fibrin and dissolve blood clots (fibrinolysis). PLG is primarily synthesized by the liver and released into the systemic circulation at a high plasma concentration (1.5-2 μM). The two main physiological activators of plasminogen into plasmin are tissue plasminogen activator (tPA) and urokinase plasminogen activator (uPA). Plasminogen activator inhibitor (PAI-1), is an endogenous negative regulator that inhibits tPA and uPA activity, limiting plasminogen activation into plasmin and subsequent fibrinolysis.

[0005] Heavy menstrual bleeding (HMB) is excessive menstrual blood loss which interferes with a woman's physical, social, emotional and/or material quality of life. HMB affects ˜30% of reproductive age women and is a significant burden for more than 10 million American women each year. HMB is associated with iron deficiency anemia, fatigue, and time lost from school/work/activities. Around 60-90% of women with a bleeding disorder suffer from HMB. Greater than $1 billion is spent every year for the treatment of HMB.

[0006] Current standard of care for HMB includes use of the anti-fibrinolytic plasminogen activation inhibitor small molecule tranexamic acid (TXA), oral contraceptive pills (OCP), and/or hormone releasing intrauterine devices (IUDs). However, side effects, high pill burden and lack of effectiveness commonly lead to discontinuation of these therapies. Therefore, there is a need for additional therapies for HMB.

[0007] Women with HMB have been shown to have higher uterine fibrinolytic activity including higher PLG levels, increased plasminogen activator t-PA levels and delayed PAI-1 levels. Hereditary hemorrhagic telangiectasia (HHT) is a genetic blood vessel disorder which leads to excessive bleeding, affecting males and females of all ages and all ethnic backgrounds. Patients with HHT have abnormal fragile blood vessels that bleed easily and have locally increased fibrinolysis and vascular malformations, such as telangiectasia and arteriovenous malformations. About 90% of people with HHT have recurring nosebleeds and also may experience gastrointestinal bleeding, HMB, anemia, and frequent iron/blood transfusions. There are currently no FDA approved drugs for treating HHT and TXA is used off-label in HHT patients.

[0008] Given the central role of PLG in mediating fibrinolysis, inhibiting expression of the PLG gene is a potential target to reduce excessive mucocutaneous bleeding in disorders such as HHT and HMB as well as other types of bleeding associated with bleeding disorders, including nose bleeds and easy bruising.

### BRIEF SUMMARY OF THE INVENTION

[0009] The present invention provides iRNA compositions which effect the RNA-induced silencing complex (RISC)-mediated cleavage of RNA transcripts of a Plasminogen (PLG) gene. The PLG gene may be within a cell, e.g., a cell within a subject, such as a human. The present invention also provides methods of using the iRNA compositions of the invention for inhibiting the expression of a PLG gene and/or for treating a subject who would benefit from inhibiting or reducing the expression of a PLG gene, e.g., a subject suffering or prone to suffering from a PLG-associated disease, for example, a bleeding disorder.

[0010] Accordingly, in one aspect, the present invention provides a double stranded ribonucleic acid (dsRNA) agent for inhibiting expression of Plasminogen (PLG) in a cell. The dsRNA agent includes a sense strand and an antisense strand, wherein the sense strand comprises at least 15 contiguous nucleotides differing by no more than 1, 2, or 3 nucleotides from the nucleotide sequence of SEQ ID NO: 1 or 3 and the antisense strand comprises at least 15 contiguous nucleotides differing by no more than 1, 2, or 3 nucleotides from the nucleotide sequence of SEQ ID NO: 2 or 4. In some embodiments, the dsRNA agent includes a sense strand and an antisense strand, wherein the sense strand comprises at least 15 contiguous nucleotides from the nucleotide sequence of SEQ ID NO: 1 or 3 and the antisense strand comprises at least 15 contiguous nucleotides from the nucleotide sequence of SEQ ID NO: 2 or 4.

[0011] In another aspect, the present invention provides a double stranded ribonucleic acid (dsRNA) agent for inhibiting expression of Plasminogen (PLG) in a cell. The dsRNA agent includes a sense strand and an antisense strand forming a double stranded region, wherein said antisense strand comprises a region of complementarity to an mRNA encoding PLG which comprises at least 15 contiguous nucleotides differing by no more than 1, 2, or 3 nucleotides from any one of the antisense sequences listed in any one of Tables 3, 4, 5, 6, 7, 8A, or 8B. In some embodiments, the dsRNA agent includes a sense strand and an antisense strand forming a double stranded region, wherein said antisense strand comprises a region of complementarity to an mRNA encoding PLG which comprises at least 15 contiguous nucleotides from any one of the antisense sequences listed in any one of Tables 3, 4, 5, 6, 7, 8A, or 8B.

[0012] In another embodiment, the region of complementarity comprises at least 15 contiguous nucleotides differing by no more than 1, 2, or 3 nucleotides from any one of nucleotides 3-25, 90-112, 126-148, 153-175, 185-207, 202-224, 221-243, 247-269, 267-289, 287-309, 303-325, 323-345, 353-375, 372-394, 396-418, 460-482, 513-535, 550-572, 575-597, 592-614, 607-629, 623-645, 642-664, 703-725, 718-740, 740-762, 787-809, 818-840, 850-872, 870-892, 885-907, 910-932, 982-1004, 1012-1034, 1029-1051, 1061-1083, 1094-1116, 1239-1261, 1254-1276, 1313-1335, 1339-1361, 1364-1386, 1396-1418, 1426-1448, 1452-1474, 1469-1491, 1489-1511, 1592-1614, 1607-1629, 1651-1673, 1685-1707, 1700-1722, 1716-1738, 1841-1863, 1856-1878, 1919-1941, 1978-2000, 1998-2020, 2047-2069, 2062-2084, 2086-2108, 2150-2172, 2173-2195, 2223-2245, 2248-2270, 2263-2285, 2343-2365, 2433-2455, 2473-2495, 2511-2533, 2553-2575, 2578-2600, 2605-2627, 2621-2643, 2646-2668, 2661-2683, 2701-2723, 2727-2749, 2742-2764, 2771-2793, 2804-2826, 2826-2848, 2874-2896, 2890-2912, 2914-2936, 2929-2951, 2947-2969, 2962-2984, 2987-3009, 3006-3028, 3025-3047, 3068-3090, 3097-3119, 3116-3138, 3143-3165, 3168-3190, 3183-3205, 3209-3231, 3236-3258, 3269-3291, 3289-3311, 3310-3332, 3330-3352, 3391-3413, 3407-3429, 3422-3444, 3447-3469, 3468-3490, 3485-3507 of SEQ ID NO: 1; or 8-30, 45-67, 519-541, 534-556, 617-639, 653-675, 669-691, 702-724, 717-739, 760-782, 776-798, 798-820, 851-873, 870-892, 885-907, 904-926, 929-951, 962-984, 984-1006, 1000-1022, 1016-1038, 1055-1077, 1070-1092, 1113-1135, 1128-1150, or 1159-1181 of SEQ ID NO: 3. In some embodiments, the region of complementarity comprises at least 15 contiguous nucleotides from any one of nucleotides 3-25, 90-112, 126-148, 153-175, 185-207, 202-224, 221-243, 247-269, 267-289, 287-309, 303-325, 323-345, 353-375, 372-394, 396-418, 460-482, 513-535, 550-572, 575-597, 592-614, 607-629, 623-645, 642-664, 703-725, 718-740, 740-762, 787-809, 818-840, 850-872, 870-892, 885-907, 910-932, 982-1004, 1012-1034, 1029-1051, 1061-1083, 1094-1116, 1239-1261, 1254-1276, 1313-1335, 1339-1361, 1364-1386, 1396-1418, 1426-1448, 1452-1474, 1469-1491, 1489-1511, 1592-1614, 1607-1629, 1651-1673, 1685-1707, 1700-1722, 1716-1738, 1841-1863, 1856-1878, 1919-1941, 1978-2000, 1998-2020, 2047-2069, 2062-2084, 2086-2108, 2150-2172, 2173-2195, 2223-2245, 2248-2270, 2263-2285, 2343-2365, 2433-2455, 2473-2495, 2511-2533, 2553-2575, 2578-2600, 2605-2627, 2621-2643, 2646-2668, 2661-2683, 2701-2723, 2727-2749, 2742-2764, 2771-2793, 2804-2826, 2826-2848, 2874-2896, 2890-2912, 2914-2936, 2929-2951, 2947-2969, 2962-2984, 2987-3009, 3006-3028, 3025-3047, 3068-3090, 3097-3119, 3116-3138, 3143-3165, 3168-3190, 3183-3205, 3209-3231, 3236-3258, 3269-3291, 3289-3311, 3310-3332, 3330-3352, 3391-3413, 3407-3429, 3422-3444, 3447-3469, 3468-3490, 3485-3507 of SEQ ID NO: 1; or 8-30, 45-67, 519-541, 534-556, 617-639, 653-675, 669-691, 702-724, 717-739, 760-782, 776-798, 798-820, 851-873, 870-892, 885-907, 904-926, 929-951, 962-984, 984-1006, 1000-1022, 1016-1038, 1055-1077, 1070-1092, 1113-1135, 1128-1150, or 1159-1181 of SEQ ID NO: 3.

[0013] In one embodiment, the dsRNA agent comprises at least one modified nucleotide.

[0014] In one embodiment, substantially all of the nucleotides of the sense strand comprise a modification. In another embodiment, substantially all of the nucleotides of the antisense strand comprise a modification. In yet another embodiment, substantially all of the nucleotides of the sense strand and substantially all of the nucleotides of the antisense strand comprise a modification.

[0015] In one embodiment, the antisense strand of the dsRNA agent is chosen from the antisense strands of AD-2315878 (SEQ ID NO:1291), AD-2315874 (SEQ ID NO:1287), or AD-2315875 (SEQ ID NO: 1288). In another embodiment, the sense strand is chosen from the sense strands of AD-2315878 (SEQ ID NO:1277), AD-2315874 (SEQ ID NO: 1273), or AD-2315875 (SEQ ID NO: 1274). In a further embodiment, the dsRNA agent is AD-2315878, AD-2315874, or AD-2315875.

[0016] In one embodiment, (a) the sense strand of the dsRNA agent comprises the sequence and all of the modifications of SEQ ID NO: 881, and the antisense strand of the dsRNA agent comprises the sequence and all the modifications of SEQ ID NO: 1265; (b) the sense strand of the dsRNA agent comprises the sequence and all of the modifications of SEQ ID NO: 914, and the antisense strand of the dsRNA agent comprises the sequence and all the modifications of SEQ ID NO: 1266; or (c) the sense strand of the dsRNA agent comprises the sequence and all of the modifications of SEQ ID NO: 907, and the antisense strand of the dsRNA agent comprises the sequence and all the modifications of SEQ ID NO: 1272.

[0017] In one aspect, the present invention provides a double stranded ribonucleic acid (dsRNA) agent for inhibiting expression of Plasminogen (PLG) in a cell. The dsRNA agent includes a sense strand and an antisense strand forming a double stranded region, wherein the sense strand comprises at least 15 contiguous nucleotides differing by no more than 1, 2, or 3 nucleotides from the nucleotide sequence of SEQ ID NO:1 or 3 and the antisense strand comprises at least 15 contiguous nucleotides differing by no more than 1, 2, or 3 nucleotides from the nucleotide sequence of SEQ ID NO:2 or 4, wherein substantially all of the nucleotides of the sense strand and substantially all of the nucleotides of the antisense strand are modified nucleotides, and wherein the sense strand is conjugated to a ligand attached at the 3′-terminus. In some embodiments, the dsRNA agent includes a sense strand and an antisense strand forming a double stranded region, wherein the sense strand comprises at least 15 contiguous nucleotides from the nucleotide sequence of SEQ ID NO:1 or 3 and the antisense strand comprises at least 15 contiguous nucleotides from the nucleotide sequence of SEQ ID NO:2 or 4, wherein substantially all of the nucleotides of the sense strand and substantially all of the nucleotides of the antisense strand are modified nucleotides, and wherein the sense strand is conjugated to a ligand attached at the 3′-terminus.

[0018] In one embodiment, all of the nucleotides of the sense strand comprise a modification. In another embodiment, all of the nucleotides of the antisense strand comprise a modification. In yet another embodiment, all of the nucleotides of the sense strand and all of the nucleotides of the antisense strand comprise a modification.

[0019] In one embodiment, at least one of said modified nucleotides is selected from the group consisting of a deoxy-nucleotide, a 3′-terminal deoxy-thymine (dT) nucleotide, a 2′-O-methyl modified nucleotide, a 2′-fluoro modified nucleotide, a 2′-deoxy-modified nucleotide, a locked nucleotide, an unlocked nucleotide, a conformationally restricted nucleotide, a constrained ethyl nucleotide, an abasic nucleotide, a 2′-amino-modified nucleotide, a 2′-O-allyl-modified nucleotide, 2′-C-alkyl-modified nucleotide, 2′-hydroxyl-modified nucleotide, a 2′-methoxyethyl modified nucleotide, a 2′-O-alkyl-modified nucleotide, a morpholino nucleotide, a phosphoramidate, a non-natural base comprising nucleotide, a tetrahydropyran modified nucleotide, a 1,5-anhydrohexitol modified nucleotide, a cyclohexenyl modified nucleotide, a nucleotide comprising a phosphorothioate group, a nucleotide comprising a methylphosphonate group, a nucleotide comprising a 5′-phosphate, a nucleotide comprising a 5′-phosphate mimic, a glycol modified nucleotide, a 2-0-(N-methylacetamide) modified nucleotide, a nucleotide comprising vinyl phosphonate, a nucleotide comprising a glycol nucleic acid (GNA) (e.g., an adenosine-glycol nucleic acid), a nucleotide comprising a glycol nucleic acid S-Isomer (S-GNA) (e.g., a thymidine-glycol nucleic acid S-Isomer), a nucleotide comprising 2-hydroxymethyl-tetrahydrofuran-5-phosphate, a nucleotide comprising 2′-deoxythymidine-3′phosphate, a nucleotide comprising 2′-deoxyguanosine-3′-phosphate, a 2′-5′-linked ribonucleotide (3′-RNA), and a terminal nucleotide linked to a cholesteryl derivative and a dodecanoic acid bisdecylamide group; and combinations thereof. In one embodiment, the nucleotide modifications are 2′-O-methyl and/or 2′-fluoro modifications.

[0020] The region of complementarity may be at least 17 nucleotides in length;19 to 30 nucleotides in length;19-25 nucleotides in length; or 21 to 23 nucleotides in length.

[0021] Each strand may be no more than 30 nucleotides in length, e.g., each strand is independently 19-30 nucleotides in length; each strand is independently 19-25 nucleotides in length; each strand is independently 21-23 nucleotides in length.

[0022] The dsRNA may include at least one strand that comprises a 3′ overhang of at least 1 nucleotide; or at least one strand that comprises a 3′ overhang of at least 2 nucleotides.

[0023] In some embodiment, the dsRNA agent further comprises a ligand.

[0024] In one embodiment, the ligand is conjugated to the 3′ end of the sense strand of the dsRNA agent.

[0025] In one embodiment, the ligand is an N-acetylgalactosamine (GalNAc) derivative.

[0026] In one embodiment, the ligand is

[chemical structure]

[0027] In one embodiment, the dsRNA agent is conjugated to the ligand as shown in the following schematic

[chemical structure]

and, wherein X is O or S.

[0028] In one embodiment, the X is O.

[0029] In one embodiment, the region of complementarity comprises any one of the antisense sequences in any one of Tables 3, 4, 5, 6, 7, 8A, or 8B.

[0030] In one aspect, the present invention provides a double stranded ribonucleic acid (dsRNA) agent for inhibiting expression of Plasminogen (PLG) in a cell. The dsRNA agent includes a sense strand complementary to an antisense strand, wherein the antisense strand comprises a region complementary to part of an mRNA encoding PLG, wherein each strand is about 14 to about 30 nucleotides in length, wherein said dsRNA agent is represented by formula (III):

[chemical structure]

[0031] wherein:
[0032] i, j, k, and 1 are each independently 0 or 1;
[0033] p, p′, q, and q′ are each independently 0-6;
[0034] each Nₐ and Nₐ′ independently represents an oligonucleotide sequence comprising 0-25 nucleotides which are either modified or unmodified or combinations thereof, each sequence comprising at least two differently modified nucleotides;
[0035] each N_{b} and N_{b}′ independently represents an oligonucleotide sequence comprising 0-10 nucleotides which are either modified or unmodified or combinations thereof;
[0036] each np, nₚ′, n_{q}, and n_{q}′, each of which may or may not be present, independently represents an overhang nucleotide;
[0037] XXX, YYY, ZZZ, X′X′X′, Y′Y′Y′, and Z′Z′Z′ each independently represent one motif of three identical modifications on three consecutive nucleotides;
[0038] modifications on N_{b} differ from the modification on Y and modifications on N_{b}′ differ from the modification on Y′; and
[0039] wherein the sense strand is conjugated to at least one ligand.

[0040] In one embodiment, i is 0; j is 0; i is 1; j is 1; both i and j are 0; or both i and j are 1. In another embodiment, k is 0;1 is 0; k is 1;1 is 1; both k and 1 are 0; or both k and 1 are 1.

[0041] In one embodiment, XXX is complementary to X′X′X′, YYY is complementary to Y′Y′Y′, and ZZZ is complementary to Z′Z′Z′.

[0042] In one embodiment, the YYY motif occurs at or near the cleavage site of the sense strand, e.g., the Y′Y′Y′ motif occurs at the 11, 12 and 13 positions of the antisense strand from the 5′-end.

[0043] In one embodiment, formula (III) is represented by formula (IIIa):

[chemical structure]

[0044] In another embodiment, formula (III) is represented by formula (IIb):

[chemical structure]

wherein each N_{b} and N_{b}′ independently represents an oligonucleotide sequence comprising 1-5 modified nucleotides.

[0045] In yet another embodiment, formula (III) is represented by formula (IIIc):

[chemical structure]

wherein each N_{b} and N_{b}′ independently represents an oligonucleotide sequence comprising 1-5 modified nucleotides.

[0046] In another embodiment, formula (III) is represented by formula (IIId):

[chemical structure]

wherein each N_{b} and N_{b}′ independently represents an oligonucleotide sequence comprising 1-5 modified nucleotides and each Nₐ and Nₐ′ independently represents an oligonucleotide sequence comprising 2-10 modified nucleotides.

[0047] The region of complementarity may be at least 17 nucleotides in length; 19 to 30 nucleotides in length;19-25 nucleotides in length; or 21 to 23 nucleotides in length.

[0048] Each strand may be no more than 30 nucleotides in length, e.g., each strand is independently 19-30 nucleotides in length.

[0049] In one embodiment, the modifications on the nucleotides are selected from the group consisting of LNA, HNA, CeNA, 2′-methoxyethyl, 2′-O-alkyl, 2′-O-allyl, 2′-C- allyl, 2′-fluoro, 2′-O-methyl, 2′-deoxy, 2′-hydroxyl, and combinations thereof.

[0050] In one embodiment, the modifications on the nucleotides are 2′-O-methyl or 2′-fluoro modifications.

[0051] In one embodiment, the V is a 2′-O-methyl or 2′-flouro modified nucleotide.

[0052] In one embodiment, at least one strand of the dsRNA agent may comprise a 3′ overhang of at least 1 nucleotide; or a 3′ overhang of at least 2 nucleotides.

[0053] In one embodiment, the dsRNA agent further comprises at least one phosphorothioate or methylphosphonate intemucleotide linkage.

[0054] In one embodiment, the phosphorothioate or methylphosphonate intemucleotide linkage is at the 3′-terminus of one strand. In one embodiment, the strand is the antisense strand. In another embodiment, the strand is the sense strand.

[0055] In one embodiment, the phosphorothioate or methylphosphonate intemucleotide linkage is at the 5′-terminus of one strand. In one embodiment, the strand is the antisense strand. In another embodiment, the strand is the sense strand.

[0056] In one embodiment, the strand is the antisense strand. In another embodiment, the strand is the sense strand.

[0057] In one embodiment, the phosphorothioate or methylphosphonate intemucleotide linkage is at both the 5′- and 3′-terminus of one strand.

[0058] In one embodiment, the base pair at the 1 position of the 5′-end of the antisense strand of the duplex is an AU base pair.

[0059] In one embodiment, p′>0. In another embodiment, p′=2.

[0060] In one embodiment, q′=0, p=0, q=0, and p′ overhang nucleotides are complementary to the target mRNA. In another embodiment, q′=0, p=0, q=0, and p′ overhang nucleotides are non-complementary to the target mRNA.

[0061] In one embodiment, the sense strand has a total of 21 nucleotides and the antisense strand has a total of 23 nucleotides.

[0062] In one embodiment, at least one np′ is linked to a neighboring nucleotide via a phosphorothioate linkage. In another embodiment, wherein all np′ are linked to neighboring nucleotides via phosphorothioate linkages.

[0063] In one embodiment, all of the nucleotides of the sense strand and all of the nucleotides of the antisense strand comprise a modification.

[0064] In one embodiment, the ligand is conjugated to the 3′ end of the sense strand of the dsRNA agent.

[0065] In one embodiment, the ligand is one or more N-acetylgalactosamine (GalNAc) derivatives attached through a monovalent, bivalent, or trivalent branched linker.

[0066] In one embodiment, the ligand is

[chemical structure]

[0067] In one embodiment, the dsRNA agent is conjugated to the ligand as shown in the following schematic

[chemical structure]

and, wherein X is O or S.

[0068] In one embodiment, the X is O.

[0069] In one aspect, the present invention provides a double stranded ribonucleic acid (dsRNA) agent for 10 inhibiting the expression of plasminogen (PLG) in a cell. The dsRNA agent includes a sense strand complementary to an antisense strand, wherein the antisense strand comprises a region complementary to part of an mRNA encoding PLG, wherein each strand is about 14 to about 30 nucleotides in length, wherein the dsRNA agent is represented by formula (III):

[chemical structure]

wherein:
[0070] i, j, k, and 1 are each independently 0 or 1;
[0071] p, p′, q, and q′ are each independently 0-6;
[0072] each Nₐ and Nₐ′ independently represents an oligonucleotide sequence comprising 0-25 nucleotides which are either modified or unmodified or combinations thereof, each sequence comprising at least two differently modified nucleotides;
[0073] each N_{b} and N_{b}′ independently represents an oligonucleotide sequence comprising 0-10 nucleotides which are either modified or unmodified or combinations thereof;
[0074] each np, nₚ′, n_{q}, and n_{q}′, each of which may or may not be present independently represents an overhang nucleotide;
[0075] XXX, YYY, ZZZ, X′X′X′, Y′Y′Y′, and Z′Z′Z′ each independently represent one motif of three identical modifications on three consecutive nucleotides, and wherein the modifications are 2′-O-methyl or 2′-fluoro modifications;
[0076] modifications on N_{b} differ from the modification on Y and modifications on N_{b}′ differ from the modification on Y′; and
[0077] wherein the sense strand is conjugated to at least one ligand.

[0078] In one aspect, the present invention provides a double stranded ribonucleic acid (dsRNA) agent for inhibiting the expression of plasminogen (PLG) in a cell. The dsRNA agent includes a sense strand complementary to an antisense strand, wherein the antisense strand comprises a region complementary to part of an mRNA encoding PLG, wherein each strand is about 14 to about 30 nucleotides in length, wherein the dsRNA agent is represented by formula (III):

[chemical structure]

wherein:
[0079] i, j, k, and 1 are each independently 0 or 1;
[0080] each np, n_{q}, and n_{q}′, each of which may or may not be present, independently represents an overhang nucleotide;
[0081] p, q, and q′ are each independently 0-6;
[0082] nₚ′>0 and at least one np′ is linked to a neighboring nucleotide via a phosphorothioate linkage;
[0083] each Nₐ and Nₐ′ independently represents an oligonucleotide sequence comprising 0-25 nucleotides which are either modified or unmodified or combinations thereof, each sequence comprising at least two differently modified nucleotides;
[0084] each N_{b} and N_{b}′ independently represents an oligonucleotide sequence comprising 0-10 nucleotides which are either modified or unmodified or combinations thereof;
[0085] XXX, YYY, ZZZ, X′X′X′, Y′Y′Y′, and Z′Z′Z′ each independently represent one motif of three identical modifications on three consecutive nucleotides, and wherein the modifications are 2′-O-methyl or 2′-fluoro modifications;
[0086] modifications on N_{b} differ from the modification on Y and modifications on N_{b}′ differ from the modification on Y′; and
[0087] wherein the sense strand is conjugated to at least one ligand.

[0088] In one aspect, the present invention provides a double stranded ribonucleic acid (dsRNA) agent for inhibiting the expression of plasminogen (PLG) in a cell. The dsRNA agent includes a sense strand complementary to an antisense strand, wherein the antisense strand comprises a region complementary to part of an mRNA encoding PLG, wherein each strand is about 14 to about 30 nucleotides in length, wherein the dsRNA agent is represented by formula (III):

[chemical structure]

wherein:
[0089] i, j, k, and 1 are each independently 0 or 1;
[0090] each np, n_{q}, and n_{q}′, each of which may or may not be present, independently represents an overhang nucleotide;
[0091] p, q, and q′ are each independently 0-6;
[0092] nₚ′>0 and at least one np′ is linked to a neighboring nucleotide via a phosphorothioate linkage;
[0093] each Nₐ and Nₐ′ independently represents an oligonucleotide sequence comprising 0-25 nucleotides which are either modified or unmodified or combinations thereof, each sequence comprising at least two differently modified nucleotides;
[0094] each N_{b} and N_{b}′ independently represents an oligonucleotide sequence comprising 0-10 nucleotides which are either modified or unmodified or combinations thereof;
[0095] XXX, YYY, ZZZ, X′X′X′, Y′Y′Y′, and Z′Z′Z′ each independently represent one motif of three identical modifications on three consecutive nucleotides, and wherein the modifications are 2′-O-methyl or 2′-fluoro modifications;
[0096] modifications on N_{b} differ from the modification on Y and modifications on N_{b}′ differ from the modification on Y′; and
[0097] wherein the sense strand is conjugated to at least one ligand, wherein the ligand is one or more GalNAc derivatives attached through a monovalent, bivalent, or trivalent branched linker.

[0098] In one aspect, the present invention provides a double stranded ribonucleic acid (dsRNA) agent for inhibiting the expression of plasminogen (PLG) in a cell. The dsRNA agent includes a sense strand complementary to an antisense strand, wherein the antisense strand comprises a region complementary to part of an mRNA encoding PLG, wherein each strand is about 14 to about 30 nucleotides in length, wherein the dsRNA agent is represented by formula (III):

[chemical structure]

wherein:
[0099] i, j, k, and 1 are each independently 0 or 1;
[0100] each np, n_{q}, and n_{q}′, each of which may or may not be present, independently represents an overhang nucleotide;
[0101] p, q, and q′ are each independently 0-6;
[0102] nₚ′>0 and at least one np′ is linked to a neighboring nucleotide via a phosphorothioate linkage;
[0103] each Nₐ and Nₐ′ independently represents an oligonucleotide sequence comprising 0-25 nucleotides which are either modified or unmodified or combinations thereof, each sequence comprising at least two differently modified nucleotides;
[0104] each N_{b} and N_{b}′ independently represents an oligonucleotide sequence comprising 0-10 nucleotides which are either modified or unmodified or combinations thereof;
[0105] XXX, YYY, ZZZ, X′X′X′, Y′Y′Y′, and Z′Z′Z′ each independently represent one motif of three identical modifications on three consecutive nucleotides, and wherein the modifications are 2′-O-methyl or 2′-fluoro modifications;
[0106] modifications on N_{b} differ from the modification on Y and modifications on N_{b}′ differ from the modification on Y′;
[0107] wherein the sense strand comprises at least one phosphorothioate linkage; and wherein the sense strand is conjugated to at least one ligand, wherein the ligand is one or more GalNAc derivatives attached through a monovalent, bivalent, or trivalent branched linker.

[0108] In one aspect, the present invention provides a double stranded ribonucleic acid (dsRNA) agent for inhibiting the expression of plasminogen (PLG) in a cell. The dsRNA agent includes a sense strand complementary to an antisense strand, wherein the antisense strand comprises a region complementary to part of an mRNA encoding PLG, wherein each strand is about 14 to about 30 nucleotides in length, wherein the dsRNA agent is represented by formula (III):

[chemical structure]

wherein:
[0109] each np, n_{q}, and n_{q}′, each of which may or may not be present, independently represents an overhang nucleotide;
[0110] p, q, and q′ are each independently 0-6;
[0111] nₚ′>0 and at least one np′ is linked to a neighboring nucleotide via a phosphorothioate linkage;
[0112] each Nₐ and Nₐ′ independently represents an oligonucleotide sequence comprising 0-25 nucleotides which are either modified or unmodified or combinations thereof, each sequence comprising at least two differently modified nucleotides;
[0113] YYY and Y′Y′Y′ each independently represent one motif of three identical modifications on three consecutive nucleotides, and wherein the modifications are 2′-O-methyl and/or 2′-fluoro modifications;
[0114] wherein the sense strand comprises at least one phosphorothioate linkage; and
[0115] wherein the sense strand is conjugated to at least one ligand, wherein the ligand is one or more GalNAc derivatives attached through a monovalent, bivalent, or trivalent branched linker.

[0116] In one aspect, the present invention provides a double stranded ribonucleic acid (dsRNA) agent for inhibiting the expression of plasminogen (PLG) in a cell. The dsRNA agent includes a sense strand and an antisense strand forming a double stranded region, wherein the sense strand comprises at least 15 contiguous nucleotides differing by no more than 1, 2, or 3 nucleotides from the nucleotide sequence of SEQ ID NO:1 or 3 and the antisense strand comprises at least 15 contiguous nucleotides differing by no more than 1, 2, or 3 nucleotides from the nucleotide sequence of SEQ ID NO:2 or 4, wherein substantially all of the nucleotides of the sense strand comprise a modification selected from the group consisting of a 2′-O-methyl modification and a 2′-fluoro modification, wherein the sense strand comprises two phosphorothioate intemucleotide linkages at the 5′-terminus, wherein substantially all of the nucleotides of the antisense strand comprise a modification selected from the group consisting of a 2′-O-methyl modification and a 2′-fluoro modification, wherein the antisense strand comprises two phosphorothioate intemucleotide linkages at the 5′-terminus and two phosphorothioate intemucleotide linkages at the 3′-terminus, and wherein the sense strand is conjugated to one or more GalNAc derivatives attached through a monovalent, bivalent or trivalent branched linker at the 3′-terminus. In some embodiments, the dsRNA agent includes a sense strand and an antisense strand forming a double stranded region, wherein the sense strand comprises at least 15 contiguous nucleotides from the nucleotide sequence of SEQ ID NO:1 or 3 and the antisense strand comprises at least 15 contiguous nucleotides from the nucleotide sequence of SEQ ID NO:2 or 4, wherein substantially all of the nucleotides of the sense strand comprise a modification selected from the group consisting of a 2′-O-methyl modification and a 2′-fluoro modification, wherein the sense strand comprises two phosphorothioate intemucleotide linkages at the 5′-terminus, wherein substantially all of the nucleotides of the antisense strand comprise a modification selected from the group consisting of a 2′-O-methyl modification and a 2′-fluoro modification, wherein the antisense strand comprises two phosphorothioate intemucleotide linkages at the 5′-terminus and two phosphorothioate intemucleotide linkages at the 3′-terminus, and wherein the sense strand is conjugated to one or more GalNAc derivatives attached through a monovalent, bivalent or trivalent branched linker at the 3′-terminus.

[0117] In one embodiment, all of the nucleotides of the sense strand and all of the nucleotides of the antisense strand are modified nucleotides.

[0118] In one embodiment, the region of complementarity comprises any one of the antisense sequences listed in any one of Tables 3, 4, 5, 6, 7, 8A, or 8B.

[0119] In one embodiment, the sense strand and the antisense strand comprise nucleotide sequences selected from the group consisting of the nucleotide sequences of any one of the agents listed in any one of Tables 3, 4, 5, 6, 7, 8A, or 8B.

[0120] In another aspect, the present invention provides a double stranded ribonucleic acid (dsRNA) agent for inhibiting expression of plasminogen (PLG) in a cell, wherein the dsRNA agent comprises a sense strand and an antisense strand forming a double stranded region. The sense strand comprises a nucleotide sequence of any one of the agents in Tables 3, 4, 5, 6, 7, 8A, or 8B and the antisense strand comprises a nucleotide sequence of any one of the agents in Tables 3, 4, 5, 6, 7, 8A, or 8B. Substantially all of the nucleotides of the sense strand and substantially all of the nucleotides of the antisense strand are modified nucleotides, and the dsRNA agent is conjugated to a ligand.

[0121] In various embodiments of the aforementioned dsRNA agents, the dsRNA agent targets a hotspot region of an mRNA encoding PLG.

[0122] In another aspect, the present invention provides a dsRNA agent that targets a hotspot region of a plasminogen (PLG) mRNA.

[0123] The present invention also provides cells, vectors, and pharmaceutical compositions which include any of the dsRNA agents of the invention. The dsRNA agents may be formulated in an unbuffered solution, e.g., saline or water, or in a buffered solution, e.g., a solution comprising acetate, citrate, prolamine, carbonate, or phosphate or any combination thereof. In one embodiment, the buffered solution is phosphate buffered saline (PBS).

[0124] In one aspect, the present invention provides a method of inhibiting plasminogen (PLG) expression in a cell. The method includes contacting the cell with a dsRNA agent or a pharmaceutical composition of the invention, thereby inhibiting expression of PLG in the cell.

[0125] The cell may be within a subject, such as a human subject.

[0126] In one embodiment, the PLG expression is inhibited by at least 20%, 25%, 30%, 40%, 50%, 60%, 70%, 80%, 90%, 95%, or to below the level of detection of PLG expression. In another embodiment the PLG expression is inhibited by about 50% or less. In a specific embodiment, the PLG expression is inhibited by about 50%.

[0127] In one embodiment, the human subject suffers from a PLG-associated disease, disorder, or condition.

[0128] In one embodiment, the PLG-associated disease, disorder, or condition is a bleeding disorder, such as hereditary hemorrhagic telangiectasia (HHT). In one embodiment, a symptom of the bleeding disorder is heavy menstrual bleeding (HMB). In one embodiment, the bleeding disorder is selected from the group consisting of PAI-1 deficiency, hereditary hemorrhagic telangiectasia (HHT), heavy menstrual bleeding (HMB), von Willebrand disease, low factor XI levels, platelet defects, hemophilia A, hemophilia B, afibrinogenemia, parahemophilia, low factor VIII levels, low factor IX levels, low factor VII levels, low factor XIII levels, low factor X levels, low factor V levels, low factor II levels, nose bleeds, bleeding gums, easy bruising, postpartum bleeding, and excessive bleeding following surgery. In one embodiment, the bleeding disorder is hereditary hemorrhagic telangiectasia (HHT). In one embodiment, the PLG-associated disease, disorder, or condition is a surgical procedure such as cardiac surgery, oral and maxillo-facial surgery, liver surgery, nephrolithotomy, orthopedic surgery, gynecologic surgery, trauma intervention, tooth extraction, or dermatologic procedures. In one embodiment, the subject is treated pre-surgery to prevent excessive bleeding.

[0129] In another embodiment, the PLG-associated disease, disorder, or condition is melasma or hyperpigmentation of the skin.

[0130] In one aspect, the present invention provides a method of inhibiting the expression of PLG in a subject. The methods include administering to the subject a therapeutically effective amount of a dsRNA agent or a pharmaceutical composition of the invention, thereby inhibiting the expression of PLG in the subject.

[0131] In another aspect, the present invention provides a method of treating a subject suffering from a PLG-associated disease, disorder, or condition. The method includes administering to the subject a therapeutically effective amount of a dsRNA agent or a pharmaceutical composition of the invention, thereby treating the subject suffering from a PLG-associated disease, disorder, or condition.

[0132] In another aspect, the present invention provides a method of preventing at least one symptom in a subject having a disease, disorder or condition that would benefit from reduction in expression of a PLG gene.

[0133] The method includes administering to the subject a prophylactically effective amount of the agent of a dsRNA agent or a pharmaceutical composition of the invention, thereby preventing at least one symptom in a subject having a disease, disorder or condition that would benefit from reduction in expression of a PLG gene.

[0134] In one embodiment, the administration of the dsRNA agent or the pharmaceutical composition to the subject causes a decrease in PLG activity, a decrease in PLG protein accumulation, and/or a decrease in excessive bleeding in a subject.

[0135] In one embodiment, the PLG-associated disease, disorder, or condition is a bleeding disorder.

[0136] In one embodiment, a symptom of the bleeding disorder is heavy menstrual bleeding (HMB).

[0137] In one embodiment, the bleeding disorder is hereditary hemorrhagic telangiectasia (HHT).

[0138] In one embodiment, the bleeding disorder is selected from the group consisting of hereditary hemorrhagic telangiectasia (HHT), heavy menstrual bleeding (HMB), PAI-1 deficiency, von Willebrand disease, low factor XI levels, platelet defects, hemophilia A, hemophilia B, afibrinogenemia, parahemophilia, low factor VIII levels, low factor IX levels, low factor VII levels, low factor XIII levels, low factor X levels, low factor V levels, low factor II levels, nose bleeds, bleeding gums, easy bruising, postpartum bleeding, and excessive bleeding following surgery.

[0139] In one embodiment, the PLG-associated disease, disorder, or condition is a surgical procedure such as cardiac surgery, oral and maxillo-facial surgery, liver surgery, nephrolithotomy, orthopedic surgery, gynecologic surgery, trauma intervention, tooth extraction, or dermatologic procedures.

[0140] In one embodiment, the PLG-associated disease, disorder, or condition is melasma or hyperpigmentation of the skin.

[0141] In one embodiment, the subject is treated pre-surgery to prevent excessive bleeding.

[0142] In one embodiment, the bleeding disorder is a mucocutaneous bleeding disorder (MCB). In one embodiment, the mucocutaneous bleeding disorder is selected from the group consisting of inherited platelet disorders (IPD), hereditary hemorrhagic telangiectasia (HHT), hypermobility spectrum disorders (HSD), Ehlers-Danlos syndromes (EDS), and von Willebrand disease (VWD).

[0143] In one embodiment, the methods and uses of the invention further include administering an additional therapeutic to the subject.

[0144] In one embodiment, the dsRNA agent is administered to the subject at a dose of about 0.01 mg/kg to about 10 mg/kg or about 0.5 mg/kg to about 50 mg/kg.

[0145] The agent may be administered to the subject intravenously, intramuscularly, or subcutaneously. In one embodiment, the agent is administered to the subject subcutaneously.

[0146] In one embodiment, the methods and uses of the invention further include determining, the level of PLG in the subject.

[0147] In one aspect, the present invention provides a double stranded ribonucleic acid (dsRNA) agent for inhibiting expression of plasminogen (PLG) in a cell, wherein the dsRNA agent comprises a sense strand and an antisense strand forming a double stranded region, wherein the sense strand comprises a nucleotide sequence of any one of the agents in any one of Tables 3, 4, 5, 6, 7, 8A, or 8B, and the antisense strand comprises a nucleotide sequence of any one of the agents in any one of Tables 3, 4, 5, 6, 7, 8A, or 8B, wherein substantially all of the nucleotide of the sense strand and substantially all of the nucleotides of the antisense strand are modified nucleotides, and wherein the dsRNA agent is conjugated to a ligand.

[0148] In one embodiment, the RNAi agent is a pharmaceutically acceptable salt thereof “Pharmaceutically acceptable salts” of each of RNAi agents herein include, but are not limited to, a sodium salt, a calcium salt, a lithium salt, a potassium salt, an ammonium salt, a magnesium salt, and mixtures thereof One skilled in the art will appreciate that the RNAi agent, when provided as a polycationic salt having one cation per free acid group of the optionally modified phosophodiester backbone and/or any other acidic modifications (e.g., 5′-terminal phosphonate groups). For example, an oligonucleotide of “n” nucleotides in length contains n-1 optionally modified phosophodiesters, so that an oligonucleotide of 21 nt in length may be provided as a salt having up to 20 cations (e.g, 20 sodium cations). Similarly, an RNAi agents having a sense strand of 21 nt in length and an antisense strand of 23 nt in length may be provided as a salt having up to 42 cations (e.g, 42 sodium cations). In the preceding example, where the RNAi agent also includes a 5′-terminal phosphate or a 5′-terminal vinylphosphonate group, the RNAi agent may be provided as a salt having up to 44 cations (e.g, 44 sodium cations).

### BRIEF DESCRIPTION OF THE DRAWINGS

[0149] FIG. 1 depicts the results of a multi-dose in vitro screen with 1100 PLG siRNA duplexes in transfected primary human hepatocytes (PHH). The final duplex concentration was 10 nM (diamond shape), 1 nM (square shape), or 0.1 nM (triangle shape) and the results are plotted relative to the position of the duplex on the human NM_000301 transcript.

[0150] FIG. 2 illustrates the percent plasma PLG antigen remaining (measured by ELISA) in an in vivo single dose study in PXB mice. Exemplary PLG siRNA duplexes were administered at 0.5 mg/kg and PLG levels were measured in plasma at the indicated timepoints.

[0151] FIG. 3 illustrates the percent plasma human PLG antigen remaining (measured by ELISA) in an in vivo single dose study in PXB mice. An exemplary PLG siRNA duplex was administered at 1 mg/kg and 3 mg/kg and PLG levels were measured in plasma at the indicated timepoints.

[0152] FIG. 4 illustrates the percent plasma human PLG antigen remaining (measured by ELISA) in an in vivo single dose study in PXB mice. An exemplary PLG siRNA duplex was administered at 0.3 mg/kg, 1 mg/kg and 3 mg/kg and PLG levels were measured in plasma at the indicated timepoints.

[0153] FIG. 5 illustrates the percent plasma human PLG antigen remaining (measured by ELISA) in an in vivo single dose study in PXB mice. An exemplary PLG siRNA duplex was administered at 0.3 mg/kg, 1 mg/kg and 3 mg/kg and PLG levels were measured in plasma at the indicated timepoints.

### DETAILED DESCRIPTION OF THE INVENTION

[0154] The present invention provides iRNA compositions, which effect the RNA-induced silencing complex (RISC)-mediated cleavage of RNA transcripts of a PLG gene. The PLG gene may be within a cell, e.g., a cell within a subject, such as a human. The present invention also provides methods of using the iRNA compositions of the invention for inhibiting the expression of a PLG gene, and for treating a subject who would benefit from inhibiting or reducing the expression of a PLG gene, e.g., a subject that would benefit from a reduction in bleeding, e.g., a subject suffering or prone to suffering from a PLG-associated disease disorder, or condition, such as a subject suffering or prone to suffering from bleeding disorders (i.e., heavy menstrual bleeding), e.g., a subject suffering from hereditary hemorrhagic telangiectasia (HHT), heavy menstrual bleeding (HMB), PAI-1 deficiency, von Willebrand disease, low factor XI levels, platelet defects, hemophilia A, hemophilia B, afibrinogenemia, parahemophilia, low factor VIII levels, low factor IX levels, low factor VII levels, low factor XIII levels, low factor X levels, low factor V levels, low factor II levels, nose bleeds, bleeding gums, easy bruising, postpartum bleeding, or excessive bleeding following surgery.

[0155] The iRNAs of the invention targeting PLG may include an RNA strand (the antisense strand) having a region which is about 30 nucleotides or less in length, e.g., 15-30, 15-29, 15-28, 15-27, 15-26, 15-25, 15-24, 15-23, 15-22, 15-21, 15-20, 15-19, 15-18, 15-17, 18-30, 18-29, 18-28, 18-27, 18-26, 18-25, 18-24, 18-23, 18-22, 18-21, 18-20, 19-30, 19-29, 19-28, 19-27, 19-26, 19-25, 19-24, 19-23, 19-22, 19-21, 19-20, 20-30, 20-29, 20-28, 20-27, 20-26, 20-25, 20-24,20-23, 20-22, 20-21, 21-30, 21-29, 21-28, 21-27, 21-26, 21-25, 21-24, 21-23, or 21-22 nucleotides in length, which region is substantially complementary to at least part of an mRNA transcript of a PLG gene.

[0156] In some embodiments, one or both of the strands of the double stranded RNAi agents of the invention is up to 66 nucleotides in length, e.g., 36-66, 26-36, 25-36, 31-60, 22-43, 27-53 nucleotides in length, with a region of at least 19 contiguous nucleotides that is substantially complementary to at least a part of an mRNA transcript of a PLG gene. In some embodiments, such iRNA agents having longer length antisense strands may include a second RNA strand (the sense strand) of 20-60 nucleotides in length wherein the sense and antisense strands form a duplex of 18-30 contiguous nucleotides.

[0157] The use of the iRNA agents described herein enables the targeted degradation of mRNAs of a PLG gene in mammals.

[0158] Very low dosages of the iRNAs, in particular, can specifically and efficiently mediate RNA interference (RNAi), resulting in significant inhibition of expression of a PLG gene. Thus, methods and compositions including these iRNAs are useful for treating a subject who would benefit from inhibiting or reducing the expression of a PLG gene, e.g., a subject that would benefit from a reduction of bleeding, e.g., a subject suffering or prone to suffering from a PLG-associated disease disorder, or condition, such as a subject suffering or prone to suffering from bleeding disorder, e.g., a subject suffering from hereditary hemorrhagic telangiectasia (HHT), heavy menstrual bleeding (HMB), PAI-1 deficiency, von Willebrand disease, low factor XI levels, platelet defects, hemophilia A, hemophilia B, afibrinogenemia, parahemophilia, low factor VIII levels, low factor IX levels, low factor VII levels, low factor XIII levels, low factor X levels, low factor V levels, low factor II levels, nose bleeds, bleeding gums, easy bruising, postpartum bleeding, or excessive bleeding following surgery.

[0159] The following detailed description discloses how to make and use compositions containing iRNAs to inhibit the expression of a PLG gene, as well as compositions and methods for treating subjects having diseases and disorders that would benefit from inhibition and/or reduction of the expression of this gene.

### I. Definitions

[0160] In order that the present invention may be more readily understood, certain terms are first defined. In addition, it should be noted that whenever a value or range of values of a parameter are recited, it is intended that values and ranges intermediate to the recited values are also intended to be part of this invention.

[0161] The articles “a” and “an” are used herein to refer to one or to more than one (i.e., to at least one) of the grammatical object of the article. By way of example, “an element” means one element or more than one element, e.g., a plurality of elements.

[0162] The term “including” is used herein to mean, and is used interchangeably with, the phrase “including but not limited to”.

[0163] The term “or” is used herein to mean, and is used interchangeably with, the term “and/or,” unless context clearly indicates otherwise.

[0164] The term “about” is used herein to mean within the typical ranges of tolerances in the art. For example, “about” can be understood as about 2 standard deviations from the mean. In certain embodiments, about means±10%. In certain embodiments, about means±5%. When about is present before a series of numbers or a range, it is understood that “about” can modify each of the numbers in the series or range.

[0165] The term “PLG,” also known as “Plasminogen,” “Plasmin,” “HAE4,” “EC 3.4.21.7,” and “EC 3.4.21,” refers to the well-known gene encoding a PLG protein from any vertebrate or mammalian source, including, but not limited to, human, bovine, chicken, rodent, mouse, rat, porcine, ovine, primate, monkey, and guinea pig, unless specified otherwise.

[0166] The term also refers to fragments and variants of native PLG that maintain at least one in vivo or in vitro activity of a native PLG.

[0167] Plasminogen (PLG) is a serine protease and mediates fibrinolysis or dissolving of fibrin blood clots. PLG is highly expressed by the liver and to a lesser extent by the kidney. Plasminogen is released from the liver into systemic circulation. Since plasminogen is the main driver of fibrinolysis, reducing plasminogen levels or activity could be beneficial in patients with bleeding disorders. Non-limiting examples of bleeding disorders include hereditary hemorrhagic telangiectasia (HHT), heavy menstrual bleeding (HMB), PAI-1 deficiency, von Willebrand disease, low factor XI levels, platelet defects, hemophilia A, hemophilia B, afibrinogenemia, parahemophilia, low factor VIII levels, low factor IX levels, low factor VII levels, low factor XIII levels, low factor X levels, low factor V levels, low factor II levels, nose bleeds, bleeding gums, easy bruising, postpartum bleeding, or excessive bleeding following surgery.

[0168] In one embodiment, the bleeding disorder is a mucocutaneous bleeding disorder (MCB). The biology of MCB is not as well understood as other bleeding disorders, such as hemophilia, and can take a long time to diagnose. MCB symptoms include epistaxis (nosebleeds), heavy menstrual bleeding, post-partum hemorrhage, digestive tract bleeding, easy bruising, prolonged bleeding, and bleeding gums. TXA is used as a treatment to reduce bleeding in MCB patients. Non-limiting examples of mucocutaneous bleeding disorders include inherited platelet disorders (IPD), hereditary hemorrhagic telangiectasia (HHT), hypermobility spectrum disorders (HSD), Ehlers-Danlos syndromes (EDS), and von Willebrand disease (VWD).

[0169] Exemplary nucleotide and amino acid sequences of PLG can be found, for example, at GenBank Accession No. NM_000301.5 (SEQ ID NO: 1; reverse complement SEQ ID NO: 2) and GenBank Accession No. NM_001168338.1 (SEQ ID NO: 3; reverse complement SEQ ID NO: 4) for Homo sapiens PLG; GenBank Accession No. XM_005551498.2 (SEQ ID NO: 685; reverse complement SEQ ID NO: 686) for Macaca fascicularis PLG; GenBank Accession No. NM_008877.3 (SEQ ID NO: 687; reverse complement SEQ ID NO: 688) for Mus musculus PLG; and GenBank Accession No. NM_053491.2 (SEQ ID NO: 689; reverse complement SEQ ID NO: 690) for Rattus norvegicus PLG.

[0170] Additional examples of PLG mRNA sequences are readily available using publicly available databases, e.g., GenBank, UniProt, and OMIM.

[0171] Further information on PLG is provided, for example in the NCBI Gene database at http://www.ncbi.nlm.nih.gov/gene/5340.

[0172] The term “PLG” as used herein also refers to a particular polypeptide expressed in a cell by naturally occurring DNA sequence variations of the PLG gene, such as a single nucleotide polymorphism in the PLG gene. Numerous SNPs within the PLG gene have been identified and may be found at, for example, NCBI dbSNP (see, e.g., www.ncbi.nlm.nih.gov/snp).

[0173] In some aspects, the iRNA that is substantially complementary to a region of a human PLG mRNA cross reacts with mouse PLG mRNA. In some aspects, the iRNA that is substantially complementary to a region of a mouse PLG mRNA cross reacts with human PLG mRNA and represent potential candidates for human targeting. In some embodiments, the iRNA that is substantially complementary to a region of a mouse or human PLG mRNA cross reacts with rat, monkey, and/or rabbit PLG mRNA.

[0174] As used herein, “target sequence” refers to a contiguous portion of the nucleotide sequence of an mRNA molecule formed during the transcription of a PLG gene, including mRNA that is a product of RNA processing of a primary transcription product. In one embodiment, the target portion of the sequence will be at least long enough to serve as a substrate for iRNA-directed cleavage at or near that portion of the nucleotide sequence of an mRNA molecule formed during the transcription of a PLG gene.

[0175] The target sequence of a PLG gene may be from about 9-36 nucleotides in length, e.g., about 15-30 nucleotides in length. For example, the target sequence can be from about 15-30 nucleotides, 15-29, 15-28, 15-27, 15-26, 15-25, 15-24, 15-23, 15-22, 15-21, 15-20, 15-19, 15-18, 15-17, 18-30, 18-29, 18-28, 18-27, 18-26, 18-25, 18-24, 18-23, 18-22, 18-21, 18-20, 19-30, 19-29, 19-28, 19-27, 19-26, 19-25, 19-24, 19-23, 19-22, 19-21, 19-20, 20-30, 20-29, 20-28, 20-27, 20-26, 20-25, 20-24,20-23, 20-22, 20-21, 21-30, 21-29, 21-28, 21-27, 21-26, 21-25, 21-24, 21-23, or 21-22 nucleotides in length. Ranges and lengths intermediate to the above recited ranges and lengths are also contemplated to be part of the invention.

[0176] As used herein, the term “strand comprising a sequence” refers to an oligonucleotide comprising a chain of nucleotides that is described by the sequence referred to using the standard nucleotide nomenclature.

[0177] “G,” “C,” “A,” “T” and “U” each generally stand for a nucleotide that contains guanine, cytosine, adenine, thymidine and uracil as a base, respectively. However, it will be understood that the term “ribonucleotide” or “nucleotide” can also refer to a modified nucleotide, as further detailed below, or a surrogate replacement moiety (see, e.g., Table 2). The skilled person is well aware that guanine, cytosine, adenine, and uracil can be replaced by other moieties without substantially altering the base pairing properties of an oligonucleotide comprising a nucleotide bearing such replacement moiety. For example, without limitation, a nucleotide comprising inosine as its base can base pair with nucleotides containing adenine, cytosine, or uracil. Hence, nucleotides containing uracil, guanine, or adenine can be replaced in the nucleotide sequences of dsRNA featured in the invention by a nucleotide containing, for example, inosine. In another example, adenine and cytosine anywhere in the oligonucleotide can be replaced with guanine and uracil, respectively to form G-U Wobble base pairing with the target mRNA. Sequences containing such replacement moieties are suitable for the compositions and methods featured in the invention.

[0178] The terms “iRNA”, “RNAi agent,” “iRNA agent,”, “RNA interference agent” as used interchangeably herein, refer to an agent that contains RNA as that term is defined herein, and which mediates the targeted cleavage of an RNA transcript via an RNA-induced silencing complex (RISC) pathway. iRNA directs the sequence-specific degradation of mRNA through a process known as RNA interference (RNAi). The iRNA modulates, e.g., inhibits, the expression of PLG gene in a cell, e.g., a cell within a subject, such as a mammalian subject.

[0179] In one embodiment, an RNAi agent of the invention includes a single stranded RNA that interacts with a target RNA sequence, e.g., a PLG target mRNA sequence, to direct the cleavage of the target RNA. Without wishing to be bound by theory it is believed that long double stranded RNA introduced into cells is broken down into siRNA by a Type III endonuclease known as Dicer (Sharp et al. (2001) Genes Dev. 15:485). Dicer, a ribonuclease-III-like enzyme, processes the dsRNA into 19-23 base pair short interfering RNAs with characteristic two base 3′ overhangs (Bernstein, et al., (2001) Nature 409:363). The siRNAs are then incorporated into an RNA-induced silencing complex (RISC) where one or more helicases unwind the siRNA duplex, enabling the complementary antisense strand to guide target recognition (Nykanen, et al., (2001) Cell 107:309). Upon binding to the appropriate target mRNA, one or more endonucleases within the RISC cleave the target to induce silencing (Elbashir, et al., (2001) Genes Dev. 15:188). Thus, in one aspect the invention relates to a single stranded RNA (ssRNA) generated within a cell and which promotes the formation of a RISC complex to effect silencing of the target gene, i.e., a PLG gene. Accordingly, the term “siRNA” is also used herein to refer to an RNAi as described above.

[0180] In another embodiment, the RNAi agent may be a single-stranded RNAi agent that is introduced into a cell or organism to inhibit a target mRNA. Single-stranded RNAi agents (ssRNAi) bind to the RISC endonuclease, Argonaute 2, which then cleaves the target mRNA. The single-stranded siRNAs are generally 15-30 nucleotides and are chemically modified. The design and testing of single-stranded RNAi agents are described in U.S. Pat. No. 8,101,348 and in Lima et al., (2012) Cell 150: 883-894, the entire contents of each of which are hereby incorporated herein by reference. Any of the antisense nucleotide sequences described herein may be used as a single-stranded siRNA as described herein or as chemically modified by the methods described in Lima et al., (2012) Cell 150;:883-894.

[0181] In another embodiment, an “iRNA” for use in the compositions and methods of the invention is a double-stranded RNA and is referred to herein as a “double stranded RNAi agent,” “double-stranded RNA (dsRNA) molecule,” “dsRNA agent,” or “dsRNA”. The term “dsRNA”, refers to a complex of ribonucleic acid molecules, having a duplex structure comprising two anti-parallel and substantially complementary nucleic acid strands, referred to as having “sense” and “antisense” orientations with respect to a target RNA, i.e., a PLG gene. In some embodiments of the invention, a double-stranded RNA (dsRNA) triggers the degradation of a target RNA, e.g., an mRNA, through a post-transcriptional gene-silencing mechanism referred to herein as RNA interference or RNAi.

[0182] In general, the majority of nucleotides of each strand of a dsRNA molecule are ribonucleotides, but as described in detail herein, each or both strands can also include one or more non-ribonucleotides, e.g., a deoxyribonucleotide and/or a modified nucleotide. In addition, as used in this specification, an “RNAi agent” may include ribonucleotides with chemical modifications; an RNAi agent may include substantial modifications at multiple nucleotides. As used herein, the term “modified nucleotide” refers to a nucleotide having, independently, a modified sugar moiety, a modified internucleotide linkage, and/or a modified nucleobase. Thus, the term modified nucleotide encompasses substitutions, additions or removal of, e.g., a functional group or atom, to internucleoside linkages, sugar moieties, or nucleobases. The modifications suitable for use in the agents of the invention include all types of modifications disclosed herein or known in the art. Any such modifications, as used in a siRNA type molecule, are encompassed by “RNAi agent” for the purposes of this specification and claims.

[0183] The duplex region may be of any length that permits specific degradation of a desired target RNA through a RISC pathway, and may range from about 9 to 36 base pairs in length, e.g., about 15-30 base pairs in length, for example, about 9, 10, 11, 12, 13, 14, 15, 16, 17, 18, 19, 20, 21, 22, 23, 24, 25, 26, 27, 28, 29, 30, 31, 32, 33, 34, 35, or 36 base pairs in length, such as about 15-30, 15-29, 15-28, 15-27, 15-26, 15-25, 15-24, 15-23, 15-22, 15-21, 15-20, 15-19, 15-18, 15-17, 18-30, 18-29, 18-28, 18-27, 18-26, 18-25, 18-24, 18-23, 18-22, 18-21, 18-20, 19-30, 19-29, 19-28, 19-27, 19-26, 19-25, 19-24, 19-23, 19-22, 19-21, 19-20, 20-30, 20-29, 20-28, 20-27, 20-26, 20-25, 20-24,20-23, 20-22, 20-21, 21-30, 21-29, 21-28, 21-27, 21-26, 21-25, 21-24, 21-23, or 21-22 base pairs in length. Ranges and lengths intermediate to the above recited ranges and lengths are also contemplated to be part of the invention.

[0184] The two strands forming the duplex structure may be different portions of one larger RNA molecule, or they may be separate RNA molecules. Where the two strands are part of one larger molecule, and therefore are connected by an uninterrupted chain of nucleotides between the 3′-end of one strand and the 5′-end of the respective other strand forming the duplex structure, the connecting RNA chain is referred to as a “hairpin loop.” A hairpin loop can comprise at least one unpaired nucleotide. In some embodiments, the hairpin loop can comprise at least 2, at least 3, at least 4, at least 5, at least 6, at least 7, at least 8, at least 9, at least 10, at least 20, at least 23 or more unpaired nucleotides.

[0185] Where the two substantially complementary strands of a dsRNA are comprised by separate RNA molecules, those molecules need not, but can be covalently connected. Where the two strands are connected covalently by means other than an uninterrupted chain of nucleotides between the 3′-end of one strand and the 5′-end of the respective other strand forming the duplex structure, the connecting structure is referred to as a “linker.” The RNA strands may have the same or a different number of nucleotides. The maximum number of base pairs is the number of nucleotides in the shortest strand of the dsRNA minus any overhangs that are present in the duplex. In addition to the duplex structure, an RNAi may comprise one or more nucleotide overhangs.

[0186] In one embodiment, an RNAi agent of the invention is a dsRNA, each strand of which comprises less than 30 nucleotides, e.g., 17-27, 19-27, 17-25, 19-25, or 19-23, that interacts with a target RNA sequence, e.g., a PLG target mRNA sequence, to direct the cleavage of the target RNA. In another embodiment, an RNAi agent of the invention is a dsRNA, each strand of which comprises 19-23 nucleotides, that interacts with a target RNA sequence, e.g., a PLG target mRNA sequence, to direct the cleavage of the target RNA. In one embodiment, the sense strand is 21 nucleotides in length. In another embodiment, the antisense strand is 23 nucleotides in length.

[0187] As used herein, the term “nucleotide overhang” refers to at least one unpaired nucleotide that protrudes from the duplex structure of an iRNA, e.g., a dsRNA. For example, when a 3-end of one strand of a dsRNA extends beyond the 5-end of the other strand, or vice versa, there is a nucleotide overhang. A dsRNA can comprise an overhang of at least one nucleotide; alternatively, the overhang can comprise at least two nucleotides, at least three nucleotides, at least four nucleotides, at least five nucleotides or more. A nucleotide overhang can comprise or consist of a nucleotide/nucleoside analog, including a deoxynucleotide/nucleoside.

[0188] The overhang(s) can be on the sense strand, the antisense strand or any combination thereof Furthermore, the nucleotide(s) of an overhang can be present on the 5-end, 3-end or both ends of either an antisense or sense strand of a dsRNA.

[0189] In one embodiment, the antisense strand of a dsRNA has a 1-10 nucleotide, e.g., a 1, 2, 3, 4, 5, 6, 7, 8, 9, or 10 nucleotide, overhang at the 3′-end and/or the 5′-end. In one embodiment, the sense strand of a dsRNA has a 1-10 nucleotide, e.g., a 1, 2, 3, 4, 5, 6, 7, 8, 9, or 10 nucleotide, overhang at the 3′-end and/or the 5′-end. In another embodiment, one or more of the nucleotides in the overhang is replaced with a nucleoside thiophosphate.

[0190] In certain embodiments, the overhang on the sense strand or the antisense strand, or both, can include extended lengths longer than 10 nucleotides, e.g., 10-30 nucleotides, 10-25 nucleotides, 10-20 nucleotides or 10-15 nucleotides in length. In certain embodiments, an extended overhang is on the sense strand of the duplex. In certain embodiments, an extended overhang is present on the 3′end of the sense strand of the duplex. In certain embodiments, an extended overhang is present on the 5′end of the sense strand of the duplex. In certain embodiments, an extended overhang is on the antisense strand of the duplex. In certain embodiments, an extended overhang is present on the 3′end of the antisense strand of the duplex. In certain embodiments, an extended overhang is present on the 5′end of the antisense strand of the duplex. In certain embodiments, one or more of the nucleotides in the extended overhang is replaced with a nucleoside thiophosphate.

[0191] The terms “blunt” or “blunt ended” as used herein in reference to a dsRNA mean that there are no unpaired nucleotides or nucleotide analogs at a given terminal end of a dsRNA, i.e., no nucleotide overhang. One or both ends of a dsRNA can be blunt. Where both ends of a dsRNA are blunt, the dsRNA is said to be blunt ended. To be clear, a “blunt ended” dsRNA is a dsRNA that is blunt at both ends, i.e., no nucleotide overhang at either end of the molecule. Most often such a molecule will be double-stranded over its entire length.

[0192] The term “antisense strand” or “guide strand” refers to the strand of an iRNA, e.g., a dsRNA, which includes a region that is substantially complementary to a target sequence, e.g., a PLG mRNA.

[0193] As used herein, the term “region of complementarity” refers to the region on the antisense strand that is substantially complementary to a sequence, for example a target sequence, e.g., a PLG nucleotide sequence, as defined herein. Where the region of complementarity is not fully complementary to the target sequence, the mismatches can be in the internal or terminal regions of the molecule. Generally, the most tolerated mismatches are in the terminal regions, e.g., within 5, 4, 3, or 2 nucleotides of the 5′- and/or 3′-terminus of the iRNA.

[0194] The term “sense strand” or “passenger strand” as used herein, refers to the strand of an iRNA that includes a region that is substantially complementary to a region of the antisense strand as that term is defined herein.

[0195] As used herein, the term “cleavage region” refers to a region that is located immediately adjacent to the cleavage site. The cleavage site is the site on the target at which cleavage occurs. In some embodiments, the cleavage region comprises three bases on either end of, and immediately adjacent to, the cleavage site. In some embodiments, the cleavage region comprises two bases on either end of, and immediately adjacent to, the cleavage site. In some embodiments, the cleavage site specifically occurs at the site bound by nucleotides 10 and 11 of the antisense strand, and the cleavage region comprises nucleotides 11, 12 and 13.

[0196] As used herein, and unless otherwise indicated, the term “complementary,” when used to describe a first nucleotide sequence in relation to a second nucleotide sequence, refers to the ability of an oligonucleotide or polynucleotide comprising the first nucleotide sequence to hybridize and form a duplex structure under certain conditions with an oligonucleotide or polynucleotide comprising the second nucleotide sequence, as will be understood by the skilled person. Such conditions can, for example, be stringent conditions, where stringent conditions can include: 400 mM NaCl, 40 mM PIPES pH 6.4, 1 mM EDTA, 50° C. or 70° C. for 12-16 hours followed by washing (see, e.g., “Molecular Cloning: A Laboratory Manual, Sambrook, et al. (1989) Cold Spring Harbor Laboratory Press). Other conditions, such as physiologically relevant conditions as can be encountered inside an organism, can apply. The skilled person will be able to determine the set of conditions most appropriate for a test of complementarity of two sequences in accordance with the ultimate application of the hybridized nucleotides.

[0197] Complementary sequences within an iRNA, e.g., within a dsRNA as described herein, include base-pairing of the oligonucleotide or polynucleotide comprising a first nucleotide sequence to an oligonucleotide or polynucleotide comprising a second nucleotide sequence over the entire length of one or both nucleotide sequences. Such sequences can be referred to as “fully complementary” with respect to each other herein. However, where a first sequence is referred to as “substantially complementary” with respect to a second sequence herein, the two sequences can be fully complementary, or they can form one or more, but generally not more than 5, 4, 3 or 2 mismatched base pairs upon hybridization for a duplex up to 30 base pairs, while retaining the ability to hybridize under the conditions most relevant to their ultimate application, e.g., inhibition of gene expression via a RISC pathway. However, where two oligonucleotides are designed to form, upon hybridization, one or more single stranded overhangs, such overhangs shall not be regarded as mismatches with regard to the determination of complementarity. For example, a dsRNA comprising one oligonucleotide 21 nucleotides in length and another oligonucleotide 23 nucleotides in length, wherein the longer oligonucleotide comprises a sequence of 21 nucleotides that is fully complementary to the shorter oligonucleotide, can yet be referred to as “fully complementary” for the purposes described herein. “Complementary” sequences, as used herein, can also include, or be formed entirely from, non-Watson-Crick base pairs and/or base pairs formed from non-natural and modified nucleotides, in so far as the above requirements with respect to their ability to hybridize are fulfilled. Such non-Watson-Crick base pairs include, but are not limited to, G:U Wobble or Hoogstein base pairing.

[0198] The terms “complementary,” “fully complementary” and “substantially complementary” herein can be used with respect to the base matching between the sense strand and the antisense strand of a dsRNA, or between the antisense strand of an iRNA agent and a target sequence, as will be understood from the context of their use.

[0199] As used herein, a polynucleotide that is “substantially complementary to at least part of” a messenger RNA (mRNA) refers to a polynucleotide that is substantially complementary to a contiguous portion of the mRNA of interest (e.g., an mRNA encoding PLG). For example, a polynucleotide is complementary to at least a part of a PLG mRNA if the sequence is substantially complementary to a non-interrupted portion of an mRNA encoding PLG.

[0200] Accordingly, in some embodiments, the antisense strand polynucleotides disclosed herein are fully complementary to the target PLG sequence. In other embodiments, the antisense strand polynucleotides disclosed herein are substantially complementary to the target PLG sequence and comprise a contiguous nucleotide sequence which is at least about 80% complementary over its entire length to the equivalent region of the nucleotide sequence of SEQ ID NO:1 or 3, or a fragment of SEQ ID NO:1 or 3, such as about 85%, about 86%, about 87%, about 88%, about 89%, about 90%, about % 91%, about 92%, about 93%, about 94%, about 95%, about 96%, about 97%, about 98%, or about 99% complementary.

[0201] In one embodiment, an RNAi agent of the invention includes a sense strand that is substantially complementary to an antisense polynucleotide which, in turn, is complementary to a target PLG sequence, and wherein the sense strand polynucleotide comprises a contiguous nucleotide sequence which is at least about 80% complementary over its entire length to the equivalent region of the nucleotide sequence of SEQ ID NO: 2 or 4, or a fragment of any one of SEQ ID NO: 2 or 4, such as about 85%, about 86%, about 87%, about 88%, about 89%, about 90%, about % 91%, about 92%, about 93%, about 94%, about 95%, about 96%, about 97%, about 98%, or about 99% complementary.

[0202] In some embodiments, an iRNA of the invention includes an antisense strand that is substantially complementary to the target PLG sequence and comprises a contiguous nucleotide sequence which is at least about 80% complementary over its entire length to the equivalent region of the nucleotide sequence of any one of the sense strands in any one of Tables 3, 4, 5, 6, 7, 8A, or 8B, or a fragment of any one of the sense strands in any one of Tables 3, 4, 5, 6, 7, 8A, or 8B, such as about 85%, 86%, 87%, 88%, 89%, 90%, 91%, 92%, 93%, 94%, 95%, 96%, 97%, 98%, or 99% complementary, or 100% complementary.

[0203] The term “inhibiting,” as used herein, is used interchangeably with “reducing,” “silencing,” “downregulating,” “suppressing” and other similar terms, and includes any level of inhibition.

[0204] The phrase “inhibiting expression of a PLG gene,” as used herein, includes inhibition of expression of any PLG gene (such as, e.g., a mouse PLG gene, a rat PLG gene, a monkey PLG gene, or a human PLG gene) as well as variants or mutants of a PLG gene that encode a PLG protein. “Inhibiting expression of a PLG gene” includes any level of inhibition of a PLG gene, e.g., at least partial suppression of the expression of a PLG gene, such as an inhibition by at least about 20%. In certain embodiments, inhibition is by at least about 25%, at least about 30%, at least about 35%, at least about 40%, at least about 45%, at least about 50%, at least about 55%, at least about 60%, at least about 65%, at least about 70%, at least about 75%, at least about 80%, at least about 85%, at least about 90%, at least about 91%, at least about 92%, at least about 93%, at least about 94%, at least about 95%, at least about 96%, at least about 97%, at least about 98%, or at least about 99%. In some embodiments, inhibition is by at least about 50%.

[0205] The expression of a PLG gene may be assessed based on the level of any variable associated with PLG gene expression, e.g., PLG mRNA level or PLG protein level. The expression of a PLG gene may also be assessed indirectly based on, for example, the levels of PLG activity in a tissue sample, such as a liver sample. Inhibition may be assessed by a decrease in an absolute or relative level of one or more of these variables compared with a control level. The control level may be any type of control level that is utilized in the art, e.g., a pre-dose baseline level, or a level determined from a similar subject, cell, or sample that is untreated or treated with a control (such as, e.g., buffer only control or inactive agent control).

[0206] In one embodiment, at least partial suppression of the expression of a PLG gene, is assessed by a reduction of the amount of PLG mRNA which can be isolated from, or detected, in a first cell or group of cells in which a PLG gene is transcribed and which has or have been treated such that the expression of a PLG gene is inhibited, as compared to a second cell or group of cells substantially identical to the first cell or group of cells but which has or have not been so treated (control cells).

[0207] The degree of inhibition may be expressed in terms of:

$$\frac{( mRNA in control cells ) - ( mRNA in treated cells )}{( mRNA in control cells )} \cdot 100 \%$$

[0208] The phrase “contacting a cell with an RNAi agent,” such as a dsRNA, as used herein, includes contacting a cell by any possible means. Contacting a cell with an RNAi agent includes contacting a cell in vitro with the iRNA or contacting a cell in vivo with the iRNA. The contacting may be done directly or indirectly. Thus, for example, the RNAi agent may be put into physical contact with the cell by the individual performing the method, or alternatively, the RNAi agent may be put into a situation that will permit or cause it to subsequently come into contact with the cell.

[0209] Contacting a cell in vitro may be done, for example, by incubating the cell with the RNAi agent. Contacting a cell in vivo may be done, for example, by injecting the RNAi agent into or near the tissue where the cell is located, or by injecting the RNAi agent into another area, e.g., the bloodstream or the subcutaneous space, such that the agent will subsequently reach the tissue where the cell to be contacted is located. For example, the RNAi agent may contain and/or be coupled to a ligand, e.g., GalNAc3, that directs the RNAi agent to a site of interest, e.g., the liver. Combinations of in vitro and in vivo methods of contacting are also possible. For example, a cell may also be contacted in vitro with an RNAi agent and subsequently transplanted into a subject.

[0210] In one embodiment, contacting a cell with an iRNA includes “introducing” or “delivering the iRNA into the cell” by facilitating or effecting uptake or absorption into the cell. Absorption or uptake of an iRNA can occur through unaided diffusive or active cellular processes, or by auxiliary agents or devices.

[0211] Introducing an iRNA into a cell may be in vitro and/or in vivo. For example, for in vivo introduction, iRNA can be injected into a tissue site or administered systemically. In vivo delivery can also be done by a beta-glucan delivery system, such as those described in U.S. Pat. Nos. 5,032,401 and 5,607,677, and U.S.

[0212] Publication No. 2005/0281781, the entire contents of which are hereby incorporated herein by reference. In vitro introduction into a cell includes methods known in the art such as electroporation and lipofection. Further approaches are described herein below and/or are known in the art.

[0213] The term “lipid nanoparticle” or “LNP” is a vesicle comprising a lipid layer encapsulating a pharmaceutically active molecule, such as a nucleic acid molecule, e.g., an iRNA or a plasmid from which an iRNA is transcribed. LNPs are described in, for example, U.S. Pat. Nos. 6,858,225, 6,815,432, 8,158,601, and 8,058,069, the entire contents of which are hereby incorporated herein by reference.

[0214] As used herein, a “subject” is an animal, such as a mammal, including a primate (such as a human, a non-human primate, e.g., a monkey, and a chimpanzee), a non-primate (such as a cow, a pig, a camel, a llama, a horse, a goat, a rabbit, a sheep, a hamster, a guinea pig, a cat, a dog, a rat, a mouse, a horse, and a whale), or a bird (e.g., a duck or a goose).

[0215] In an embodiment, the subject is a human, such as a human being treated or assessed for a disease, disorder or condition that would benefit from reduction in PLG expression; a human at risk for a disease, disorder or condition that would benefit from reduction in PLG expression; a human having a disease, disorder or condition that would benefit from reduction in PLG expression; and/or human being treated for a disease, disorder or condition that would benefit from reduction in PLG expression as described herein.

[0216] As used herein, the terms “treating” or “treatment” refer to a beneficial or desired result including, but not limited to, alleviation or amelioration of one or more symptoms associated with PLG gene expression and/or PLG protein production, e.g., a PLG-associated disease, such as a bleeding disorder (i.e., heavy menstrual bleeding) and melasma. In one embodiment, the bleeding disorder is hereditary hemorrhagic telangiectasia (HHT). In one embodiment, the bleeding disorder is heavy menstrual bleeding (HMB). In another embodiment, the bleeding disorder is selected from the group consisting of PAI-1 deficiency, hereditary hemorrhagic telangiectasia (HHT), von Willebrand disease, low factor XI levels, platelet defects, hemophilia A, hemophilia B, afibrinogenemia, parahemophilia, low factor VIII levels, low factor IX levels, low factor VII levels, low factor XIII levels, low factor X levels, low factor V levels, low factor II levels, nose bleeds, bleeding gums, easy bruising, postpartum bleeding, and excessive bleeding following surgery. “Treatment” can also mean prolonging survival as compared to expected survival in the absence of treatment.

[0217] The term “lower” in the context of a PLG-associated disease refers to a statistically significant decrease in such level. The decrease can be, for example, at least 10%, at least 15%, at least 20%, at least 25%, at least 30%, at least 35%, at least 40%, at least 45%, at least 50%, at least 55%, at least 60%, at least 65%, at least 70%, at least 75%, at least 80%, at least 85%, at least 90%, at least 95%, or more. In certain embodiments, a decrease is at least 20%. “Lower” in the context of the level of PLG in a subject is preferably down to a level accepted as within the range of normal for an individual without such disorder.

[0218] As used herein, “prevention” or “preventing,” when used in reference to a disease, disorder or condition thereof, that would benefit from a reduction in expression of a PLG gene, refers to a reduction in the likelihood that a subject will develop a symptom associated with such disease, disorder, or condition, e.g., a symptom of PLG gene expression, such as excessive bleeding. The failure to develop a disease, disorder or condition, or the reduction in the development of a symptom associated with such a disease, disorder or condition (e.g., by at least about 10% on a clinically accepted scale for that disease or disorder), or the exhibition of delayed symptoms (e.g., reduction in bleeding) delayed (e.g., by days, weeks, months or years) is considered effective prevention.

[0219] As used herein, the term “PLG-associated disease,” is a disease or disorder that is caused by, or associated with, PLG gene expression or PLG protein production. The term “PLG-associated disease” includes a disease, disorder or condition that would benefit from a decrease in PLG gene expression or protein activity.

[0220] In one embodiment, an “PLG-associated disease” is a bleeding disorder. A “bleeding disorder” is any disease, disorder, or condition associated with heavy or excessive bleeding. Non-limiting examples of a bleeding disorder include hereditary hemorrhagic telangiectasia (HHT), heavy menstrual bleeding (HMB), PAI-1 deficiency, von Willebrand disease, low factor XI levels, platelet defects, hemophilia A, hemophilia B, afibrinogenemia, parahemophilia, low factor VIII levels, low factor IX levels, low factor VII levels, low factor XIII levels, low factor X levels, low factor V levels, low factor II levels, nose bleeds, bleeding gums, easy bruising, postpartum bleeding, and excessive bleeding following surgery.

[0221] In one embodiment, the bleeding disorder is hereditary hemorrhagic telangiectasia (HHT). HHT is a genetic blood vessel disorder which leads to excessive bleeding, affecting males and females of all ages and all ethnic backgrounds. There are about 70,000 HHT patients in the United States and 1.4 million with HHT worldwide. There are three known genetic mutations in the TGFP pathway in HHT, including mutations in the Endoglin, Smad4, and ALK1 genes which are involved in endothelial migration during angiogenesis and vascular remodeling. Patients with HHT have abnormal fragile blood vessels that bleed easily and have locally increased fibrinolysis and vascular malformations, such as telangiectasia and arteriovenous malformations. 5 About 90% of people with HHT have recurring nosebleeds varying in frequency and severity, with nosebleeds greater than 5 times a week and nosebleeds lasting greater than five hours which may require emergency room visits and transfusions. Patients with HHT also may experience gastrointestinal bleeding, heavy menstrual bleeding (HMB), anemia, and frequent iron/blood transfusions.

[0222] There are currently no FDA approved drugs for treating HHT. Tranexamic acid (TXA) is an oral antifibrinolytic drug that is used off-label in HHT patients but is not an ideal therapy as it has poor bioavailability, a high pill burden (2 large tablets, 3-4 times a day), and off target side effects. Therefore, there is a need for a long-lasting effective therapy for HHT. In one embodiment, a symptom of a bleeding disorder can be heavy menstrual bleeding (HMB).

[0223] HMB is excessive menstrual blood loss which interferes with a woman's physical, social, emotional and/or material quality of life. One in five women aged 30-55 years perceive their menstrual bleeding to be abnormal. HMB is a significant burden for more than 10 million American women each year. HMB is associated with iron deficiency anemia, fatigue, and time lost from school/work/activities. Greater than $1 billion is spent every year for the treatment of HMB.

[0224] Causes of HMB are classified by the acronym PALM-COEIN: Polyp, Adenomyosis, Leiomyoma, Malignancy, Coagulopathy, Ovulatory dysfunction, endometrial, latrogenic (for example, copper IUD intrauterine system), and not otherwise specified (for example, a caesarean scar defect). Uterine fibroids and polyps are among the most reported drivers of HMB. Approximately 30% of women with HMB have a known bleeding disorder, such as von Willebrand disease, Low factor XI levels, or platelet defects. Approximately 50% of women with HMB have no pathology implicated as a cause.

[0225] The standard of care for HMB includes tranexamic acid (TXA), an inhibitor of plasminogen activation; intrauterine devices (IUDs), such as Mirena; and/or oral contraceptive pills (OCPs). TXA is typically used in women who do not want or cannot tolerate hormones. Treatment can include layering of OCP or TXA with an IUD.

[0226] However, these treatments have side effects which can cause discontinuation. Approximately 40% of women with HMB discontinue Mirena IUD within two years due to lack of effectiveness (60%), hormonal side effects (20%) and irregular bleeding. Fifteen percent of women with an IUD required add-on TXA. Other side effects include perforation into the wall of the uterus, expulsion or displacement of the IUD, bleeding between periods, headaches, acne, and breast tenderness. Side effects of OCPs include nausea, breast tenderness, headaches, decreased libido, and thrombosis. TXA, which inhibits PLG activity, has side effects including menstrual discomfort, headache, back pain, nausea and vomiting, and musculoskeletal pain. Off-target inhibition of spinal GABA_{A} (γ-Aminobutyric acid type A) and glycine receptors by TXA can dysregulate pain processing and increase risk of seizures (Ohashi et al., 2015, Sci Rep. 5:13458). Therefore, there is a need for alternative treatments for HMB.

[0227] The dsRNA agents provided herein for inhibiting expression of plasminogen can be used to treat bleeding disorders, such as HMB. The potential advantages of a plasminogen lowering siRNA approach versus current standard of care in HMB is that siRNA is a non-hormonal option thereby avoiding the hormonal side effects of OCP and Mirena IUD, avoid the side-effects of TXA, infrequent administration, and potentially lower thrombotic risk.

[0228] Patients with genetic disorders resulting in plasminogen deficiency (e.g., type I or type II plasminogen deficiency), do not have an increased risk of thrombosis deficiency (Schuster V. et al., 2007, J Thromb Haemost. 5: 2315-22). However, these patients, having little to no PLG activity, experience ligneous lesions caused by the deposition of fibrin including ligneous conjunctivitis, ligneous gingivitis, ligneous cervicitis, and ligneous endometritis. Treatment for patients with plasminogen deficiency includes i.v. infusion (administered every 2-4 days) of purified, human plasma-donor derived Glu-plasminogen. Studies with TXA indicate that a lower dose of TXA may be equally as effective in treating HMB as the standard dosing. (The minimal effective dose of tranexamic acid in women with menorrhagia XXIV Congress of the International Society on Thrombosis and Haemostasis (2013)). Therefore, less potent plasminogen suppression of approximately 50% or less may be sufficient. Accordingly, to minimize side effects of PLG deficiency, such as development of lesions, the knockdown of PLG by the dsRNA agents provided herein can be selected or designed to achieve a 50% or less knockdown of PLG. In some embodiments, the dsRNA agents provided herein reduce PLG expression by about 50%, 45%, 40%, 45%, 30%, 25%, 20%, 15%, 10%, 5%, or less.

[0229] In one embodiment, a person that would benefit from a decrease in PLG gene expression or protein activity is a woman with fibroids. In some embodiments, a person that would benefit from a decrease in PLG gene expression or protein activity is a woman with HMB that has fibroids, has a known bleeding disorder, has bleeding of unknown cause for whom IUD or OCP are not sufficient, already takes tranexamic acid (TXA), does not tolerate hormonal therapy (IUD or OCP), does not tolerate TXA, or does not want surgery or hormonal options. “Therapeutically effective amount,” as used herein, is intended to include the amount of an RNAi agent that, when administered to a subject having a PLG-associated disease, disorder, or condition, is sufficient to effective treatment of the disease (e.g., by diminishing, ameliorating or maintaining the existing disease or one or more symptoms of disease). The “therapeutically effective amount” may vary depending on the RNAi agent, how the agent is administered, the disease and its severity and the history, age, weight, family history, genetic makeup, the types of preceding or concomitant treatments, if any, and other individual characteristics of the subject to be treated.

[0230] “Prophylactically effective amount,” as used herein, is intended to include the amount of an iRNA that, when administered to a subject having a PLG-associated disease, disorder, or condition, is sufficient to prevent or ameliorate the disease or one or more symptoms of the disease. Ameliorating the disease includes slowing the course of the disease or reducing the severity of later-developing disease. The “prophylactically effective amount” may vary depending on the iRNA, how the agent is administered, the degree of risk of disease, and the history, age, weight, family history, genetic makeup, the types of preceding or concomitant treatments, if any, and other individual characteristics of the patient to be treated.

[0231] A “therapeutically-effective amount” or “prophylactically effective amount” also includes an amount of an RNAi agent that produces some desired local or systemic effect at a reasonable benefit/risk ratio applicable to any treatment. iRNA employed in the methods of the present invention may be administered in a sufficient amount to produce a reasonable benefit/risk ratio applicable to such treatment.

[0232] The phrase “pharmaceutically acceptable” is employed herein to refer to those compounds, materials, compositions, and/or dosage forms which are, within the scope of sound medical judgment, suitable for use in contact with the tissues of human subjects and animal subjects without excessive toxicity, irritation, allergic response, or other problem or complication, commensurate with a reasonable benefit/risk ratio.

[0233] The phrase “pharmaceutically-acceptable carrier” as used herein means a pharmaceutically-acceptable material, composition or vehicle, such as a liquid or solid filler, diluent, excipient, manufacturing aid (e.g., lubricant, talc magnesium, calcium or zinc stearate, or steric acid), or solvent encapsulating material, involved in carrying or transporting the subject compound from one organ, or portion of the body, to another organ, or portion of the body. Each carrier must be “acceptable” in the sense of being compatible with the other ingredients of the formulation and not injurious to the subject being treated. Some examples of materials which can serve as pharmaceutically-acceptable carriers include: (1) sugars, such as lactose, glucose and sucrose; (2) starches, such as corn starch and potato starch; (3) cellulose, and its derivatives, such as sodium carboxymethyl cellulose, ethyl cellulose and cellulose acetate; (4) powdered tragacanth; (5) malt; (6) gelatin; (7) lubricating agents, such as magnesium state, sodium lauryl sulfate and talc; (8) excipients, such as cocoa butter and suppository waxes; (9) oils, such as peanut oil, cottonseed oil, safflower oil, sesame oil, olive oil, corn oil and soybean oil; (10) glycols, such as propylene glycol; (11) polyols, such as glycerin, sorbitol, mannitol and polyethylene glycol; (12) esters, such as ethyl oleate and ethyl laurate; (13) agar; (14) buffering agents, such as magnesium hydroxide and aluminum hydroxide; (15) alginic acid; (16) pyrogen-free water; (17) isotonic saline; (18) Ringer's solution; (19) ethyl alcohol; (20) pH buffered solutions; (21) polyesters, polycarbonates and/or polyanhydrides; (22) bulking agents, such as polypeptides and amino acids (23) serum component, such as serum albumin, HDL and LDL; and (22) other non-toxic compatible substances employed in pharmaceutical formulations.

[0234] The term “sample,” as used herein, includes a collection of similar fluids, cells, or tissues isolated from a subject, as well as fluids, cells, or tissues present within a subject. Examples of biological fluids include blood, serum and serosal fluids, plasma, cerebrospinal fluid, ocular fluids, lymph, urine, saliva, and the like. Tissue samples may include samples from tissues, organs or localized regions. For example, samples may be derived from particular organs, parts of organs, or fluids or cells within those organs. In certain embodiments, samples may be derived from the liver (e.g., whole liver or certain segments of liver or certain types of cells in the liver, such as, e.g., hepatocytes). In some embodiments, a “sample derived from a subject” refers to blood or plasma drawn from the subject.

[0235] II. iRNAs of the Invention Described herein are iRNAs which inhibit the expression of a target gene. In one embodiment, the iRNAs inhibit the expression of a PLG gene. In one embodiment, the iRNA agent includes double stranded ribonucleic acid (dsRNA) molecules for inhibiting the expression of a PLG gene in a cell, such as a liver cell, such as a liver cell within a subject, e.g., a mammal, such as a human having a bleeding disorder or condition.

[0236] The dsRNA includes an antisense strand having a region of complementarity which is complementary to at least a part of an mRNA formed in the expression of a PLG gene. The region of complementarity is about 30 nucleotides or less in length (e.g., about 30, 29, 28, 27, 26, 25, 24, 23, 22, 21, 20, 19, or 18 nucleotides or less in length). Upon contact with a cell expressing the target gene, the iRNA inhibits the expression of the target gene (e.g., a human, a primate, a non-primate, or a rodent target gene) by at least about 10% as assayed by, for example, a PCR or branched DNA (bDNA)-based method, or by a protein-based method, such as by immunofluorescence analysis, using, for example, Western Blotting or flowcytometric techniques.

[0237] A dsRNA includes two RNA strands that are complementary and hybridize to form a duplex structure under conditions in which the dsRNA will be used. One strand of a dsRNA (the antisense strand) includes a region of complementarity that is substantially complementary, and generally fully complementary, to a target sequence. The target sequence can be derived from the sequence of an mRNA formed during the expression of a PLG gene. The other strand (the sense strand) includes a region that is complementary to the antisense strand, such that the two strands hybridize and form a duplex structure when combined under suitable conditions. As described elsewhere herein and as known in the art, the complementary sequences of a dsRNA can also be contained as self-complementary regions of a single nucleic acid molecule, as opposed to being on separate oligonucleotides.

[0238] Generally, the duplex structure is between 15 and 30 base pairs in length, e.g., between, 15-29, 15-28, 15-27, 15-26, 15-25, 15-24, 15-23, 15-22, 15-21, 15-20, 15-19, 15-18, 15-17, 18-30, 18-29, 18-28, 18-27, 18-26, 18-25, 18-24, 18-23, 18-22, 18-21, 18-20, 19-30, 19-29, 19-28, 19-27, 19-26, 19-25, 19-24, 19-23, 19-22, 19-21, 19-20, 20-30, 20-29, 20-28, 20-27, 20-26, 20-25, 20-24,20-23, 20-22, 20-21, 21-30, 21-29, 21-28, 21-27, 21-26, 21-25, 21-24, 21-23, or 21-22 base pairs in length. Ranges and lengths intermediate to the above recited ranges and lengths are also contemplated to be part of the invention.

[0239] Similarly, the region of complementarity to the target sequence is between 15 and 30 nucleotides in length, e.g., between 15-29, 15-28, 15-27, 15-26, 15-25, 15-24, 15-23, 15-22, 15-21, 15-20, 15-19, 15-18, 15-17, 18-30, 18-29, 18-28, 18-27, 18-26, 18-25, 18-24, 18-23, 18-22, 18-21, 18-20, 19-30, 19-29, 19-28, 19-27, 19-26, 19-25, 19-24, 19-23, 19-22, 19-21, 19-20, 20-30, 20-29, 20-28, 20-27, 20-26, 20-25, 20-24,20-23, 20-22, 20-21, 21-30, 21-29, 21-28, 21-27, 21-26, 21-25, 21-24, 21-23, or 21-22 nucleotides in length. Ranges and lengths intermediate to the above recited ranges and lengths are also contemplated to be part of the invention.

[0240] In some embodiments, the sense and antisense strands of the dsRNA are each independently about 15 to about 30 nucleotides in length, or about 25 to about 30 nucleotides in length, e.g., each strand is independently between 15-29, 15-28, 15-27, 15-26, 15-25, 15-24, 15-23, 15-22, 15-21, 15-20, 15-19, 15-18, 15-17, 18-30, 18-29, 18-28, 18-27, 18-26, 18-25, 18-24, 18-23, 18-22, 18-21, 18-20, 19-30, 19-29, 19-28, 19-27, 19-26, 19-25, 19-24, 19-23, 19-22, 19-21, 19-20, 20-30, 20-29, 20-28, 20-27, 20-26, 20-25, 20-24,20-23, 20-22, 20-21, 21-30, 21-29, 21-28, 21-27, 21-26, 21-25, 21-24, 21-23, or 21-22 nucleotides in length. In some embodiments, the dsRNA is between about 15 and about 23 nucleotides in length, or between about 25 and about 30 nucleotides in length. In general, the dsRNA is long enough to serve as a substrate for the Dicer enzyme. For example, it is well known in the art that dsRNAs longer than about 21-23 nucleotides can serve as substrates for Dicer. As the ordinarily skilled person will also recognize, the region of an RNA targeted for cleavage will most often be part of a larger RNA molecule, often an mRNA molecule. Where relevant, a “part” of an mRNA target is a contiguous sequence of an mRNA target of sufficient length to allow it to be a substrate for RNAi-directed cleavage (i.e., cleavage through a RISC pathway).

[0241] One of skill in the art will also recognize that the duplex region is a primary functional portion of a dsRNA, e.g., a duplex region of about 9 to 36 base pairs, e.g., about 10-36, 11-36, 12-36, 13-36, 14-36, 15-36, 9-35, 10-35, 11-35, 12-35, 13-35, 14-35, 15-35, 9-34, 10-34, 11-34, 12-34, 13-34, 14-34, 15-34, 9-33, 10-33, 11-33, 12-33, 13-33, 14-33, 15-33, 9-32, 10-32, 11-32, 12-32, 13-32, 14-32, 15-32, 9-31, 10-31, 11-31, 12-31, 13-32, 14-31, 15-31, 15-30, 15-29, 15-28, 15-27, 15-26, 15-25, 15-24, 15-23, 15-22, 15-21, 15-20, 15-19, 15-18, 15-17, 18-30, 18-29, 18-28, 18-27, 18-26, 18-25, 18-24, 18-23, 18-22, 18-21, 18-20, 19-30, 19-29, 19-28, 19-27, 19-26, 19-25, 19-24, 19-23, 19-22, 19-21, 19-20, 20-30, 20-29, 20-28, 20-27, 20-26, 20-25, 20-24,20-23, 20-22, 20-21, 21-30, 21-29, 21-28, 21-27, 21-26, 21-25, 21-24, 21-23, or 21-22 base pairs. Thus, in one embodiment, to the extent that it becomes processed to a functional duplex, of e.g., 15-30 base pairs, that targets a desired RNA for cleavage, an RNA molecule or complex of RNA molecules having a duplex region greater than 30 base pairs is a dsRNA. Thus, an ordinarily skilled artisan will recognize that in one embodiment, a miRNA is a dsRNA. In another embodiment, a dsRNA is not a naturally occurring miRNA. In another embodiment, an iRNA agent useful to target PLG expression is not generated in the target cell by cleavage of a larger dsRNA.

[0242] A dsRNA as described herein can further include one or more single-stranded nucleotide overhangs e.g., 1, 2, 3, or 4 nucleotides. dsRNAs having at least one nucleotide overhang can have unexpectedly superior inhibitory properties relative to their blunt-ended counterparts. A nucleotide overhang can comprise or consist of a nucleotide/nucleoside analog, including a deoxynucleotide/nucleoside. The overhang(s) can be on the sense strand, the antisense strand or any combination thereof Furthermore, the nucleotide(s) of an overhang can be present on the 5-end, 3-end or both ends of either an antisense or sense strand of a dsRNA. A dsRNA can be synthesized by standard methods known in the art as further discussed below, e.g., by use of an automated DNA synthesizer, such as are commercially available from, for example, Biosearch, Applied Biosystems, Inc. iRNA compounds of the invention may be prepared using a two-step procedure. First, the individual strands of the double-stranded RNA molecule are prepared separately. Then, the component strands are annealed. The individual strands of the siRNA compound can be prepared using solution-phase or solid-phase organic synthesis or both. Organic synthesis offers the advantage that the oligonucleotide strands comprising unnatural or modified nucleotides can be easily prepared. Single-stranded oligonucleotides of the invention can be prepared using solution-phase or solid-phase organic synthesis or both.

[0243] In one aspect, a dsRNA of the invention includes at least two nucleotide sequences, a sense sequence and an anti-sense sequence. The sense strand sequence is selected from the group of sequences provided in any one of Tables 3, 4, 5, 6, 7, 8A, or 8B, and the corresponding nucleotide sequence of the antisense strand of the sense strand is selected from the group of sequences of any one of Tables 3, 4, 5, 6, 7, 8A, or 8B. In this aspect, one of the two sequences is complementary to the other of the two sequences, with one of the sequences being substantially complementary to a sequence of an mRNA generated in the expression of a PLG gene. As such, in this aspect, a dsRNA will include two oligonucleotides, where one oligonucleotide is described as the sense strand (passenger strand) in any one of Tables 3, 4, 5, 6, 7, 8A, or 8B, and the second oligonucleotide is described as the corresponding antisense strand (guide strand) of the sense strand in any one of Tables 3, 4, 5, 6, 7, 8A, or 8B. In one embodiment, the substantially complementary sequences of the dsRNA are contained on separate oligonucleotides. In another embodiment, the substantially complementary sequences of the dsRNA are contained on a single oligonucleotide.

[0244] It will be understood that, although the sequences in Tables 3, 4, 5, 6, 7, 8A, or 8B are described as modified, unmodified, unconjugated. and/or conjugated sequences, the RNA of the iRNA of the invention e.g., a dsRNA of the invention, may comprise any one of the sequences set forth in any one of Tables 3, 4, 5, 6, 7, 8A, or 8B that is un-modified, un-conjugated, and/or modified and/or conjugated differently than described therein.

[0245] The skilled person is well aware that dsRNAs having a duplex structure of between about 20 and 23 base pairs, e.g., 21, base pairs have been hailed as particularly effective in inducing RNA interference (Elbashir et al., (2001) EMBO J, 20:6877-6888). However, others have found that shorter or longer RNA duplex structures can also be effective (Chu and Rana (2007) RNA 14:1714-1719; Kim et al. (2005) Nat Biotech 23:222-226). In the embodiments described above, by virtue of the nature of the oligonucleotide sequences provided herein, dsRNAs described herein can include at least one strand of a length of minimally 21 nucleotides. It can be reasonably expected that shorter duplexes minus only a few nucleotides on one or both ends can be similarly effective as compared to the dsRNAs described above. Hence, dsRNAs having a sequence of at least 15, 16, 17, 18, 19, 20, or more contiguous nucleotides derived from one of the sequences provided herein, and differing in their ability to inhibit the expression of a PLG gene by not more than about 5, 10, 15, 20, 25, or 30% inhibition from a dsRNA comprising the full sequence, are contemplated to be within the scope of the present invention.

[0246] In addition, the RNAs described in any one of Tables 3, 4, 5, 6, 7, 8A, or 8B identify a site(s) in a PLG transcript that is susceptible to RISC-mediated cleavage. As such, the present invention further features iRNAs that target within this site(s). As used herein, an iRNA is said to target within a particular site of an RNA transcript if the iRNA promotes cleavage of the transcript anywhere within that particular site. Such an iRNA will generally include at least about 15 contiguous nucleotides from one of the sequences provided herein coupled to additional nucleotide sequences taken from the region contiguous to the selected sequence in the gene.

[0247] While a target sequence is generally about 15-30 nucleotides in length, there is wide variation in the suitability of particular sequences in this range for directing cleavage of any given target RNA. Various software packages and the guidelines set out herein provide guidance for the identification of optimal target sequences for any given gene target, but an empirical approach can also be taken in which a “window” or “mask” of a given size (as a non-limiting example, 21 nucleotides) is literally or figuratively (including, e.g., in silico) placed on the target RNA sequence to identify sequences in the size range that can serve as target sequences. By moving the sequence “window” progressively one nucleotide upstream or downstream of an initial target sequence location, the next potential target sequence can be identified, until the complete set of possible sequences is identified for any given target size selected. This process, coupled with systematic synthesis and testing of the identified sequences (using assays as described herein or as known in the art) to identify those sequences that perform optimally can identify those RNA sequences that, when targeted with an iRNA agent, mediate the best inhibition of target gene expression. Thus, while the sequences identified herein represent effective target sequences, it is contemplated that further optimization of inhibition efficiency can be achieved by progressively “walking the window” one nucleotide upstream or downstream of the given sequences to identify sequences with equal or better inhibition characteristics.

[0248] Further, it is contemplated that for any sequence identified herein, further optimization could be achieved by systematically either adding or removing nucleotides to generate longer or shorter sequences and testing those sequences generated by walking a window of the longer or shorter size up or down the target RNA from that point. Again, coupling this approach to generating new candidate targets with testing for effectiveness of iRNAs based on those target sequences in an inhibition assay as known in the art and/or as described herein can lead to further improvements in the efficiency of inhibition. Further still, such optimized sequences can be adjusted by, e.g., the introduction of modified nucleotides as described herein or as known in the art, addition or changes in overhang, or other modifications as known in the art and/or discussed herein to further optimize the molecule (e.g., increasing serum stability or circulating half-life, increasing thermal stability, enhancing transmembrane delivery, targeting to a particular location or cell type, increasing interaction with silencing pathway enzymes, increasing release from endosomes) as an expression inhibitor. An iRNA agent as described herein can contain one or more mismatches to the target sequence. In one embodiment, an iRNA as described herein contains no more than 3 mismatches. If the antisense strand of the iRNA contains mismatches to a target sequence, it is preferable that the area of mismatch is not located in the center of the region of complementarity. If the antisense strand of the iRNA contains mismatches to the target sequence, it is preferable that the mismatch be restricted to be within the last 5 nucleotides from either the 5′-or 3′-end of the region of complementarity. For example, for a 23 nucleotide iRNA agent the strand which is complementary to a region of a PLG gene, generally does not contain any mismatch within the central 13 nucleotides. The methods described herein, or methods known in the art can be used to determine whether an iRNA containing a mismatch to a target sequence is effective in inhibiting the expression of a PLG gene.

[0249] Consideration of the efficacy of iRNAs with mismatches in inhibiting expression of a PLG gene is important, especially if the particular region of complementarity in a PLG gene is known to have polymorphic sequence variation within the population.

[0250] An RNA target may have regions, or spans of the target RNA's nucleotide sequence, which are relatively more susceptible or amenable than other regions of the RNA target to mediating cleavage of the RNA target via RNA interference induced by the binding of an RNAi agent to that region. The increased susceptibility to RNA interference within such “hotspot regions” (or simply “hotspots”) means that iRNA agents targeting the region will likely have higher efficacy in inducing iRNA interference than iRNA agents which target other regions of the target RNA. For example, without being bound by theory, the accessibility of a target region of a target RNA may influence the efficacy of iRNA agents which target that region, with some hotspot regions having increased accessibility. Secondary structures, for instance, that form in the RNA target (e.g., within or proximate to hotspot regions) may affect the ability of the iRNA agent to bind the target region and induce RNA interference.

[0251] According to certain aspects of the invention, an iRNA agent may be designed to target a hotspot region of any of the target RNAs described herein, including any identified portions of a target RNA (e.g., a particular exon). As used herein, a hotspot region may refer to an approximately 19-200, 19-150, 19-100, 19-75, 19-50, 21-200, 21-150, 21-100, 21-75, 21-50, 50-200, 50-150, 50-100, 50-75, 75-200, 75-150, 75-100, 100-200, or 100-150 nucleotide region of a target RNA sequence for which targeting using RNAi agents provides an observably higher probability of efficacious silencing relative to targeting other regions of the same target RNA. According to certain aspects of the invention, a hotspot region may comprise a limited region of the target RNA, and in some cases, a substantially limited region of the target, including for example, less than half of the length of the target RNA, such as about 5%, 10%, 15%, 20%, 25%, or 30% of the length of the target RNA. Conversely, the other regions against which a hotspot is compared may cumulatively comprise at least a majority of the length of the target RNA. For example, the other regions may cumulatively comprise at least about 60%, or at least about 70%, or at least about 80%, or at least about 90%, or at least about 95% of the length of the target RNA.

[0252] Compared regions of the target RNA may be empirically evaluated for identification of hotspots using efficacy data obtained from in vitro or in vivo screening assays. For example, RNAi agents targeting various regions that span a target RNA may be compared for frequency of efficacious iRNA agents (e.g., the amount by which target gene expression is inhibited, such as measured by mRNA expression or protein expression) that bind each region. In general, a hotspot can be recognized by observing clustering of multiple efficacious RNAi agents that bind to a limited region of the RNA target. A hotspot may be sufficiently characterized as such by observing efficacy of iRNA agents which cumulatively span at least about 60% of the target region identified as a hotspot, such as about 70%, about 80%, about 90%, or about 95% or more of the length of the region, including both ends of the region (i.e. at least about 60%, 70%, 80%, 90%, or 95% or more of the nucleotides within the region, including the nucleotides at each end of the region, were targeted by an iRNA agent). According to some aspects of the invention, an iRNA agent which demonstrates at least about 50%, 55%, 60%, 65%, 70%, 75%, 80%, 85%, 90%, or 95% inhibition over the region (e.g., no more than about 50%, 45%, 40%, 35%, 30%, 25%, 20%, 15%, 10%, or 5% mRNA remaining) may be identified as efficacious.

[0253] Amenability to targeting of RNA regions may also be assessed using quantitative comparison of inhibition measurements across different regions of a defined size (e.g, 25, 30, 40, 50, 60, 70, 80, 90, or 100, 110, 120, 130, 140, 150, 160, 170, 180, 190, or 200 nts). For example, an average level of inhibition may be determined for each region and the averages of each region may be compared. The average level of inhibition within a hotspot region may be substantially higher than the average of averages for all evaluated regions.

[0254] According to some aspects, the average level of inhibition in a hotspot region may be at least about 10%, 20%, 30%, 40%, or 50% higher than the average of averages. According to some aspects, the average level of inhibition in a hotspot region may be at least about 1.0, 1.1, 1.2, 1.3, 1.4, 1.5 1.6, 1.7, 1.8. 1.9, or 2.0 standard deviations above the average of averages. The average level of inhibition may be higher by a statistically significant (e.g., p<0.05) amount. According to some aspects, each inhibition measurement within a hotspot region may be above a threshold amount (e.g., at or below a threshold amount of mRNA remaining). According to some aspects, each inhibition measurement within the region may be substantially higher than an average of all inhibition measurements across all the measured regions. For example, each inhibition measurement in a hotspot region may be at least about 10%, 20%, 30%, 40%, or 50% higher than the average of all inhibition measurements. According to some aspects, each inhibition measurement may be at least about 1.0, 1.1, 1.2, 1.3, 1.4, 1.5 1.6, 1.7, 1.8. 1.9, or 2.0 standard deviations above the average of all inhibition measurements. Each inhibition measurement may be higher by a statistically significant (e.g., p<0.05) amount than the average of all inhibition measurements. A standard for evaluating a hotspot may comprise various combinations of the above standards where compatible (e.g., an average level of inhibition of at least about a first amount and having no inhibition measurements below a threshold level of a second amount, lesser than the first amount).

[0255] It is therefore expressly contemplated that any iRNA agent, including the specific exemplary iRNA agents described herein, which targets a hotspot region of a target RNA, may be preferably selected for inducing RNA interference of the target mRNA as targeting such a hotspot region is likely to exhibit a robust inhibitory response relative to targeting a region which is not a hotspot region. RNAi agents targeting target sequences that substantially overlap (e.g., by at least about 70%, 75%, 80%, 85%, 90%, 95% of the target sequence length) or, preferably, that reside fully within the hotspot region may be considered to target the hotspot region. Hotspot regions of the RNA target(s) of the instant invention may include any region for which the data disclosed herein demonstrates higher frequency of targeting by efficacious RNAi agents, including by any of the standards described elsewhere herein, whether or not the range(s) of such hotspot region(s) are explicitly specified.

[0256] In various embodiments, a dsRNA agent of the present invention targets a hotspot region of an mRNA encoding PLG.

III. Modified iRNAs of the Invention

[0257] In one embodiment, the RNA of the iRNA of the invention e.g., a dsRNA, is un-modified, and does not comprise, e.g., chemical modifications and/or conjugations known in the art and described herein. In another embodiment, the RNA of an iRNA of the invention, e.g., a dsRNA, is chemically modified to enhance stability or other beneficial characteristics. In certain embodiments of the invention, substantially all of the nucleotides of an iRNA of the invention are modified. In other embodiments of the invention, all of the nucleotides of an iRNA of the invention are modified. iRNAs of the invention in which “substantially all of the nucleotides are modified” are largely but not wholly modified and can include not more than 5, 4, 3, 2, or 1 unmodified nucleotides.

[0258] In some aspects of the invention, substantially all of the nucleotides of an iRNA of the invention are modified and the iRNA agents comprise no more than 10 nucleotides comprising 2′-fluoro modifications (e.g., no more than 9 2′-fluoro modifications, no more than 8 2′-fluoro modifications, no more than 7 2′-fluoro modifications, no more than 6 2′-fluoro modifications, no more than 5 2′-fluoro modifications, no more than 4 2′-fluoro modifications, no more than 5 2′-fluoro modifications, no more than 4 2′-fluoro modifications, no more than 3 2′-fluoro modifications, or no more than 2 2′-fluoro modifications). For example, in some embodiments, the sense strand comprises no more than 4 nucleotides comprising 2′-fluoro modifications (e.g., no more than 3 2′-fluoro modifications, or no more than 2 2′-fluoro modifications). In other embodiments, the antisense strand comprises no more than 6 nucleotides comprising 2′-fluoro modifications (e.g., no more than 5 2′-fluoro modifications, no more than 4 2′-fluoro modifications, no more than 4 2′-fluoro modifications, or no more than 2 2′-fluoro modifications).

[0259] In other aspects of the invention, all of the nucleotides of an iRNA of the invention are modified and the iRNA agents comprise no more than 10 nucleotides comprising 2′-fluoro modifications (e.g., no more than 9 2′-fluoro modifications, no more than 8 2′-fluoro modifications, no more than 7 2′-fluoro modifications, no more than 6 2′-fluoro modifications, no more than 5 2′-fluoro modifications, no more than 4 2′-fluoro modifications, no more than 5 2′-fluoro modifications, no more than 4 2′-fluoro modifications, no more than 3 2′-fluoro modifications, or no more than 2 2′-fluoro modifications).

[0260] In one embodiment, the double stranded RNAi agent of the invention further comprises a 5′-phosphate or a 5′-phosphate mimic at the 5′ nucleotide of the antisense strand. In another embodiment, the double stranded RNAi agent further comprises a 5′-phosphate mimic at the 5′ nucleotide of the antisense strand. In a specific embodiment, the 5′-phosphate mimic is a 5′-vinyl phosphonate (5′-VP). In one embodiment, the phosphate mimic is a 5′-cyclopropyl phosphonate. In some embodiments, the 5′-end of the antisense strand of the double-stranded iRNA agent does not contain a 5′-vinyl phosphonate (VP).

[0261] In one embodiment, at least one of the modified nucleotides is selected from the group consisting of a deoxy-nucleotide, a 2′-O-methyl modified nucleotide, a 2′-fluoro modified nucleotide, a 2′-deoxy-modified nucleotide, a glycol modified nucleotide (GNA), e.g., Ggn, Cgn, Tgn, or Agn, a nucleotide with a 2′ phosphate, e.g., G2p, C2p, A2p or U2p, and, a vinyl-phosphonate nucleotide; and combinations thereof.

[0262] In other embodiments, each of the duplexes of Tables 3, 4, 5, 6, 7, 8A, or 8B may be particularly modified to provide another double-stranded iRNA agent of the present disclosure. In one example, the 3′-terminus of each sense duplex may be modified by removing the 3′-terminal L96 ligand and exchanging the two phosphodiester intemucleotide linkages between the three 3′-terminal nucleotides with phosphorothioate intemucleotide linkages. That is, the three 3′-terminal nucleotides (N) of a sense sequence of the formula:

[chemical structure]

may be replaced with

[chemical structure]

[0263] That is, for example, AD-2042815, the sense sequence:

(SEQ ID NO: 279)
gsuscaacAfaCfAfUfccugggauuuL96

may be replaced with

(SEQ ID NO: 684)
gsuscaacAfaCfAfUfccugggaususu

while the antisense sequence remains unchanged to provide another double-stranded iRNA agent of the present disclosure.

[0264] The nucleic acids featured in the invention can be synthesized and/or modified by methods well established in the art, such as those described in “Current protocols in nucleic acid chemistry,” Beaucage, S. L. et al. (Edrs.), John Wiley & Sons, Inc., New York, NY, USA, which is hereby incorporated herein by reference. Modifications include, for example, end modifications, e.g., 5′-end modifications (phosphorylation, conjugation, inverted linkages) or 3′-end modifications (conjugation, DNA nucleotides, inverted linkages, etc.); base modifications, e.g., replacement with stabilizing bases, destabilizing bases, or bases that base pair with an expanded repertoire of partners, removal of bases (abasic nucleotides), or conjugated bases; sugar modifications (e.g., at the 2′-position or 4′-position) or replacement of the sugar; and/or backbone modifications, including modification or replacement of the phosphodiester linkages.

[0265] Specific examples of iRNA compounds useful in the embodiments described herein include, but are not limited to, RNAs containing modified backbones or no natural intemucleoside linkages. RNAs having modified backbones include, among others, those that do not have a phosphorus atom in the backbone. For the purposes of this specification, and as sometimes referenced in the art, modified RNAs that do not have a phosphorus atom in their intemucleoside backbone can also be considered to be oligonucleosides. In some embodiments, a modified iRNA will have a phosphorus atom in its intemucleoside backbone.

[0266] Modified RNA backbones include, for example, phosphorothioates, chiral phosphorothioates, phosphorodithioates, phosphotriesters, aminoalkylphosphotriesters, methyl and other alkyl phosphonates including 3′-alkylene phosphonates and chiral phosphonates, phosphinates, phosphoramidates including 3′-amino phosphoramidate and aminoalkylphosphoramidates, thionophosphoramidates, thionoalkylphosphonates, thionoalkylphosphotriesters, and boranophosphates having normal 3′-5′ linkages, 2′-5′-linked analogs of these, and those having inverted polarity wherein the adjacent pairs of nucleoside units are linked 3′-5′ to 5′-3′ or 2′-5′ to 5′-2′.

[0267] Various salts, mixed salts and free acid forms are also included. In some embodiments of the invention, the dsRNA agents of the invention are in a free acid form. In other embodiments of the invention, the dsRNA agents of the invention are in a salt form. In one embodiment, the dsRNA agents of the invention are in a sodium salt form. In certain embodiments, when the dsRNA agents of the invention are in the sodium salt form, sodium ions are present in the agent as counterions for substantially all of the phosphodiester and/or phosphorothiotate groups present in the agent. Agents in which substantially all of the phosphodiester and/or phosphorothioate linkages have a sodium counterion include not more than 5, 4, 3, 2, or 1 phosphodiester and/or phosphorothioate linkages without a sodium counterion. In some embodiments, when the dsRNA agents of the invention are in the sodium salt form, sodium ions are present in the agent as counterions for all of the phosphodiester and/or phosphorothiotate groups present in the agent.

[0268] Representative U.S. patents that teach the preparation of the above phosphorus-containing linkages include, but are not limited to, U.S. Pat. Nos. 3,687,808; 4,469,863; 4,476,301; 5,023,243; 5,177,195; 5,188,897; 5,264,423; 5,276,019; 5,278,302; 5,286,717; 5,321,131; 5,399,676; 5,405,939; 5,453,496; 5,455,233; 5,466,677; 5,476,925; 5,519,126; 5,536,821; 5,541,316; 5,550,111; 5,563,253; 5,571,799; 5,587,361; 5,625,050; 6,028,188; 6,124,445; 6,160,109; 6,169,170; 6,172,209; 6,239,265; 6,277,603; 6,326,199; 6,346,614; 6,444,423; 6,531,590; 6,534,639; 6,608,035; 6,683,167; 6,858,715; 6,867,294; 6,878,805; 7,015,315; 7,041,816; 7,273,933; 7,321,029; and U.S. Pat. RE39464, the entire contents of each of which are hereby incorporated herein by reference.

[0269] Modified RNA backbones that do not include a phosphorus atom therein have backbones that are formed by short chain alkyl or cycloalkyl internucleoside linkages, mixed heteroatoms and alkyl or cycloalkyl internucleoside linkages, or one or more short chain heteroatomic or heterocyclic internucleoside linkages.

[0270] These include those having morpholino linkages (formed in part from the sugar portion of a nucleoside); siloxane backbones; sulfide, sulfoxide and sulfone backbones; formacetyl and thioformacetyl backbones; methylene formacetyl and thioformacetyl backbones; alkene containing backbones; sulfamate backbones; methyleneimino and methylenehydrazino backbones; sulfonate and sulfonamide backbones; amide backbones; and others having mixed N, O, S and CH₂ component parts.

[0271] Representative U.S. patents that teach the preparation of the above oligonucleosides include, but are not limited to, U.S. Pat. Nos. 5,034,506; 5,166,315; 5,185,444; 5,214,134; 5,216,141; 5,235,033; 5,64,562; 5,264,564; 5,405,938; 5,434,257; 5,466,677; 5,470,967; 5,489,677; 5,541,307; 5,561,225; 5,596,086; 5,602,240; 5,608,046; 5,610,289; 5,618,704; 5,623,070; 5,663,312; 5,633,360; 5,677,437; and, 5,677,439, the entire contents of each of which are hereby incorporated herein by reference.

[0272] In other embodiments, suitable RNA mimetics are contemplated for use in iRNAs, in which both the sugar and the internucleoside linkage, i.e., the backbone, of the nucleotide units are replaced with novel groups. The base units are maintained for hybridization with an appropriate nucleic acid target compound.

[0273] One such oligomeric compound, an RNA mimetic that has been shown to have excellent hybridization properties, is referred to as a peptide nucleic acid (PNA). In PNA compounds, the sugar backbone of an RNA is replaced with an amide containing backbone, in particular an aminoethylglycine backbone. The nucleobases are retained and are bound directly or indirectly to aza nitrogen atoms of the amide portion of the backbone. Representative U.S. patents that teach the preparation of PNA compounds include, but are not limited to, U.S. Pat. Nos. 5,539,082; 5,714,331; and 5,719,262, the entire contents of each of which are hereby incorporated herein by reference. Additional PNA compounds suitable for use in the iRNAs of the invention are described in, for example, in Nielsen et al., Science, 1991, 254, 1497-1500.

[0274] Some embodiments featured in the invention include RNAs with phosphorothioate backbones and oligonucleosides with heteroatom backbones, and in particular —CH₂—NH—CH₂—, —CH₂—N(CH₃)—O—CH₂—[known as a methylene (methylimino) or MMI backbone], —CH₂—O—N(CH₃)—CH₂—, —CH₂—N(CH₃)—N(CH₃)—CH₂—and —N(CH₃)—CH₂—CH₂—[wherein the native phosphodiester backbone is represented as —O——P—O—CH₂—]of the above-referenced U.S. Pat. No. 5,489,677, and the amide backbones of the above-referenced U.S. Pat. No. 5,602,240. In some embodiments, the RNAs featured herein have morpholino backbone structures of the above-referenced U.S. Pat. No. 5,034,506.

[0275] Modified RNAs can also contain one or more substituted sugar moieties. The iRNAs, e.g., dsRNAs, featured herein can include one of the following at the 2′-position: OH; F; O—, S—, or N-alkyl; O—, S—, or N-alkenyl; O—, S— or N-alkynyl; or O-alkyl-O-alkyl, wherein the alkyl, alkenyl and alkynyl can be substituted or unsubstituted C₁ to C₁₀ alkyl or C₂ to C₁₀ alkenyl and alkynyl. Exemplary suitable modifications include O[(CH₂)ₙO]ₘCH₃, O(CH₂)ₙOCH₃, O(CH₂)ₙNH₂, O(CH₂) CH₃, O(CH₂),ONH₂, and O(CH₂)ₙON[(CH₂)ₙCH₃)]₂, where n and m are from 1 to about 10. In other embodiments, dsRNAs include one of the following at the 2′ position: C₁ to C₁₀ lower alkyl, substituted lower alkyl, alkaryl, aralkyl, O-alkaryl or O-aralkyl, SH, SCH₃, OCN, Cl, Br, CN, CF₃, OCF₃, SOCH₃, SO₂CH₃, ONO₂, NO₂, N₃, NH₂, heterocycloalkyl, heterocycloalkaryl, aminoalkylamino, polyalkylamino, substituted silyl, an RNA cleaving group, a reporter group, an intercalator, a group for improving the pharmacokinetic properties of an iRNA, or a group for improving the pharmacodynamic properties of an iRNA, and other substituents having similar properties. In some embodiments, the modification includes a 2′-methoxyethoxy (2′-O—CH₂CH₂OCH₃, also known as 2′-O—(2-methoxyethyl) or 2′-MOE) (Martin et al., Helv. Chim. Acta, 1995, 78:486-504) i.e., an alkoxy-alkoxy group. Another exemplary modification is 2′-dimethylaminooxyethoxy, i.e., a O(CH₂)₂ON(CH₃)₂ group, also known as 2′-DMAOE, as described in examples herein below, and 2′-dimethylaminoethoxyethoxy (also known in the art as 2′-O-dimethylaminoethoxyethyl or 2′-DMAEOE), i.e., 2′-O—CH₂—O—CH₂—N(CH₂)2. Further exemplary modifications include: 5′-Me-2′-F nucleotides, 5′-Me-2′-OMe nucleotides, 5′-Me-2′-deoxynucleotides, (both R and S isomers in these three families); 2′-alkoxyalkyl; and 2′-NMA (N-methylacetamide).

[0276] Other modifications include 2′-methoxy (2′-OCH₃), 2′-aminopropoxy (2′-OCH₂CH₂CH₂NH₂) and 2′-fluoro (2′-F). Similar modifications can also be made at other positions on the RNA of an iRNA, particularly the 3′ position of the sugar on the 3′ terminal nucleotide or in 2′-5′ linked dsRNAs and the 5′ position of 5′ terminal nucleotide. iRNAs can also have sugar mimetics such as cyclobutyl moieties in place of the pentofuranosyl sugar. Representative U.S. patents that teach the preparation of such modified sugar structures include, but are not limited to, U.S. Pat. Nos. 4,981,957; 5,118,800; 5,319,080; 5,359,044; 5,393,878; 5,446,137; 5,466,786; 5,514,785; 5,519,134; 5,567,811; 5,576,427; 5,591,722; 5,597,909; 5,610,300; 5,627,053; 5,639,873; 5,646,265; 5,658,873; 5,670,633; and 5,700,920, certain of which are commonly owned with the instant application. The entire contents of each of the foregoing are hereby incorporated herein by reference.

[0277] An iRNA of the invention can also include nucleobase (often referred to in the art simply as “base”) modifications or substitutions. As used herein, “unmodified” or “natural” nucleobases include the purine bases adenine (A) and guanine (G), and the pyrimidine bases thymine (T), cytosine (C) and uracil (U).

[0278] Modified nucleobases include other synthetic and natural nucleobases such as 5-methylcytosine (5-me-C), 5-hydroxymethyl cytosine, xanthine, hypoxanthine, 2-aminoadenine, 6-methyl and other alkyl derivatives of adenine and guanine, 2-propyl and other alkyl derivatives of adenine and guanine, 2-thiouracil, 2-thiothymine and 2-thiocytosine, 5-halouracil and cytosine, 5-propynyl uracil and cytosine, 6-azo uracil, cytosine and thymine, 5-uracil (pseudouracil), 4-thiouracil, 8-halo, 8-amino, 8-thiol, 8-thioalkyl, 8-hydroxyl anal other 8-substituted adenines and guanines, 5-halo, particularly 5-bromo, 5-trifluoromethyl and other 5-substituted uracils and cytosines, 7-methylguanine and 7-methyladenine, 8-azaguanine and 8-azaadenine, 7-deazaguanine and 7-daazaadenine and 3-deazaguanine and 3-deazaadenine. Further nucleobases include those disclosed in U.S. Pat. No. 3,687,808, those disclosed in Modified Nucleosides in Biochemistry, Biotechnology and Medicine, Herdewijn, P. ed. Wiley-VCH, 2008; those disclosed in The Concise Encyclopedia Of Polymer Science And Engineering, pages 858-859, Kroschwitz, J. L, ed. John Wiley & Sons, 1990, these disclosed by Englisch et al., (1991) Angewandte Chemie, International Edition, 30:613, and those disclosed by Sanghvi, Y S., Chapter 15, dsRNA Research and Applications, pages 289-302, Crooke, S. T. and Lebleu, B., Ed., CRC Press, 1993. Certain of these nucleobases are particularly useful for increasing the binding affinity of the oligomeric compounds featured in the invention. These include 5-substituted pyrimidines, 6-azapyrimidines and N-2, N-6 and 0-6 substituted purines, including 2-aminopropyladenine, 5-propynyluracil and 5-propynylcytosine. 5-methylcytosine substitutions have been shown to increase nucleic acid duplex stability by 0.6-1.2° C. (Sanghvi, Y. S., Crooke, S. T. and Lebleu, B., Eds., dsRNA Research and Applications, CRC Press, Boca Raton, 1993, pp. 276-278) and are exemplary base substitutions, even more particularly when combined with 2′-O-methoxyethyl sugar modifications.

[0279] Representative U.S. patents that teach the preparation of certain of the above noted modified nucleobases as well as other modified nucleobases include, but are not limited to, the above noted U.S. Pat. Nos. 3,687,808, 4,845,205; 5,130,30; 5,134,066; 5,175,273; 5,367,066; 5,432,272; 5,457,187; 5,459,255; 5,484,908; 5,502,177; 5,525,711; 5,552,540; 5,587,469; 5,594,121, 5,596,091; 5,614,617; 5,681,941; 5,750,692; 6,015,886; 6,147,200; 6,166,197; 6,222,025; 6,235,887; 6,380,368; 6,528,640; 6,639,062; 6,617,438; 7,045,610; 7,427,672; and 7,495,088, the entire contents of each of which are hereby incorporated herein by reference.

[0280] An iRNA of the invention can also be modified to include one or more locked nucleic acids (LNA). A locked nucleic acid is a nucleotide having a modified ribose moiety in which the ribose moiety comprises an extra bridge connecting the 2′ and 4′ carbons. This structure effectively “locks” the ribose in the 3′-endo structural conformation. The addition of locked nucleic acids to siRNAs has been shown to increase siRNA stability in serum, and to reduce off-target effects (Elmen, J. et al., (2005) Nucleic Acids Research 33(1):439-447; Mook, OR. et al., (2007) Mol Canc Ther 6(3):833-843; Grunweller, A. et al., (2003) Nucleic Acids Research 31(12):3185-3193).

[0281] An iRNA of the invention can also be modified to include one or more bicyclic sugar moities. A “bicyclic sugar” is a furanosyl ring modified by the bridging of two atoms. A “bicyclic nucleoside” (“BNA”) is a nucleoside having a sugar moiety comprising a bridge connecting two carbon atoms of the sugar ring, thereby forming a bicyclic ring system. In certain embodiments, the bridge connects the 4′-carbon and the 2′-carbon of the sugar ring. Thus, in some embodiments an agent of the invention may include one or more locked nucleic acids (LNA). A locked nucleic acid is a nucleotide having a modified ribose moiety in which the ribose moiety comprises an extra bridge connecting the 2′ and 4′ carbons. In other words, an LNA is a nucleotide comprising a bicyclic sugar moiety comprising a 4′-CH2—O—2′ bridge. This structure effectively “locks” the ribose in the 3′-endo structural conformation. The addition of locked nucleic acids to siRNAs has been shown to increase siRNA stability in serum, and to reduce off-target effects (Elmen, J. et al., (2005) Nucleic Acids Research 33(1):439-447; Mook, OR. et al., (2007) Mol Canc Ther 6(3):833-843; Grunweller, A. et al., (2003) Nucleic Acids Research 31(12):3185-3193). Examples of bicyclic nucleosides for use in the polynucleotides of the invention include without limitation nucleosides comprising a bridge between the 4′ and the 2′ ribosyl ring atoms. In certain embodiments, the antisense polynucleotide agents of the invention include one or more bicyclic nucleosides comprising a 4′ to 2′ bridge. Examples of such 4′ to 2′ bridged bicyclic nucleosides, include but are not limited to 4′-(CH2)—O—2′ (LNA); 4′-(CH2)-S—2′; 4′-(CH2)2—O—2′ (ENA); 4′-CH(CH3)—O—2′ (also referred to as “constrained ethyl” or “cEt”) and 4′-CH(CH2OCH3)—O—2′ (and analogs thereof; see, e.g., U.S. Pat. No. 7,399,845); 4′-C(CH3)(CH3)—O—2′ (and analogs thereof; see e.g., U.S. Pat. No. 8,278,283); 4′-CH2-N(OCH3)-2′ (and analogs thereof; see e.g., U.S. Pat. No. 8,278,425); 4′-CH2—O-N(CH3)-2′ (see, e.g., U.S. Patent Publication No. 2004/0171570); 4′-CH2-N(R)-0-2′, wherein R is H, C1-C12 alkyl, or a protecting group (see, e.g., U.S. Pat. No. 7,427,672); 4′-CH2-C(H)(CH3)-2′ (see, e.g., Chattopadhyaya et al., J. Org. Chem., 2009, 74, 118-134); and 4′-CH2-C(═CH2)-2′ (and analogs thereof; see, e.g., U.S. Pat. No. 8,278,426). The entire contents of each of the foregoing are hereby incorporated herein by reference.

[0282] Additional representative U.S. Patents and US Patent Publications that teach the preparation of locked nucleic acid nucleotides include, but are not limited to, the following: U.S. Pat. Nos. 6,268,490; 6,525,191; 6,670,461; 6,770,748; 6,794,499; 6,998,484; 7,053,207; 7,034,133;7,084,125; 7,399,845; 7,427,672; 7,569,686; 7,741,457; 8,022,193; 8,030,467; 8,278,425; 8,278,426; 8,278,283; US 2008/0039618; and US 2009/0012281, the entire contents of each of which are hereby incorporated herein by reference.

[0283] Any of the foregoing bicyclic nucleosides can be prepared having one or more stereochemical sugar configurations including for example α-L-ribofuranose and β-D-ribofuranose (see WO 99/14226).

[0284] An iRNA of the invention can also be modified to include one or more constrained ethyl nucleotides.

[0285] As used herein, a “constrained ethyl nucleotide” or “cEt” is a locked nucleic acid comprising a bicyclic sugar moiety comprising a 4′-CH(CH3)—O—2′ bridge. In one embodiment, a constrained ethyl nucleotide is in the S conformation referred to herein as “S-cEt.” An iRNA of the invention may also include one or more “conformationally restricted nucleotides” (“CRN”). CRN are nucleotide analogs with a linker connecting the C2′ and C4′ carbons of ribose or the C3 and -C5′ carbons of ribose. CRN lock the ribose ring into a stable conformation and increase the hybridization affinity to mRNA. The linker is of sufficient length to place the oxygen in an optimal position for stability and affinity resulting in less ribose ring puckering.

[0286] Representative publications that teach the preparation of certain of the above noted CRN include, but are not limited to, US Patent Publication No. 2013/0190383; and PCT publication WO 2013/036868, the entire contents of each of which are hereby incorporated herein by reference.

[0287] In some embodiments, an iRNA of the invention comprises one or more monomers that are UNA (unlocked nucleic acid) nucleotides. UNA is unlocked acyclic nucleic acid, wherein any of the bonds of the sugar has been removed, forming an unlocked “sugar” residue. In one example, UNA also encompasses monomer with bonds between C1′-C4′ have been removed (i.e. the covalent carbon-oxygen-carbon bond between the C1′ and C4′ carbons). In another example, the C2′-C3′ bond (i.e. the covalent carbon-carbon bond between the C2′ and C3′ carbons) of the sugar has been removed (see Nuc. Acids Symp. Series, 52, 133-134 (2008) and Fluiter et al., Mol. Biosyst., 2009, 10, 1039 hereby incorporated by reference).

[0288] Representative U.S. publications that teach the preparation of UNA include, but are not limited to, U.S. Pat. No. 8,314,227; and US Patent Publication Nos. 2013/0096289; 2013/0011922; and 2011/0313020, the entire contents of each of which are hereby incorporated herein by reference.

[0289] Potentially stabilizing modifications to the ends of RNA molecules can include N-(acetylaminocaproyl)-4-hydroxyprolinol (Hyp-C6-NHAc), N-(caproyl-4-hydroxyprolinol (Hyp-C6), N-(acetyl-4-hydroxyprolinol (Hyp-NHAc), thymidine-2′-O-deoxythymidine (ether), N-(aminocaproyl)-4-hydroxyprolinol (Hyp-C6-amino), 2-docosanoyl-uridine-3”- phosphate, inverted base dT(idT) and others. Disclosure of this modification can be found in PCT Publication No. WO 2011/005861.

[0290] Other modifications of an iRNA of the invention include a 5′ phosphate or 5′ phosphate mimic, e.g., a 5′-terminal phosphate or phosphate mimic on the antisense strand of an RNAi agent. Suitable phosphate mimics are disclosed in, for example US Patent Publication No. 2012/0157511, the entire contents of which are incorporated herein by reference.

[0291] In certain specific embodiments, an RNAi agent of the present invention is an agent that inhibits the expression of a PLG gene which is selected from the group of agents listed in any one of Tables 3, 4, 5, 6, 7, 8A, or 8B. Any of these agents may further comprise a ligand.

A. Modified iRNAs Comprising Motifs of the Invention

[0292] In certain aspects of the invention, the double stranded RNAi agents of the invention include agents with chemical modifications as disclosed, for example, in WO 2013/075035, filed on Nov. 16, 2012, the entire contents of which are incorporated herein by reference.

[0293] Accordingly, the invention provides double stranded RNAi agents capable of inhibiting the expression of a target gene (i.e., a PLG gene) in vivo. The RNAi agent comprises a sense strand and an antisense strand.

[0294] Each strand of the RNAi agent may range from 12-30 nucleotides in length. For example, each strand may be between 14-30 nucleotides in length, 17-30 nucleotides in length, 25-30 nucleotides in length, 27-30 nucleotides in length, 17-23 nucleotides in length, 17-21 nucleotides in length, 17-19 nucleotides in length, 19-25 nucleotides in length, 19-23 nucleotides in length, 19-21 nucleotides in length, 21-25 nucleotides in length, or 21-23 nucleotides in length. In one embodiment, the sense strand is 21 nucleotides in length. In one embodiment, the antisense strand is 23 nucleotides in length.

[0295] The sense strand and antisense strand typically form a duplex double stranded RNA (“dsRNA”), also referred to herein as an “RNAi agent.” The duplex region of an RNAi agent may be 12-30 nucleotide pairs in length. For example, the duplex region can be between 14-30 nucleotide pairs in length, 17-30 nucleotide pairs in length, 27-30 nucleotide pairs in length, 17-23 nucleotide pairs in length, 17-21 nucleotide pairs in length, 17-19 nucleotide pairs in length, 19-25 nucleotide pairs in length, 19-23 nucleotide pairs in length, 19-21 nucleotide pairs in length, 21-25 nucleotide pairs in length, or 21-23 nucleotide pairs in length. In another example, the duplex region is selected from 15, 16, 17, 18, 19, 20, 21, 22, 23, 24, 25, 26, and 27 nucleotides in length.

[0296] In one embodiment, the RNAi agent may contain one or more overhang regions and/or capping groups at the 3′-end, 5′-end, or both ends of one or both strands. The overhang can be 1-6 nucleotides in length, for instance 2-6 nucleotides in length, 1-5 nucleotides in length, 2-5 nucleotides in length, 1-4 nucleotides in length, 2-4 nucleotides in length, 1-3 nucleotides in length, 2-3 nucleotides in length, or 1-2 nucleotides in length. The overhangs can be the result of one strand being longer than the other, or the result of two strands of the same length being staggered. The overhang can form a mismatch with the target mRNA or it can be complementary to the gene sequences being targeted or can be another sequence. The first and second strands can also be joined, e.g., by additional bases to form a hairpin, or by other non-base linkers.

[0297] In one embodiment, the nucleotides in the overhang region of the RNAi agent can each independently be a modified or unmodified nucleotide including, but no limited to 2′-sugar modified, such as, 2-F, 2′-Omethyl, thymidine (T), 2′-O-methoxyethyl-5-methyluridine (Teo), 2′-O-methoxyethyladenosine (Aeo), 2′-O-methoxyethyl-5-methylcytidine (m5Ceo), and any combinations thereof For example, TT can be an overhang sequence for either end on either strand. The overhang can form a mismatch with the target mRNA or it can be complementary to the gene sequences being targeted or can be another sequence.

[0298] The 5′- or 3′- overhangs at the sense strand, antisense strand or both strands of the RNAi agent may be phosphorylated. In some embodiments, the overhang region(s) contains two nucleotides having a phosphorothioate between the two nucleotides, where the two nucleotides can be the same or different. In one embodiment, the overhang is present at the 3′-end of the sense strand, antisense strand, or both strands. In one embodiment, this 3′-overhang is present in the antisense strand. In one embodiment, this 3′-overhang is present in the sense strand.

[0299] The RNAi agent may contain only a single overhang, which can strengthen the interference activity of the RNAi, without affecting its overall stability. For example, the single-stranded overhang may be located at the 3-terminal end of the sense strand or, alternatively, at the 3-terminal end of the antisense strand. The RNAi may also have a blunt end, located at the 5′-end of the antisense strand (or the 3′-end of the sense strand) or vice versa. Generally, the antisense strand of the RNAi has a nucleotide overhang at the 3′-end, and the 5′-end is blunt. While not wishing to be bound by theory, the asymmetric blunt end at the 5′-end of the antisense strand and 3′-end overhang of the antisense strand favor the guide strand loading into RISC process.

[0300] In one embodiment, the RNAi agent is a double ended bluntmer of 19 nucleotides in length, wherein the sense strand contains at least one motif of three 2′-F modifications on three consecutive nucleotides at positions 7, 8, 9 from the 5′end. The antisense strand contains at least one motif of three 2′-O-methyl modifications on three consecutive nucleotides at positions 11, 12, 13 from the 5′end. In another embodiment, the RNAi agent is a double ended bluntmer of 20 nucleotides in length, wherein the sense strand contains at least one motif of three 2′-F modifications on three consecutive nucleotides at positions 8, 9, 10 from the 5′end. The antisense strand contains at least one motif of three 2′-O—methyl modifications on three consecutive nucleotides at positions 11, 12, 13 from the 5′end.

[0301] In yet another embodiment, the RNAi agent is a double ended bluntmer of 21 nucleotides in length, wherein the sense strand contains at least one motif of three 2′-F modifications on three consecutive nucleotides at positions 9, 10, 11 from the 5′end. The antisense strand contains at least one motif of three 2′-O-methyl modifications on three consecutive nucleotides at positions 11, 12, 13 from the 5′end.

[0302] In one embodiment, the RNAi agent comprises a 21 nucleotide sense strand and a 23 nucleotide antisense strand, wherein the sense strand contains at least one motif of three 2′-F modifications on three consecutive nucleotides at positions 9, 10, 11 from the 5′end; the antisense strand contains at least one motif of three 2′-O-methyl modifications on three consecutive nucleotides at positions 11, 12, 13 from the 5′end, wherein one end of the RNAi agent is blunt, while the other end comprises a 2 nucleotide overhang. Preferably, the 2 nucleotide overhang is at the 3′-end of the antisense strand.

[0303] When the 2 nucleotide overhang is at the 3′-end of the antisense strand, there may be two phosphorothioate intemucleotide linkages between the terminal three nucleotides, wherein two of the three nucleotides are the overhang nucleotides, and the third nucleotide is a paired nucleotide next to the overhang nucleotide. In one embodiment, the RNAi agent additionally has two phosphorothioate intemucleotide linkages between the terminal three nucleotides at both the 5′-end of the sense strand and at the 5′-end of the antisense strand. In one embodiment, every nucleotide in the sense strand and the antisense strand of the RNAi agent, including the nucleotides that are part of the motifs are modified nucleotides. In one embodiment each residue is independently modified with a 2′-O-methyl or 3′-fluoro, e.g., in an alternating motif Optionally, the RNAi agent further comprises a ligand (preferably GalNAc₃).

[0304] In one embodiment, the RNAi agent comprises a sense and an antisense strand, wherein the sense strand is 25-30 nucleotide residues in length, wherein starting from the 5′ terminal nucleotide (position 1) positions 1 to 23 of the first strand comprise at least 8 ribonucleotides; the antisense strand is 36-66 nucleotide residues in length and, starting from the 3′ terminal nucleotide, comprises at least 8 ribonucleotides in the positions paired with positions 1-23 of sense strand to form a duplex; wherein at least the 3′ terminal nucleotide of antisense strand is unpaired with sense strand, and up to 6 consecutive 3′ terminal nucleotides are unpaired with sense strand, thereby forming a 3′ single stranded overhang of 1-6 nucleotides; wherein the 5′ terminus of antisense strand comprises from 10-30 consecutive nucleotides which are unpaired with sense strand, thereby forming a 10-30 nucleotide single stranded 5′ overhang; wherein at least the sense strand 5′ terminal and 3′ terminal nucleotides are base paired with nucleotides of antisense strand when sense and antisense strands are aligned for maximum complementarity, thereby forming a substantially duplexed region between sense and antisense strands; and antisense strand is sufficiently complementary to a target RNA along at least 19 ribonucleotides of antisense strand length to reduce target gene expression when the double stranded nucleic acid is introduced into a mammalian cell; and wherein the sense strand contains at least one motif of three 2′-F modifications on three consecutive nucleotides, where at least one of the motifs occurs at or near the cleavage site. The antisense strand contains at least one motif of three 2′-O-methyl modifications on three consecutive nucleotides at or near the cleavage site.

[0305] In one embodiment, the RNAi agent comprises sense and antisense strands, wherein the RNAi agent comprises a first strand having a length which is at least 25 and at most 29 nucleotides and a second strand having a length which is at most 30 nucleotides with at least one motif of three 2′-O-methyl modifications on three consecutive nucleotides at position 11, 12, 13 from the 5′ end; wherein the 3′ end of the first strand and the 5′ end of the second strand form a blunt end and the second strand is 1-4 nucleotides longer at its 3′ end than the first strand, wherein the duplex region which is at least 25 nucleotides in length, and the second strand is sufficiently complementary to a target mRNA along at least 19 nucleotide of the second strand length to reduce target gene expression when the RNAi agent is introduced into a mammalian cell, and wherein dicer cleavage of the RNAi agent preferentially results in an siRNA comprising the 3′ end of the second strand, thereby reducing expression of the target gene in the mammal. Optionally, the RNAi agent further comprises a ligand.

[0306] In one embodiment, the sense strand of the RNAi agent contains at least one motif of three identical modifications on three consecutive nucleotides, where one of the motifs occurs at the cleavage site in the sense strand.

[0307] In one embodiment, the antisense strand of the RNAi agent can also contain at least one motif of three identical modifications on three consecutive nucleotides, where one of the motifs occurs at or near the cleavage site in the antisense strand.

[0308] For an RNAi agent having a duplex region of 17-23 nucleotide in length, the cleavage site of the antisense strand is typically around the 10, 11 and 12 positions from the 5′-end. Thus, the motifs of three identical modifications may occur at the 9, 10, 11 positions; 10, 11, 12 positions; 11, 12, 13 positions; 12, 13, 14 positions; or 13, 14, 15 positions of the antisense strand, the count starting from the 1^{st} nucleotide from the 5′-end of the antisense strand, or, the count starting from the 1′ paired nucleotide within the duplex region from the 5′- end of the antisense strand. The cleavage site in the antisense strand may also change according to the length of the duplex region of the RNAi from the 5′-end.

[0309] The sense strand of the RNAi agent may contain at least one motif of three identical modifications on three consecutive nucleotides at the cleavage site of the strand; and the antisense strand may have at least one motif of three identical modifications on three consecutive nucleotides at or near the cleavage site of the strand. When the sense strand and the antisense strand form a dsRNA duplex, the sense strand and the antisense strand can be so aligned that one motif of the three nucleotides on the sense strand and one motif of the three nucleotides on the antisense strand have at least one nucleotide overlap, i.e., at least one of the three nucleotides of the motif in the sense strand forms a base pair with at least one of the three nucleotides of the motif in the antisense strand. Alternatively, at least two nucleotides may overlap, or all three nucleotides may overlap.

[0310] In one embodiment, the sense strand of the RNAi agent may contain more than one motif of three identical modifications on three consecutive nucleotides. The first motif may occur at or near the cleavage site of the strand and the other motifs may be a wing modification. The term “wing modification” herein refers to a motif occurring at another portion of the strand that is separated from the motif at or near the cleavage site of the same strand. The wing modification is either adjacent to the first motif or is separated by at least one or more nucleotides. When the motifs are immediately adjacent to each other then the chemistry of the motifs are distinct from each other and when the motifs are separated by one or more nucleotide than the chemistries can be the same or different. Two or more wing modifications may be present. For instance, when two wing modifications are present, each wing modification may occur at one end relative to the first motif which is at or near cleavage site or on either side of the lead motif.

[0311] Like the sense strand, the antisense strand of the RNAi agent may contain more than one motifs of three identical modifications on three consecutive nucleotides, with at least one of the motifs occurring at or near the cleavage site of the strand. This antisense strand may also contain one or more wing modifications in an alignment similar to the wing modifications that may be present on the sense strand.

[0312] In one embodiment, the wing modification on the sense strand or antisense strand of the RNAi agent typically does not include the first one or two terminal nucleotides at the 3′-end, 5′-end or both ends of the strand.

[0313] In another embodiment, the wing modification on the sense strand or antisense strand of the RNAi agent typically does not include the first one or two paired nucleotides within the duplex region at the 3′-end, 5′-end or both ends of the strand.

[0314] When the sense strand and the antisense strand of the RNAi agent each contain at least one wing modification, the wing modifications may fall on the same end of the duplex region, and have an overlap of one, two or three nucleotides.

[0315] When the sense strand and the antisense strand of the RNAi agent each contain at least two wing modifications, the sense strand and the antisense strand can be so aligned that two modifications each from one strand fall on one end of the duplex region, having an overlap of one, two or three nucleotides; two modifications each from one strand fall on the other end of the duplex region, having an overlap of one, two or three nucleotides; two modifications one strand fall on each side of the lead motif, having an overlap of one, two or three nucleotides in the duplex region.

[0316] In one embodiment, every nucleotide in the sense strand and antisense strand of the RNAi agent, including the nucleotides that are part of the motifs, may be modified. Each nucleotide may be modified with the same or different modification which can include one or more alteration of one or both of the non-linking phosphate oxygens and/or of one or more of the linking phosphate oxygens; alteration of a constituent of the ribose sugar, e.g., of the 2′ hydroxyl on the ribose sugar; wholesale replacement of the phosphate moiety with “dephospho” linkers; modification or replacement of a naturally occurring base; and replacement or modification of the ribose-phosphate backbone.

[0317] As nucleic acids are polymers of subunits, many of the modifications occur at a position which is repeated within a nucleic acid, e.g., a modification of a base, or a phosphate moiety, or a non-linking O of a phosphate moiety. In some cases, the modification will occur at all of the subject positions in the nucleic acid but in many cases it will not. By way of example, a modification may only occur at a 3′ or 5′ terminal position, may only occur in a terminal region, e.g., at a position on a terminal nucleotide or in the last 2, 3, 4, 5, or 10 nucleotides of a strand. A modification may occur in a double strand region, a single strand region, or in both. A modification may occur only in the double strand region of a RNA or may only occur in a single strand region of a RNA. For example, a phosphorothioate modification at a non-linking O position may only occur at one or both termini, may only occur in a terminal region, e.g., at a position on a terminal nucleotide or in the last 2, 3, 4, 5, or 10 nucleotides of a strand, or may occur in double strand and single strand regions, particularly at termini. The 5′ end or ends can be phosphorylated.

[0318] It may be possible, e.g., to enhance stability, to include particular bases in overhangs, or to include modified nucleotides or nucleotide surrogates, in single strand overhangs, e.g., in a 5′ or 3′ overhang, or in both. For example, it can be desirable to include purine nucleotides in overhangs. In some embodiments all or some of the bases in a 3′ or 5′ overhang may be modified, e.g., with a modification described herein.

[0319] Modifications can include, e.g., the use of modifications at the 2′ position of the ribose sugar with modifications that are known in the art, e.g., the use of deoxyribonucleotides, 2′-deoxy-2′-fluoro (2′-F) or 2′-O-methyl modified instead of the ribosugar of the nucleobase, and modifications in the phosphate group, e.g., phosphorothioate modifications. Overhangs need not be homologous with the target sequence.

[0320] In one embodiment, each residue of the sense strand and antisense strand is independently modified with LNA, CRN, cET, UNA, HNA, CeNA, 2′-methoxyethyl, 2′- O-methyl, 2′-O-allyl, 2′-C- allyl, 2′-deoxy, 2′-hydroxyl, or 2′-fluoro. The strands can contain more than one modification. In one embodiment, each residue of the sense strand and antisense strand is independently modified with 2′- O-methyl or 2′-fluoro.

[0321] At least two different modifications are typically present on the sense strand and antisense strand. Those two modifications may be the 2′- O-methyl or 2′-fluoro modifications, or others.

[0322] In one embodiment, the Nₐ and/or N_{b} comprise modifications of an alternating pattern. The term “alternating motif” as used herein refers to a motif having one or more modifications, each modification occurring on alternating nucleotides of one strand. The alternating nucleotide may refer to one per every other nucleotide or one per every three nucleotides, or a similar pattern. For example, if A, B and C each represent one type of modification to the nucleotide, the alternating motif can be “ABABABABABAB . . . ,” “AABBAABBAABB . . . ,” “AABAABAABAAB . . . ,” “AAABAAABAAAB . . . ,” “AAABBBAAABBB . . . ,” or “ABCABCABCABC . . . ,” etc.

[0323] The type of modifications contained in the alternating motif may be the same or different. For example, if A, B, C, D each represent one type of modification on the nucleotide, the alternating pattern, i.e., modifications on every other nucleotide, may be the same, but each of the sense strand or antisense strand can be selected from several possibilities of modifications within the alternating motif such as “ABABAB . . . “ACACAC . . . ” “BDBDBD . . . ” or “CDCDCD . . . ,” etc.

[0324] In one embodiment, the RNAi agent of the invention comprises the modification pattern for the alternating motif on the sense strand relative to the modification pattern for the alternating motif on the antisense strand is shifted. The shift may be such that the modified group of nucleotides of the sense strand corresponds to a differently modified group of nucleotides of the antisense strand and vice versa. For example, the sense strand when paired with the antisense strand in the dsRNA duplex, the alternating motif in the sense strand may start with “ABABAB” from 5′-3′ of the strand and the alternating motif in the antisense strand may start with “BABABA” from 5′-3′ of the strand within the duplex region. As another example, the alternating motif in the sense strand may start with “AABBAABB” from 5′-3′ of the strand and the alternating motif in the antisense strand may start with “BBAABBAA” from 5′-3′ of the strand within the duplex region, so that there is a complete or partial shift of the modification patterns between the sense strand and the antisense strand.

[0325] In one embodiment, the RNAi agent comprises the pattern of the alternating motif of 2′-O-methyl modification and 2′-F modification on the sense strand initially has a shift relative to the pattern of the alternating motif of 2′-O-methyl modification and 2′-F modification on the antisense strand initially, i.e., the 2′-O-methyl modified nucleotide on the sense strand base pairs with a 2′-F modified nucleotide on the antisense strand and vice versa. The 1 position of the sense strand may start with the 2′-F modification, and the 1 position of the antisense strand may start with the 2′- O-methyl modification.

[0326] The introduction of one or more motifs of three identical modifications on three consecutive nucleotides to the sense strand and/or antisense strand interrupts the initial modification pattern present in the sense strand and/or antisense strand. This interruption of the modification pattern of the sense and/or antisense strand by introducing one or more motifs of three identical modifications on three consecutive nucleotides to the sense and/or antisense strand surprisingly enhances the gene silencing activity to the target gene.

[0327] In one embodiment, when the motif of three identical modifications on three consecutive nucleotides is introduced to any of the strands, the modification of the nucleotide next to the motif is a different modification than the modification of the motif. For example, the portion of the sequence containing the motif is “ . . . NₐYYYN_{b} . . . ,” where “Y” represents the modification of the motif of three identical modifications on three consecutive nucleotide, and “Nₐ” and “N_{b}” represent a modification to the nucleotide next to the motif “YYY” that is different than the modification of Y, and where Nₐ and N_{b} can be the same or different modifications. Alternatively, Nₐ and/or N_{b} may be present or absent when there is a wing modification present.

[0328] The RNAi agent may further comprise at least one phosphorothioate or methylphosphonate 35 internucleotide linkage. The phosphorothioate or methylphosphonate internucleotide linkage modification may occur on any nucleotide of the sense strand or antisense strand or both strands in any position of the strand. For instance, the internucleotide linkage modification may occur on every nucleotide on the sense strand and/or antisense strand; each internucleotide linkage modification may occur in an alternating pattern on the sense strand and/or antisense strand; or the sense strand or antisense strand may contain both internucleotide linkage modifications in an alternating pattern. The alternating pattern of the internucleotide linkage modification on the sense strand may be the same or different from the antisense strand, and the alternating pattern of the internucleotide linkage modification on the sense strand may have a shift relative to the alternating pattern of the internucleotide linkage modification on the antisense strand. In one embodiment, a double-stranded RNAi agent comprises 6-8phosphorothioate internucleotide linkages. In one embodiment, the antisense strand comprises two phosphorothioate internucleotide linkages at the 5′-terminus and two phosphorothioate internucleotide linkages at the 3′-terminus, and the sense strand comprises at least two phosphorothioate internucleotide linkages at either the 5′-terminus or the 3′-terminus.

[0329] In one embodiment, the RNAi comprises a phosphorothioate or methylphosphonate internucleotide linkage modification in the overhang region. For example, the overhang region may contain two nucleotides having a phosphorothioate or methylphosphonate internucleotide linkage between the two nucleotides.

[0330] Internucleotide linkage modifications also may be made to link the overhang nucleotides with the terminal paired nucleotides within the duplex region. For example, at least 2, 3, 4, or all the overhang nucleotides may be linked through phosphorothioate or methylphosphonate internucleotide linkage, and optionally, there may be additional phosphorothioate or methylphosphonate internucleotide linkages linking the overhang nucleotide with a paired nucleotide that is next to the overhang nucleotide. For instance, there may be at least two phosphorothioate internucleotide linkages between the terminal three nucleotides, in which two of the three nucleotides are overhang nucleotides, and the third is a paired nucleotide next to the overhang nucleotide.

[0331] These terminal three nucleotides may be at the 3′-end of the antisense strand, the 3′-end of the sense strand, the 5′-end of the antisense strand, and/or the 5′end of the antisense strand.

[0332] In one embodiment, the 2 nucleotide overhang is at the 3′-end of the antisense strand, and there are two phosphorothioate internucleotide linkages between the terminal three nucleotides, wherein two of the three nucleotides are the overhang nucleotides, and the third nucleotide is a paired nucleotide next to the overhang nucleotide. Optionally, the RNAi agent may additionally have two phosphorothioate internucleotide linkages between the terminal three nucleotides at both the 5′-end of the sense strand and at the 5′-end of the antisense strand.

[0333] In one embodiment, the RNAi agent comprises mismatch(es) with the target, within the duplex, or combinations thereof. The mismatch may occur in the overhang region or the duplex region. The base pair may be ranked on the basis of their propensity to promote dissociation or melting (e.g., on the free energy of association or dissociation of a particular pairing, the simplest approach is to examine the pairs on an individual pair basis, though next neighbor or similar analysis can also be used). In terms of promoting dissociation: A:U is preferred over G:C; G:U is preferred over G:C; and I:C is preferred over G:C (I=inosine). Mismatches, e.g., non-canonical or other than canonical pairings (as described elsewhere herein) are preferred over canonical (A:T, A:U, G:C) pairings; and pairings which include a universal base are preferred over canonical pairings.

[0334] In one embodiment, the RNAi agent comprises at least one of the first 1, 2, 3, 4, or 5 base pairs within the duplex regions from the 5′- end of the antisense strand independently selected from the group of: A:U, G:U, I:C, and mismatched pairs, e.g., non-canonical or other than canonical pairings or pairings which include a universal base, to promote the dissociation of the antisense strand at the 5′-end of the duplex.

[0335] In one embodiment, the nucleotide at the 1 position within the duplex region from the 5′-end in the antisense strand is selected from the group consisting of A, dA, dU, U, and dT. Alternatively, at least one of the first 1, 2 or 3 base pair within the duplex region from the 5′- end of the antisense strand is an AU base pair. For example, the first base pair within the duplex region from the 5′- end of the antisense strand is an AU base pair.

[0336] In another embodiment, the nucleotide at the 3′-end of the sense strand is deoxy-thymine (dT). In another embodiment, the nucleotide at the 3′-end of the antisense strand is deoxy-thymine (dT). In one embodiment, there is a short sequence of deoxy-thymine nucleotides, for example, two dT nucleotides on the 3′-end of the sense and/or antisense strand.

[0337] In one embodiment, the sense strand sequence may be represented by formula (I):

[chemical structure]

[0338] wherein:
[0339] i and j are each independently 0 or 1;
[0340] p and q are each independently 0-6;
   [0341] each Nₐ independently represents an oligonucleotide sequence comprising 0-25 modified nucleotides, each sequence comprising at least two differently modified nucleotides;
   [0342] each N_{b} independently represents an oligonucleotide sequence comprising 0-10 modified nucleotides;
   [0343] each nr and n_{q} independently represent an overhang nucleotide;
   [0344] wherein N_{b} and Y do not have the same modification; and
   [0345] XXX, YYY and ZZZ each independently represent one motif of three identical modifications on three consecutive nucleotides. Preferably YYY is all 2′-F modified nucleotides.

[0346] In one embodiment, the Nₐ and/or N_{b} comprise modifications of alternating pattern.

[0347] In one embodiment, the YYY motif occurs at or near the cleavage site of the sense strand. For example, when the RNAi agent has a duplex region of 17-23 nucleotides in length, the YYY motif can occur at or the vicinity of the cleavage site (e.g.: can occur at positions 6, 7, 8, 7, 8, 9, 8, 9, 10, 9, 10, 11, 10, 11,12 or 11, 12, 13) of the sense strand, the count starting from the 1^{st} nucleotide, from the 5′-end; or optionally, the count starting at the 1^{st} paired nucleotide within the duplex region, from the 5′- end.

[0348] In one embodiment, i is 1 and j is 0, or i is 0 and j is 1, or both i and j are 1. The sense strand can therefore be represented by the following formulas:

[chemical structure]

[0349] When the sense strand is represented by formula (Ib), N_{b} represents an oligonucleotide sequence comprising 0-10, 0-7, 0-5, 0-4, 0-2 or 0 modified nucleotides. Each Nₐ independently can represent an oligonucleotide sequence comprising 2-20, 2-15, or 2-10 modified nucleotides.

[0350] When the sense strand is represented as formula (Ic), N_{b} represents an oligonucleotide sequence comprising 0-10, 0-7, 0-10, 0-7, 0-5, 0-4, 0-2 or 0 modified nucleotides. Each Nₐ can independently represent an oligonucleotide sequence comprising 2-20, 2-15, or 2-10 modified nucleotides.

[0351] When the sense strand is represented as formula (Id), each N_{b} independently represents an oligonucleotide sequence comprising 0-10, 0-7, 0-5, 0-4, 0-2 or 0 modified nucleotides. Preferably, N_{b} is 0, 1, 2, 3, 4, 5 or 6. Each Nₐ can independently represent an oligonucleotide sequence comprising 2-20, 2-15, or 2-10 modified nucleotides.

[0352] Each of X, Y and Z may be the same or different from each other.

[0353] In other embodiments, i is 0 and j is 0, and the sense strand may be represented by the formula:

[chemical structure]

[0354] When the sense strand is represented by formula (Ia), each Nₐ independently can represent an oligonucleotide sequence comprising 2-20, 2-15, or 2-10 modified nucleotides.

[0355] In one embodiment, the antisense strand sequence of the RNAi may be represented by formula (II):

[chemical structure]

[0356] wherein:
[0357] k and 1 are each independently 0 or 1;
[0358] p‘ and q’ are each independently 0-6;
   [0359] each Nₐ′ independently represents an oligonucleotide sequence comprising 0-25 modified nucleotides, each sequence comprising at least two differently modified nucleotides;
   [0360] each N_{b}′ independently represents an oligonucleotide sequence comprising 0-10 modified nucleotides;
   [0361] each np′ and n_{q}′ independently represent an overhang nucleotide;
   [0362] wherein N_{b}‘ and Y′ do not have the same modification; and
   [0363] X′X′X′, Y′Y′Y′ and Z′Z′Z′ each independently represent one motif of three identical modifications on three consecutive nucleotides.

[0364] In one embodiment, the Nₐ′ and/or N_{b}′ comprise modifications of alternating pattern.

[0365] The Y′Y′Y′ motif occurs at or near the cleavage site of the antisense strand. For example, when the 35 RNAi agent has a duplex region of 17-23nucleotidein length, the Y′Y′Y′ motif can occur at positions 9, 10, 11;10, 11, 12; 11, 12, 13; 12, 13, 14; or 13, 14, 15 of the antisense strand, with the count starting from the 1^{st} nucleotide, from the 5′-end; or optionally, the count starting at the 1^{st} paired nucleotide within the duplex region, from the 5′- end. Preferably, the Y′Y′Y′ motif occurs at positions 11, 12, 13.

[0366] In one embodiment, Y′Y′Y′ motif is all 2′-OMe modified nucleotides.

[0367] In one embodiment, k is 1 and 1 is 0, or k is 0 and 1 is 1, or both k and 1 are 1.

[0368] The antisense strand can therefore be represented by the following formulas:

[chemical structure]

[0369] When the antisense strand is represented by formula (IIb), N_{b} represents an oligonucleotide sequence comprising 0-10, 0-7, 0-10, 0-7, 0-5, 0-4, 0-2 or 0 modified nucleotides. Each Nₐ′ independently represents an oligonucleotide sequence comprising 2-20, 2-15, or 2-10 modified nucleotides.

[0370] When the antisense strand is represented as formula (IIc), N_{b}′ represents an oligonucleotide sequence comprising 0-10, 0-7, 0-10, 0-7, 0-5, 0-4, 0-2 or 0 modified nucleotides. Each Nₐ′ independently represents an oligonucleotide sequence comprising 2-20, 2-15, or 2-10 modified nucleotides.

[0371] When the antisense strand is represented as formula (IId), each N_{b}′ independently represents an oligonucleotide sequence comprising 0-10, 0-7, 0-10, 0-7, 0-5, 0-4, 0-2 or 0 modified nucleotides. Each Nₐ′ independently represents an oligonucleotide sequence comprising 2-20, 2-15, or 2-10 modified nucleotides.

[0372] Preferably, N_{b} is 0, 1, 2, 3, 4, 5 or 6.

[0373] In other embodiments, k is 0 and 1 is 0 and the antisense strand may be represented by the formula:

[chemical structure]

[0374] When the antisense strand is represented as formula (IIa), each Nₐ′ independently represents an oligonucleotide sequence comprising 2-20, 2-15, or 2-10 modified nucleotides.

[0375] Each of X′, Y′ and Z′ may be the same or different from each other.

[0376] Each nucleotide of the sense strand and antisense strand may be independently modified with LNA, CRN, UNA, cEt, HNA, CeNA, 2′-methoxyethyl, 2′-O-methyl, 2′-O-allyl, 2′-C- allyl, 2′-hydroxyl, or 2′-fluoro. For example, each nucleotide of the sense strand and antisense strand is independently modified with 2′-O-methyl or 2′-fluoro. Each X, Y, Z, X′, Y′ and Z′, in particular, may represent a 2′-O-methyl modification or a 2′-fluoro modification.

[0377] In one embodiment, the sense strand of the RNAi agent may contain YYY motif occurring at 9, 10 and 11 positions of the strand when the duplex region is 21 nt, the count starting from the 1^{st} nucleotide from the 5′-end, or optionally, the count starting at the 1^{s}′ paired nucleotide within the duplex region, from the 5′-end; and Y represents 2′-F modification. The sense strand may additionally contain XXX motif or ZZZ motifs as wing modifications at the opposite end of the duplex region; and XXX and ZZZ each independently represents a 2′-OMe modification or 2′-F modification.

[0378] In one embodiment the antisense strand may contain Y′Y′Y′ motif occurring at positions 11, 12, 13 of the strand, the count starting from the 1st nucleotide from the 5′ end, or optionally, the count starting at the 1st paired nucleotide within the duplex region, from the 5′- end; and Y′ represents 2′-O-methyl modification. The antisense strand may additionally contain X′X′X′ motif or Z′Z′Z′ motifs as wing modifications at the opposite end of the duplex region; and X′X′X′ and Z′Z′Z′ each independently represents a 2′-OMe modification or 2′-F modification.

[0379] The sense strand represented by any one of the above formulas (Ia), (Ib), (Ic), and (Id) forms a duplex with an antisense strand being represented by any one of formulas (IIa), (IIb), (IIc), and (IId), respectively.

[0380] Accordingly, the RNAi agents for use in the methods of the invention may comprise a sense strand and an antisense strand, each strand having 14 to 30 nucleotides, the RNAi duplex represented by formula (III):

[chemical structure]

wherein:
[0381] i, j, k, and 1 are each independently 0 or 1;
[0382] p, p′, q, and q′ are each independently 0-6;
   [0383] each Na and Na′ independently represents an oligonucleotide sequence comprising 0-25 modified nucleotides, each sequence comprising at least two differently modified nucleotides;
   [0384] each N_{b} and Nb′ independently represents an oligonucleotide sequence comprising 0-10 modified nucleotides;
   [0385] wherein each np′, np, nq′, and nq, each of which may or may not be present, independently represents an overhang nucleotide; and XXX, YYY, ZZZ, X′X′X′, Y′Y′Y′, and Z′Z′Z′ each independently represent one motif of three identical modifications on three consecutive nucleotides.

[0386] In one embodiment, i is 0 and j is 0; or i is 1 and j is 0; or i is 0 and j is 1; or both i and j are 0; or both i and j are 1. In another embodiment, k is 0 and 1 is 0; or k is 1 and 1 is 0; k is 0 and 1 is 1; or both k and 1 are 0; or both k and 1 are 1.

[0387] Exemplary combinations of the sense strand and antisense strand forming a RNAi duplex include the formulas below:

[chemical structure]

[0388] When the RNAi agent is represented by formula (IIIa), each Na independently represents an oligonucleotide sequence comprising 2-20, 2-15, or 2-10 modified nucleotides.

[0389] When the RNAi agent is represented by formula (IIIb), each N_{b} independently represents an oligonucleotide sequence comprising 1-10, 1-7, 1-5 or 1-4 modified nucleotides. Each Na independently represents an oligonucleotide sequence comprising 2-20, 2-15, or 2-10 modified nucleotides.

[0390] When the RNAi agent is represented as formula (IIc), each N_{b}, Nb′ independently represents an oligonucleotide sequence comprising 0-10, 0-7, 0-10, 0-7, 0-5, 0-4, 0-2 or 0 modified nucleotides. Each Na independently represents an oligonucleotide sequence comprising 2-20, 2-15, or 2-10 modified nucleotides.

[0391] When the RNAi agent is represented as formula (IIId), each N_{b}, Nb′ independently represents an oligonucleotide sequence comprising 0-10, 0-7, 0-10, 0-7, 0-5, 0-4, 0-2 or 0 modified nucleotides. Each Na, Na′ independently represents an oligonucleotide sequence comprising 2-20, 2-15, or 2-10 modified nucleotides. Each of Na, Na′, N_{b} and Nb′ independently comprises modifications of alternating pattern.

[0392] Each of X, Y and Z in formulas (III), (IIIa), (IIIb), (IIIc), and (IIId) may be the same or different from each other.

[0393] When the RNAi agent is represented by formula (III), (IIIa), (IIIb), (IIIc), and (IIId), at least one of the Y nucleotides may form a base pair with one of the Y′ nucleotides. Alternatively, at least two of the Y nucleotides form base pairs with the corresponding Y′ nucleotides; or all three of the Y nucleotides all form base pairs with the corresponding Y′ nucleotides.

[0394] When the RNAi agent is represented by formula (IIIb) or (IIId), at least one of the Z nucleotides may form a base pair with one of the Z′ nucleotides. Alternatively, at least two of the Z nucleotides form base pairs with the corresponding Z′ nucleotides; or all three of the Z nucleotides all form base pairs with the corresponding Z′ nucleotides.

[0395] When the RNAi agent is represented as formula (I1Ic) or (IIId), at least one of the X nucleotides may form a base pair with one of the X′ nucleotides. Alternatively, at least two of the X nucleotides form base pairs with the corresponding X′ nucleotides; or all three of the X nucleotides all form base pairs with the corresponding X′ nucleotides.

[0396] In one embodiment, the modification on the Y nucleotide is different than the modification on the Y′ nucleotide, the modification on the Z nucleotide is different than the modification on the Z′ nucleotide, and/or the modification on the X nucleotide is different than the modification on the X′ nucleotide.

[0397] In one embodiment, when the RNAi agent is represented by formula (1IId), the Na modifications are 2′-O-methyl or 2′-fluoro modifications. In another embodiment, when the RNAi agent is represented by formula (IIId), the Na modifications are 2′-O-methyl or 2′-fluoro modifications and np′>0 and at least one np′ is linked to a neighboring nucleotide a via phosphorothioate linkage. In yet another embodiment, when the RNAi agent is represented by formula (IIId), the Na modifications are 2′-O-methyl or 2′-fluoro modifications, np′>0 and at least one np′ is linked to a neighboring nucleotide via phosphorothioate linkage, and the sense strand is conjugated to one or more GalNAc derivatives attached through a bivalent or trivalent branched linker (described below). In another embodiment, when the RNAi agent is represented by formula (IIId), the Na modifications are 2′-O-methyl or 2′-fluoro modifications, np′>0 and at least one np′ is linked to a neighboring nucleotide via phosphorothioate linkage, the sense strand comprises at least one phosphorothioate linkage, and the sense strand is conjugated to one or more GalNAc derivatives attached through a bivalent or trivalent branched linker.

[0398] In one embodiment, when the RNAi agent is represented by formula (IIIa), the Na modifications are 2′-O-methyl or 2′-fluoro modifications, np′>0 and at least one np′ is linked to a neighboring nucleotide via phosphorothioate linkage, the sense strand comprises at least one phosphorothioate linkage, and the sense strand is conjugated to one or more GalNAc derivatives attached through a bivalent or trivalent branched linker.

[0399] In one embodiment, the RNAi agent is a multimer containing at least two duplexes represented by formula (III), (IIIa), (IIIb), (IIIc), and (IIId), wherein the duplexes are connected by a linker. The linker can be cleavable or non-cleavable. Optionally, the multimer further comprises a ligand. Each of the duplexes can target the same gene or two different genes; or each of the duplexes can target same gene at two different target sites.

[0400] In one embodiment, the RNAi agent is a multimer containing three, four, five, six or more duplexes represented by formula (III), (IIIa), (IIIb), (IIIc), and (IIId), wherein the duplexes are connected by a linker.

[0401] The linker can be cleavable or non-cleavable. Optionally, the multimer further comprises a ligand. Each of the duplexes can target the same gene or two different genes; or each of the duplexes can target same gene at two different target sites.

[0402] In one embodiment, two RNAi agents represented by formula (III), (IIIa), (IIIb), (IIIc), and (IIId) are linked to each other at the 5′ end, and one or both of the 3′ ends and are optionally conjugated to a ligand.

[0403] Each of the agents can target the same gene or two different genes; or each of the agents can target same gene at two different target sites.

[0404] In certain embodiments, an RNAi agent of the invention may contain a low number of nucleotides containing a 2′-fluoro modification, e.g., 10 or fewer nucleotides with 2′-fluoro modification. For example, the RNAi agent may contain 10, 9, 8, 7, 6, 5, 4, 3, 2, 1 or 0 nucleotides with a 2′-fluoro modification. In a specific embodiment, the RNAi agent of the invention contains 10 nucleotides with a 2′-fluoro modification, e.g., 4 nucleotides with a 2′-fluoro modification in the sense strand and 6 nucleotides with a 2′-fluoro modification in the antisense strand. In another specific embodiment, the RNAi agent of the invention contains 6 nucleotides with a 2′-fluoro modification, e.g., 4 nucleotides with a 2′-fluoro modification in the sense strand and 2 nucleotides with a 2′-fluoro modification in the antisense strand.

[0405] In other embodiments, an RNAi agent of the invention may contain an ultra-low number of nucleotides containing a 2′-fluoro modification, e.g., 2 or fewer nucleotides containing a 2′-fluoro modification. For example, the RNAi agent may contain 2, 1 of 0 nucleotides with a 2′-fluoro modification.

[0406] In a specific embodiment, the RNAi agent may contain 2 nucleotides with a 2′-fluoro modification, e.g., 0 nucleotides with a 2-fluoro modification in the sense strand and 2 nucleotides with a 2′-fluoro modification in the antisense strand.

[0407] Various publications describe multimeric RNAi agents that can be used in the methods of the invention. Such publications include WO2007/091269, U.S. Pat. No. 7,858,769, WO2010/141511, WO2007/117686, WO2009/014887 and WO2011/031520 the entire contents of each of which are hereby incorporated herein by reference.

[0408] As described in more detail below, the RNAi agent that contains conjugations of one or more carbohydrate moieties to a RNAi agent can optimize one or more properties of the RNAi agent. In many cases, the carbohydrate moiety will be attached to a modified subunit of the RNAi agent. For example, the ribose sugar of one or more ribonucleotide subunits of a dsRNA agent can be replaced with another moiety, e.g., a non-carbohydrate (preferably cyclic) carrier to which is attached a carbohydrate ligand. A ribonucleotide subunit in which the ribose sugar of the subunit has been so replaced is referred to herein as a ribose replacement modification subunit (RRMS). A cyclic carrier may be a carbocyclic ring system, i.e., all ring atoms are carbon atoms, or a heterocyclic ring system, i.e., one or more ring atoms may be a heteroatom, e.g., nitrogen, oxygen, sulfur. The cyclic carrier may be a monocyclic ring system, or may contain two or more rings, e.g. fused rings. The cyclic carrier may be a fully saturated ring system, or it may contain one or more double bonds.

[0409] The ligand may be attached to the polynucleotide via a carrier. The carriers include (i) at least one “backbone attachment point,” preferably two “backbone attachment points” and (ii) at least one “tethering attachment point.” A “backbone attachment point” as used herein refers to a functional group, e.g. a hydroxyl group, or generally, a bond available for, and that is suitable for incorporation of the carrier into the backbone, e.g., the phosphate, or modified phosphate, e.g., sulfur containing, backbone, of a ribonucleic acid. A “tethering attachment point” (TAP) in some embodiments refers to a constituent ring atom of the cyclic carrier, e.g., a carbon atom or a heteroatom (distinct from an atom which provides a backbone attachment point), that connects a selected moiety. The moiety can be, e.g., a carbohydrate, e.g. monosaccharide, disaccharide, trisaccharide, tetrasaccharide, oligosaccharide and polysaccharide. Optionally, the selected moiety is connected by an intervening tether to the cyclic carrier. Thus, the cyclic carrier will often include a functional group, e.g., an amino group, or generally, provide a bond, that is suitable for incorporation or tethering of another chemical entity, e.g., a ligand to the constituent ring.

[0410] The RNAi agents may be conjugated to a ligand via a carrier, wherein the carrier can be cyclic group or acyclic group; preferably, the cyclic group is selected from pyrrolidinyl, pyrazolinyl, pyrazolidinyl, imidazolinyl, imidazolidinyl, piperidinyl, piperazinyl, [1,3]dioxolane, oxazolidinyl, isoxazolidinyl, morpholinyl, thiazolidinyl, isothiazolidinyl, quinoxalinyl, pyridazinonyl, tetrahydrofuryl and decalin; preferably, the acyclic group is selected from serinol backbone or diethanolamine backbone.

[0411] In another embodiment of the invention, an iRNA agent comprises a sense strand and an antisense strand, each strand having 14 to 40 nucleotides. The RNAi agent may be represented by formula (L):

[chemical structure]

[0412] In formula (L), B1, B2, B3, B1′, B2′, B3′, and B4′ each are independently a nucleotide containing a modification selected from the group consisting of 2′-O-alkyl, 2′-substituted alkoxy, 2′-substituted alkyl, 2′-halo, ENA, and BNA/LNA. In certain embodiments, B1, B2, B3, B1′, B2′, B3′, and B4′ each contain 2′-OMe modifications. In certain embodiments, B1, B2, B3, B1′, B2′, B3′, and B4′ each contain 2′-OMe or 2′-F modifications. In certain embodiments, at least one of B1, B2, B3, B1′, B2′, B3′, and B4′ contain 2′-O-N-methylacetamido (2′-O-NMA) modification.

[0413] C1 is a thermally destabilizing nucleotide placed at a site opposite to the seed region of the antisense strand (i.e., at positions 2-8 of the 5′-end of the antisense strand). For example, C1 is at a position of the sense strand that pairs with a nucleotide at positions 2-8 of the 5′-end of the antisense strand. In one example, C1 is at position 15 from the 5′-end of the sense strand. C1 nucleotide bears the thermally destabilizing modification which can include abasic modification; mismatch with the opposing nucleotide in the duplex; and sugar modification such as 2′-deoxy modification or acyclic nucleotide e.g., unlocked nucleic acids (UNA) or glycerol nucleic acid (GNA). In certain embodiments, C1 has thermally destabilizing modification selected from the group consisting of: i) mismatch with the opposing nucleotide in the antisense strand; ii) abasic modification selected from the group consisting of:

[chemical structure]

and iii) sugar modification selected from the group consisting of:

[chemical structure]

wherein B is a modified or unmodified nucleobase, R¹ and R² independently are H, halogen, OR₃, or alkyl; and R₃ is H, alkyl, cycloalkyl, aryl, aralkyl, heteroaryl or sugar. In certain embodiments, the thermally destabilizing modification in C1 is a mismatch selected from the group consisting of G:G, G:A, G:U, G:T, A:A, A:C, C:C, C:U, C:T, U:U, T:T, and U:T; and optionally, at least one nucleobase in the mismatch pair is a 2′-deoxy nucleobase. In one example, the thermally destabilizing modification in C1 is GNA or

[chemical structure]

[0414] T1, T1′, T2′, and T3′ each independently represent a nucleotide comprising a modification providing the nucleotide a steric bulk that is less or equal to the steric bulk of a 2′-OMe modification. A steric bulk refers to the sum of steric effects of a modification. Methods for determining steric effects of a modification of a nucleotide are known to one skilled in the art. The modification can be at the 2′ position of a ribose sugar of the nucleotide, or a modification to a non-ribose nucleotide, acyclic nucleotide, or the backbone of the nucleotide that is similar or equivalent to the 2′ position of the ribose sugar, and provides the nucleotide a steric bulk that is less than or equal to the steric bulk of a 2′-OMe modification. For example, T1, T1′, T2′, and T3′ are each independently selected from DNA, RNA, LNA, 2′-F, and 2′-F-5′-methyl. In certain embodiments, T1 is DNA. In certain embodiments, T1′ is DNA, RNA or LNA. In certain embodiments, T2′ is DNA or RNA. In certain embodiments, T3′ is DNA or RNA.
[0415] n¹, n³, and g′ are independently 4 to 15 nucleotides in length.
[0416] n⁵, q³, and q′ are independently 1-6 nucleotide(s) in length.
[0417] n⁴, q², and q⁶ are independently 1-3 nucleotide(s) in length; alternatively, n⁴ is 0.
[0418] q⁵ is independently 0-10 nucleotide(s) in length.
[0419] n² and q⁴ are independently 0-3 nucleotide(s) in length.

[0420] Alternatively, n⁴ is 0-3 nucleotide(s) in length.

[0421] In certain embodiments, n⁴ can be 0. In one example, n⁴ is 0, and q² and q⁶ are 1. In another example, n⁴ is 0, and q² and q⁶ are 1, with two phosphorothioate internucleotide linkage modifications within position 1-5 of the sense strand (counting from the 5′-end of the sense strand), and two phosphorothioate internucleotide linkage modifications at positions 1 and 2 and two phosphorothioate internucleotide linkage modifications within positions 18-23 of the antisense strand (counting from the 5′-end of the antisense strand).

[0422] In certain embodiments, n⁴, q², and q⁶ are each 1.

[0423] In certain embodiments, n² n⁴ q², q 4, and q⁶ are each 1.

[0424] In certain embodiments, C1 is at position 14-17 of the 5′-end of the sense strand, when the sense strand is 19-22 nucleotides in length, and n⁴ is 1. In certain embodiments, C1 is at position 15 of the 5′-end of the sense strand In certain embodiments, T3′ starts at position 2 from the 5′ end of the antisense strand. In one example, T3′ is at position 2 from the 5′ end of the antisense strand and q⁶ is equal to 1.

[0425] In certain embodiments, T1′ starts at position 14 from the 5′ end of the antisense strand. In one example, T1′ is at position 14 from the 5′ end of the antisense strand and q² is equal to 1.

[0426] In an exemplary embodiment, T3′ starts from position 2 from the 5′ end of the antisense strand and T1′ starts from position 14 from the 5′ end of the antisense strand. In one example, T3′ starts from position 2 from the 5′ end of the antisense strand and q⁶ is equal to 1 and T1′ starts from position 14 from the 5′ end of the antisense strand and q² is equal to 1.

[0427] In certain embodiments, T1′ and T3′ are separated by 11 nucleotides in length (i.e. not counting the T1′ and T3′ nucleotides).

[0428] In certain embodiments, T1′ is at position 14 from the 5′ end of the antisense strand. In one example, T1′ is at position 14 from the 5′ end of the antisense strand and q² is equal to 1, and the modification at the 2′ position or positions in a non-ribose, acyclic or backbone that provide less steric bulk than a 2′-OMe ribose.

[0429] In certain embodiments, T3′ is at position 2 from the 5′ end of the antisense strand. In one example, T3′ is at position 2 from the 5′ end of the antisense strand and q⁶ is equal to 1, and the modification at the 2′ position or positions in a non-ribose, acyclic or backbone that provide less than or equal to steric bulk than a 2′-OMe ribose.

[0430] In certain embodiments, T1 is at the cleavage site of the sense strand. In one example, T1 is at position 11 from the 5′ end of the sense strand, when the sense strand is 19-22 nucleotides in length, and n² is 1. In an exemplary embodiment, T1 is at the cleavage site of the sense strand at position 11 from the 5′ end of the sense strand, when the sense strand is 19-22 nucleotides in length, and n² is 1, In certain embodiments, T2′ starts at position 6 from the 5′ end of the antisense strand. In one example, T2′ is at positions 6-10 from the 5′ end of the antisense strand, and q⁴ is 1.

[0431] In an exemplary embodiment, T1 is at the cleavage site of the sense strand, for instance, at position 11 from the 5′ end of the sense strand, when the sense strand is 19-22 nucleotides in length, and n² is 1; T1′ is at position 14 from the 5′ end of the antisense strand, and q² is equal to 1, and the modification to T1′ is at the 2′ position of a ribose sugar or at positions in a non-ribose, acyclic or backbone that provide less steric bulk than a 2′-OMe ribose; T2′ is at positions 6-10 from the 5′ end of the antisense strand, and q⁴ is 1; and T3′ is at position 2 from the 5′ end of the antisense strand, and q⁶ is equal to 1, and the modification to T3′ is at the 2′ position or at positions in a non-ribose, acyclic or backbone that provide less than or equal to steric bulk than a 2′-OMe ribose.

[0432] In certain embodiments, T2′ starts at position 8 from the 5′ end of the antisense strand. In one example, T2′ starts at position 8 from the 5′ end of the antisense strand, and q⁴ is 2.

[0433] In certain embodiments, T2′ starts at position 9 from the 5′ end of the antisense strand. In one example, T2′ is at position 9 from the 5′ end of the antisense strand, and q⁴ is 1.

[0434] In certain embodiments, B1′ is 2′-OMe or 2′-F, q′ is 9, T1′ is 2′-F, q² is 1, B2′ is 2′-OMe or 2′-F, q³ is 4, T2′ is 2′-F, q⁴ is 1, B3′ is 2′-OMe or 2′-F, q⁵ is 6, T3′ is 2′-F, q⁶ is 1, B4′ is 2′-OMe, and q⁷ is 1; with two phosphorothioate internucleotide linkage modifications within positions 1-5 of the sense strand (counting from the 5′-end of the sense strand), and two phosphorothioate internucleotide linkage modifications at positions 1 and 2 and two phosphorothioate internucleotide linkage modifications within positions 18-23 of the antisense strand (counting from the 5′-end of the antisense strand).

[0435] In certain embodiments, n⁴ is 0, B3 is 2′-OMe, n⁵ is 3, B1′ is 2′-OMe or 2′-F, q′ is 9, T1′ is 2′-F, q² is 1, B2′ is 2′-OMe or 2′-F, q³ is 4, T2′ is 2′-F, q⁴ is 1, B3′ is 2′-OMe or 2′-F, q⁵ is 6, T3′ is 2′-F, q⁶ is 1, B4′ is 2′-OMe, and q⁷ is 1; with two phosphorothioate internucleotide linkage modifications within positions 1-5 of the sense strand (counting from the 5′-end of the sense strand), and two phosphorothioate internucleotide linkage modifications at positions 1 and 2 and two phosphorothioate internucleotide linkage modifications within positions 18-23 of the antisense strand (counting from the 5′-end of the antisense strand).

[0436] In certain embodiments, B1 is 2′-OMe or 2′-F, n¹ is 8, T1 is 2′F, n² is 3, B2 is 2′-OMe, n³ is 7, n⁴ is 0, B3 is 2′OMe, n⁵ is 3, B1′ is 2′-OMe or 2′-F, q′ is 9, T1′ is 2′-F, q² is 1, B2′ is 2′-OMe or 2′-F, q³ is 4, T2′ is 2′-F, q⁴ is 2, B3′ is 2′-OMe or 2′-F, q⁵ is 5, T3′ is 2′-F, q⁶ is 1, B4′ is 2′-OMe, and q⁷ is 1.

[0437] In certain embodiments, B1 is 2′-OMe or 2′-F, n¹ is 8, T1 is 2′F, n² is 3, B2 is 2′-OMe, n³ is 7, n⁴ is 0, B3 is 2′-OMe, n⁵ is 3, B1′ is 2′-OMe or 2′-F, q′ is 9, T1′ is 2′-F, q² is 1, B2′ is 2′-OMe or 2′-F, q³ is 4, T2′ is 2′-F, q⁴ is 2, B3′ is 2′-OMe or 2′-F, q⁵ is 5, T3′ is 2′-F, q⁶ is 1, B4′ is 2′-OMe, and q⁷ is 1; with two phosphorothioate internucleotide linkage modifications within positions 1-5 of the sense strand (counting from the 5′-end of the sense strand), and two phosphorothioate internucleotide linkage modifications at positions 1 and 2 and two phosphorothioate internucleotide linkage modifications within positions 18-23 of the antisense strand (counting from the 5′-end of the antisense strand).

[0438] In certain embodiments, B1 is 2′-OMe or 2′-F, n¹ is 6, T1 is 2′F, n² is 3, B2 is 2′-OMe, n³ is 7, n⁴ is 0, B3 is 2′OMe, n⁵ is 3, B1′ is 2′-OMe or 2′-F, q′ is 7, T1′ is 2′-F, q² is 1, B2′ is 2′-OMe or 2′-F, q³ is 4, T2′ is 2′-F, q⁴ is 2, B3′ is 2′-OMe or 2′-F, q⁵ is 5, T3′ is 2′-F, q⁶ is 1, B4′ is 2′-OMe, and q⁷ is 1.

[0439] In certain embodiments, B1 is 2′-OMe or 2′-F, n¹ is 6, T1 is 2′F, n² is 3, B2 is 2′-OMe, n³ is 7, n⁴ is 0, B3 is 2′-OMe, n⁵ is 3, B1′ is 2′-OMe or 2′-F, q′ is 7, T1′ is 2′-F, q² is 1, B2′ is 2′-OMe or 2′-F, q³ is 4, T2′ is 2′-F, q⁴ is 2, B3′ is 2′-OMe or 2′-F, q⁵ is 5, T3′ is 2′-F, q⁶ is 1, B4′ is 2′-OMe, and q⁷ is 1; with two phosphorothioate internucleotide linkage modifications within positions 1-5 of the sense strand (counting from the 5′-end of the sense strand), and two phosphorothioate internucleotide linkage modifications at positions 1 and 2 and two phosphorothioate internucleotide linkage modifications within positions 18-23 of the antisense strand (counting from the 5′-end of the antisense strand).

[0440] In certain embodiments, B1 is 2′-OMe or 2′-F, n¹ is 8, T1 is 2′F, n² is 3, B2 is 2′-OMe, n³ is 7, n⁴ is 0, B3 is 2′OMe, n⁵ is 3, B1′ is 2′-OMe or 2′-F, q′ is 9, T1′ is 2′-F, q² is 1, B2′ is 2′-OMe or 2′-F, q³ is 4, T2′ is 2′-F, q⁴ is 1, B3′ is 2′-OMe or 2′-F, q⁵ is 6, T3′ is 2′-F, q⁶ is 1, B4′ is 2′-OMe, and q⁷ is 1.

[0441] In certain embodiments, B1 is 2′-OMe or 2′-F, n¹ is 8, T1 is 2′F, n² is 3, B2 is 2′-OMe, n³ is 7, n⁴ is 0, B3 is 2′-OMe, n⁵ is 3, B1′ is 2′-OMe or 2′-F, q′ is 9, T1′ is 2′-F, q² is 1, B2′ is 2′-OMe or 2′-F, q³ is 4, T2′ is 2′-F, q⁴ is 1, B3′ is 2′-OMe or 2′-F, q⁵ is 6, T3′ is 2′-F, q⁶ is 1, B4′ is 2′-OMe, and q⁷ is 1; with two phosphorothioate internucleotide linkage modifications within positions 1-5 of the sense strand (counting from the 5′-end of the sense strand), and two phosphorothioate internucleotide linkage modifications at positions 1 and 2 and two phosphorothioate internucleotide linkage modifications within positions 18-23 of the antisense strand (counting from the 5′-end of the antisense strand).

[0442] In certain embodiments, B1 is 2′-OMe or 2′-F, n¹ is 8, T1 is 2′F, n² is 3, B2 is 2′-OMe, n³ is 7, n⁴ is 0, B3 is 2′OMe, n⁵ is 3, B1′ is 2′-OMe or 2′-F, q′ is 9, T1′ is 2′-F, q² is 1, B2′ is 2′-OMe or 2′-F, q³ is 5, T2′ is 2′-F, q⁴ is 1, B3′ is 2′-OMe or 2′-F, q⁵ is 5, T3′ is 2′-F, q⁶ is 1, B4′ is 2′-OMe, and q⁷ is 1; optionally with at least 2 additional TT at the 3′-end of the antisense strand.

[0443] In certain embodiments, B1 is 2′-OMe or 2′-F, n¹ is 8, T1 is 2′F, n² is 3, B2 is 2′-OMe, n³ is 7, n⁴ is 0, B3 is 2′-OMe, n⁵ is 3, B1′ is 2′-OMe or 2′-F, q′ is 9, T1′ is 2′-F, q² is 1, B2′ is 2′-OMe or 2′-F, q³ is 5, T2′ is 2′-F, q⁴ is 1, B3′ is 2′-OMe or 2′-F, q⁵ is 5, T3′ is 2′-F, q⁶ is 1, B4′ is 2′-OMe, and q⁷ is 1; optionally with at least 2 additional TT at the 3′-end of the antisense strand; with two phosphorothioate internucleotide linkage modifications within positions 1-5 of the sense strand (counting from the 5′-end of the sense strand), and two phosphorothioate internucleotide linkage modifications at positions 1 and 2 and two phosphorothioate internucleotide linkage modifications within positions 18-23 of the antisense strand (counting from the 5′-end of the antisense strand).

[0444] In certain embodiments, B1 is 2′-OMe or 2′-F, n¹ is 8, T1 is 2′F, n² is 3, B2 is 2′-OMe, n³ is 7, n⁴ is 0, B3 is 2′-OMe, n⁵ is 3, B1′ is 2′-OMe or 2′-F, q′ is 9, T1′ is 2′-F, q² is 1, B2′ is 2′-OMe or 2′-F, q³ is 4, q⁴ is 0, B3′ is 2′-OMe or 2′-F, q⁵ is 7, T3′ is 2′-F, q⁶ is 1, B4′ is 2′-OMe, and q⁷ is 1.

[0445] In certain embodiments, B1 is 2′-OMe or 2′-F, n¹ is 8, T1 is 2′F, n² is 3, B2 is 2′-OMe, n³ is 7, n⁴ is 0, B3 is 2′-OMe, n⁵ is 3, B1′ is 2′-OMe or 2′-F, q′ is 9, T1′ is 2′-F, q² is 1, B2′ is 2′-OMe or 2′-F, q³ is 4, q⁴ is 0, B3′ is 2′-OMe or 2′-F, q⁵ is 7, T3′ is 2′-F, q⁶ is 1, B4′ is 2′-OMe, and q⁷ is 1; with two phosphorothioate internucleotide linkage modifications within positions 1-5 of the sense strand (counting from the 5′-end), and two phosphorothioate internucleotide linkage modifications at positions 1 and 2 and two phosphorothioate internucleotide linkage modifications within positions 18-23 of the antisense strand (counting from the 5′-end).

[0446] In certain embodiments, B1 is 2′-OMe or 2′-F, n¹ is 8, T1 is 2′F, n² is 3, B2 is 2′-OMe, n³ is 7, n⁴ is 0, B3 is 2′OMe, n⁵ is 3, B1′ is 2′-OMe or 2′-F, q′ is 9, T1′ is 2′-F, q² is 1, B2′ is 2′-OMe or 2′-F, q³ is 4, T2′ is 2′-F, q⁴ is 2, B3′ is 2′-OMe or 2′-F, q⁵ is 5, T3′ is 2′-F, q⁶ is 1, B4′ is 2′-F, and q⁷ is 1.

[0447] In certain embodiments, B1 is 2′-OMe or 2′-F, n¹ is 8, T1 is 2′F, n² is 3, B2 is 2′-OMe, n³ is 7, n⁴ is 0, B3 is 2′-OMe, n⁵ is 3, B1′ is 2′-OMe or 2′-F, q′ is 9, T1′ is 2′-F, q² is 1, B2′ is 2′-OMe or 2′-F, q³ is 4, T2′ is 2′-F, q⁴ is 2, B3′ is 2′-OMe or 2′-F, q⁵ is 5, T3′ is 2′-F, q⁶ is 1, B4′ is 2′-F, and q⁷ is 1; with two phosphorothioate internucleotide linkage modifications within positions 1-5 of the sense strand (counting from the 5′-end of the sense strand), and two phosphorothioate internucleotide linkage modifications at positions 1 and 2 and two phosphorothioate internucleotide linkage modifications within positions 18-23 of the antisense strand (counting from the 5′-end of the antisense strand).

[0448] In certain embodiments, B1 is 2′-OMe or 2′-F, n¹ is 8, T1 is 2′F, n² is 3, B2 is 2′-OMe, n³ is 7, n⁴ is 0, B3 is 2′-OMe, n⁵ is 3, B1′ is 2′-OMe or 2′-F, q′ is 9, T1′ is 2′-F, q² is 1, B2′ is 2′-OMe or 2′-F, q³ is 4, q⁴ is 0, B3′ is 2′-OMe or 2′-F, q⁵ is 7, T3′ is 2′-F, q⁶ is 1, B4′ is 2′-F, and q⁷ is 1.

[0449] In certain embodiments, B1 is 2′-OMe or 2′-F, n¹ is 8, T1 is 2′F, n² is 3, B2 is 2′-OMe, n³ is 7, n⁴ is 0, B3 is 2′-OMe, n⁵ is 3, B1′ is 2′-OMe or 2′-F, q′ is 9, T1′ is 2′-F, q² is 1, B2′ is 2′-OMe or 2′-F, q³ is 4, q⁴ is 0, B3′ is 2′-OMe or 2′-F, q⁵ is 7, T3′ is 2′-F, q⁶ is 1, B4′ is 2′-F, and q⁷ is 1; with two phosphorothioate internucleotide linkage modifications within positions 1-5 of the sense strand (counting from the 5′-end of the sense strand), and two phosphorothioate internucleotide linkage modifications at positions 1 and 2 and two phosphorothioate internucleotide linkage modifications within positions 18-23 of the antisense strand (counting from the 5′-end of the antisense strand).

[0450] In certain embodiments, the compositions and methods of the disclosure include a vinyl phosphonate (VP) modification of an RNAi agent as described herein. In exemplary embodiments, a vinyl phosphonate of the disclosure has the following structure:

[chemical structure]

[0451] In exemplary embodiments, a 5′ vinyl phosphonate modified nucleotide of the disclosure has the structure:

[chemical structure]

wherein X is O or S;
[0452] R is hydrogen, hydroxy, fluoro, or C₁₋₂₀alkoxy (e.g., methoxy or n-hexadecyloxy);
[0453] R^{5′} is ═C(H)-P(O)(OH)₂ and the double bond between the C5‘ carbon and R’ is in the E or Z orientation (e.g., E orientation); and B is a nucleobase or a modified nucleobase, optionally where B is adenine, guanine, cytosine, thymine, or uracil.

[0454] In one embodiment, R^{5′} is ═C(H)-P(O)(OH)₂ and the double bond between the C5′ carbon and R5′ is in the E orientation. In another embodiment, R is methoxy and R^{5′} is ═C(H)-P(O)(OH)₂ and the double bond between the C5′ carbon and R5′ is in the E orientation. In another embodiment, X is S, R is methoxy, and R^{5′} is ═C(H)-P(O)(OH)₂ and the double bond between the C5′ carbon and R5′ is in the E orientation.

[0455] A vinyl phosphonate of the instant disclosure may be attached to either the antisense or the sense strand of a dsRNA of the disclosure. In certain preferred embodiments, a vinyl phosphonate of the instant disclosure is attached to the antisense strand of a dsRNA, optionally at the 5′ end of the antisense strand of the dsRNA. The dsRNA agent can comprise a phosphorus-containing group at the 5′-end of the sense strand or antisense strand. The 5′-end phosphorus-containing group can be 5′-end phosphate (5′-P), 5′-end phosphorothioate (5′-PS), 5′-end phosphorodithioate (5′-PS2), 5′-end vinylphosphonate (5′-VP), 5′-end methylphosphonate (MePhos), or 5′-deoxy-5′-C-malonyl. When the 5′-end phosphorus-containing group is 5′-end vinylphosphonate (5′-VP), the 5′-VP can be either 5′-E-VP isomer (i.e., trans-vinylphosphonate,

[chemical structure]

5′-Z-VP isomer (i.e., cis-vinylphosphonate,

[chemical structure]

or mixtures thereof.

[0456] Vinyl phosphate modifications are also contemplated for the compositions and methods of the instant disclosure. An exemplary vinyl phosphate structure is:

[chemical structure]

Another exemplary vinyl phosphate structure includes the preceding structure, where R^{5′} is ═C(H)-OP(O)(OH)₂ and the double bond between the C5‘ carbon and RI’ is in the E or Z orientation (e.g., E orientation). For example, when the phosphate mimic is a 5′-vinyl phosphate, the 5′-terminal nucleotide can have the immediately structure, where the phosphonate group is replaced by a phosphate.

[0457] In certain embodiments, the RNAi agent comprises a phosphorus-containing group at the 5′-end of the sense strand. In certain embodiments, the RNAi agent comprises a phosphorus-containing group at the 5′-end of the antisense strand.

[0458] In certain embodiments, the RNAi agent comprises a 5′-P. In certain embodiments, the RNAi agent comprises a 5′-P in the antisense strand.

[0459] In certain embodiments, the RNAi agent comprises a 5′-PS. In certain embodiments, the RNAi agent comprises a 5′-PS in the antisense strand.

[0460] In certain embodiments, the RNAi agent comprises a 5′-VP. In certain embodiments, the RNAi agent comprises a 5′-VP in the antisense strand. In certain embodiments, the RNAi agent comprises a 5′-E-VP in the antisense strand. In certain embodiments, the RNAi agent comprises a 5′-Z-VP in the antisense strand.

[0461] In certain embodiments, the RNAi agent comprises a 5′-PS₂. In certain embodiments, the RNAi agent comprises a 5′-PS₂ in the antisense strand.

[0462] In certain embodiments, the RNAi agent comprises a 5′-PS₂. In certain embodiments, the RNAi agent comprises a 5′-deoxy-5′-C-malonyl in the antisense strand.

[0463] In certain embodiments, B1 is 2′-OMe or 2′-F, n¹ is 8, T1 is 2′F, n² is 3, B2 is 2′-OMe, n³ is 7, n⁴ is 0, B3 is 2′OMe, n⁵ is 3, B1′ is 2′-OMe or 2′-F, q′ is 9, T1′ is 2′-F, q² is 1, B2′ is 2′-OMe or 2′-F, q³ is 4, T2′ is 2′-F, q⁴ is 2, B3′ is 2′-OMe or 2′-F, q⁵ is 5, T3′ is 2′-F, q⁶ is 1, B4′ is 2′-OMe, and q⁷ is 1. The RNAi agent also comprises a 5′-PS.

[0464] In certain embodiments, B1 is 2′-OMe or 2′-F, n¹ is 8, T1 is 2′F, n² is 3, B2 is 2′-OMe, n³ is 7, n⁴ is 0, B3 is 2′OMe, n⁵ is 3, B1′ is 2′-OMe or 2′-F, q′ is 9, T1′ is 2′-F, q² is 1, B2′ is 2′-OMe or 2′-F, q³ is 4, T2′ is 2′-F, q⁴ is 2, B3′ is 2′-OMe or 2′-F, q⁵ is 5, T3′ is 2′-F, q⁶ is 1, B4′ is 2′-OMe, and q⁷ is 1. The RNAi agent also comprises a 5′-P.

[0465] In certain embodiments, B1 is 2′-OMe or 2′-F, n¹ is 8, T1 is 2′F, n² is 3, B2 is 2′-OMe, n³ is 7, n⁴ 10 is 0, B3 is 2′OMe, n⁵ is 3, B1′ is 2′-OMe or 2′-F, q′ is 9, T1′ is 2′-F, q² is 1, B2′ is 2′-OMe or 2′-F, q³ is 4, T2′ is 2′-F, q⁴ is 2, B3′ is 2′-OMe or 2′-F, q⁵ is 5, T3′ is 2′-F, q⁶ is 1, B4′ is 2′-OMe, and q⁷ is 1. The RNAi agent also comprises a 5′-VP. The 5′-VP may be 5′-E-VP, 5′-Z-VP, or combination thereof.

[0466] In certain embodiments, B1 is 2′-OMe or 2′-F, n¹ is 8, T1 is 2′F, n² is 3, B2 is 2′-OMe, n³ is 7, n⁴ is 0, B3 is 2′OMe, n⁵ is 3, B1′ is 2′-OMe or 2′-F, q′ is 9, T1′ is 2′-F, q² is 1, B2′ is 2′-OMe or 2′-F, q³ is 4, T2′ is 2′-F, q⁴ is 2, B3′ is 2′-OMe or 2′-F, q⁵ is 5, T3′ is 2′-F, q⁶ is 1, B4′ is 2′-OMe, and q⁷ is 1. The RNAi agent also comprises a 5′- PS₂.

[0467] In certain embodiments, B1 is 2′-OMe or 2′-F, n¹ is 8, T1 is 2′F, n² is 3, B2 is 2′-OMe, n³ is 7, n⁴ is 0, B3 is 2′OMe, n⁵ is 3, B1′ is 2′-OMe or 2′-F, q′ is 9, T1′ is 2′-F, q² is 1, B2′ is 2′-OMe or 2′-F, q³ is 4, T2′ is 2′-F, q⁴ is 2, B3′ is 2′-OMe or 2′-F, q⁵ is 5, T3′ is 2′-F, q⁶ is 1, B4′ is 2′-OMe, and q⁷ is 1. The RNAi agent also comprises a 5′-deoxy-5′-C-malonyl.

[0468] In certain embodiments, B1 is 2′-OMe or 2′-F, n¹ is 8, T1 is 2′F, n² is 3, B2 is 2′-OMe, n³ is 7, n⁴ is 0, B3 is 2′-OMe, n⁵ is 3, B1′ is 2′-OMe or 2′-F, q′ is 9, T1′ is 2′-F, q² is 1, B2′ is 2′-OMe or 2′-F, q³ is 4, T2′ is 2′-F, q⁴ is 2, B3′ is 2′-OMe or 2′-F, q⁵ is 5, T3′ is 2′-F, q⁶ is 1, B4′ is 2′-OMe, and q⁷ is 1; with two phosphorothioate internucleotide linkage modifications within position 1-5 of the sense strand (counting from the 5′-end of the sense strand), and two phosphorothioate internucleotide linkage modifications at positions 1 and 2 and two phosphorothioate internucleotide linkage modifications within positions 18-23 of the antisense strand (counting from the 5′-end of the antisense strand). The RNAi agent also comprises a 5′-P.

[0469] In certain embodiments, B1 is 2′-OMe or 2′-F, n¹ is 8, T1 is 2′F, n² is 3, B2 is 2′-OMe, n³ is 7, n⁴ is 0, B3 is 2′-OMe, n⁵ is 3, B1′ is 2′-OMe or 2′-F, q′ is 9, T1′ is 2′-F, q² is 1, B2′ is 2′-OMe or 2′-F, q³ is 4, T2′ is 2′-F, q⁴ is 2, B3′ is 2′-OMe or 2′-F, q⁵ is 5, T3′ is 2′-F, q⁶ is 1, B4′ is 2′-OMe, and q⁷ is 1; with two phosphorothioate internucleotide linkage modifications within position 1-5 of the sense strand (counting from the 5′-end of the sense strand), and two phosphorothioate internucleotide linkage modifications at positions 1 and 2 and two phosphorothioate internucleotide linkage modifications within positions 18-23 of the antisense strand (counting from the 5′-end of the antisense strand). The RNAi agent also comprises a 5′-PS.

[0470] In certain embodiments, B1 is 2′-OMe or 2′-F, n¹ is 8, T1 is 2′F, n² is 3, B2 is 2′-OMe, n³ is 7, n⁴ is 0, B3 is 2′-OMe, n⁵ is 3, B1′ is 2′-OMe or 2′-F, q′ is 9, T1′ is 2′-F, q² is 1, B2′ is 2′-OMe or 2′-F, q³ is 4, T2′ is 2′-F, q⁴ is 2, B3′ is 2′-OMe or 2′-F, q⁵ is 5, T3′ is 2′-F, q⁶ is 1, B4′ is 2′-OMe, and q⁷ is 1; with two phosphorothioate internucleotide linkage modifications within position 1-5 of the sense strand (counting from the 5′-end of the sense strand), and two phosphorothioate internucleotide linkage modifications at positions 1 and 2 and two phosphorothioate internucleotide linkage modifications within positions 18-23 of the antisense strand (counting from the 5′-end of the antisense strand). The RNAi agent also comprises a 5′-VP. The 5′-VP may be 5′-E-VP, 5′-Z-VP, or combination thereof.

[0471] In certain embodiments, B1 is 2′-OMe or 2′-F, n¹ is 8, T1 is 2′F, n² is 3, B2 is 2′-OMe, n³ is 7, n⁴ is 0, B3 is 2′-OMe, n⁵ is 3, B1′ is 2′-OMe or 2′-F, q′ is 9, T1′ is 2′-F, q² is 1, B2′ is 2′-OMe or 2′-F, q³ is 4, T2′ is 2′-F, q⁴ is 2, B3′ is 2′-OMe or 2′-F, q⁵ is 5, T3′ is 2′-F, q⁶ is 1, B4′ is 2′-OMe, and q⁷ is 1; with two phosphorothioate internucleotide linkage modifications within position 1-5 of the sense strand (counting from the 5′-end of the sense strand), and two phosphorothioate internucleotide linkage modifications at positions 1 and 2 and two phosphorothioate internucleotide linkage modifications within positions 18-23 of the antisense strand (counting from the 5′-end of the antisense strand). The RNAi agent also comprises a 5′- PS₂.

[0472] In certain embodiments, B1 is 2′-OMe or 2′-F, n¹ is 8, T1 is 2′F, n² is 3, B2 is 2′-OMe, n³ is 7, n⁴ is 0, B3 is 2′-OMe, n⁵ is 3, B1′ is 2′-OMe or 2′-F, q′ is 9, T1′ is 2′-F, q² is 1, B2′ is 2′-OMe or 2′-F, q³ is 4, T2′ is 2′-F, q⁴ is 2, B3′ is 2′-OMe or 2′-F, q⁵ is 5, T3′ is 2′-F, q⁶ is 1, B4′ is 2′-OMe, and q⁷ is 1; with two phosphorothioate internucleotide linkage modifications within position 1-5 of the sense strand (counting from the 5′-end of the sense strand), and two phosphorothioate internucleotide linkage modifications at positions 1 and 2 and two phosphorothioate internucleotide linkage modifications within positions 18-23 of the antisense strand (counting from the 5′-end of the antisense strand). The RNAi agent also comprises a 5′-deoxy-5′-C-malonyl.

[0473] In certain embodiments, B1 is 2′-OMe or 2′-F, n¹ is 8, T1 is 2′F, n² is 3, B2 is 2′-OMe, n³ is 7, n⁴ is 0, B3 is 2′-OMe, n⁵ is 3, B1′ is 2′-OMe or 2′-F, q′ is 9, T1′ is 2′-F, q² is 1, B2′ is 2′-OMe or 2′-F, q³ is 4, q⁴ is 0, B3′ is 2′-OMe or 2′-F, q⁵ is 7, T3′ is 2′-F, q⁶ is 1, B4′ is 2′-OMe, and q⁷ is 1. The RNAi agent also comprises a 5′-P.

[0474] In certain embodiments, B1 is 2′-OMe or 2′-F, n¹ is 8, T1 is 2′F, n² is 3, B2 is 2′-OMe, n³ is 7, n⁴ is 0, B3 is 2′-OMe, n⁵ is 3, B1′ is 2′-OMe or 2′-F, q′ is 9, T1′ is 2′-F, q² is 1, B2′ is 2′-OMe or 2′-F, q³ is 4, q⁴ is 0, B3′ is 2′-OMe or 2′-F, q⁵ is 7, T3′ is 2′-F, q⁶ is 1, B4′ is 2′-OMe, and q⁷ is 1. The dsRNA agent also comprises a 5′-PS.

[0475] In certain embodiments, B1 is 2′-OMe or 2′-F, n¹ is 8, T1 is 2′F, n² is 3, B2 is 2′-OMe, n³ is 7, n⁴ is 0, B3 is 2′-OMe, n⁵ is 3, B1′ is 2′-OMe or 2′-F, q′ is 9, T1′ is 2′-F, q² is 1, B2′ is 2′-OMe or 2′-F, q³ is 4, q⁴ is 0, B3′ is 2′-OMe or 2′-F, q⁵ is 7, T3′ is 2′-F, q⁶ is 1, B4′ is 2′-OMe, and q⁷ is 1. The RNAi agent also comprises a 5′-VP. The 5′-VP may be 5′-E-VP, 5′-Z-VP, or combination thereof.

[0476] In certain embodiments, B1 is 2′-OMe or 2′-F, n¹ is 8, T1 is 2′F, n² is 3, B2 is 2′-OMe, n³ is 7, n⁴ is 0, B3 is 2′-OMe, n⁵ is 3, B1′ is 2′-OMe or 2′-F, q′ is 9, T1′ is 2′-F, q² is 1, B2′ is 2′-OMe or 2′-F, q³ is 4, q⁴ is 0, B3′ is 2′-OMe or 2′-F, q⁵ is 7, T3′ is 2′-F, q⁶ is 1, B4′ is 2′-OMe, and q⁷ is 1. The RNAi agent also comprises a 5′- PS₂.

[0477] In certain embodiments, B1 is 2′-OMe or 2′-F, n¹ is 8, T1 is 2′F, n² is 3, B2 is 2′-OMe, n³ is 7, n⁴ is 0, B3 is 2′-OMe, n⁵ is 3, B1′ is 2′-OMe or 2′-F, q′ is 9, T1′ is 2′-F, q² is 1, B2′ is 2′-OMe or 2′-F, q³ is 4, q⁴ is 0, B3′ is 2′-OMe or 2′-F, q⁵ is 7, T3′ is 2′-F, q⁶ is 1, B4′ is 2′-OMe, and q⁷ is 1. The RNAi agent also comprises a 5′-deoxy-5′-C-malonyl.

[0478] In certain embodiments, B1 is 2′-OMe or 2′-F, n¹ is 8, T1 is 2′F, n² is 3, B2 is 2′-OMe, n³ is 7, n⁴ is 0, B3 is 2′-OMe, n⁵ is 3, B1′ is 2′-OMe or 2′-F, q′ is 9, T1′ is 2′-F, q² is 1, B2′ is 2′-OMe or 2′-F, q³ is 4, q⁴ is 0, B3′ is 2′-OMe or 2′-F, q⁵ is 7, T3′ is 2′-F, q⁶ is 1, B4′ is 2′-OMe, and q⁷ is 1; with two phosphorothioate internucleotide linkage modifications within position 1-5 of the sense strand (counting from the 5′-end), and two phosphorothioate internucleotide linkage modifications at positions 1 and 2 and two phosphorothioate internucleotide linkage modifications within positions 18-23 of the antisense strand (counting from the 5′-end). The RNAi agent also comprises a 5′-P.

[0479] In certain embodiments, B1 is 2′-OMe or 2′-F, n¹ is 8, T1 is 2′F, n² is 3, B2 is 2′-OMe, n³ is 7, n⁴ is 0, B3 is 2′-OMe, n⁵ is 3, B1′ is 2′-OMe or 2′-F, q′ is 9, T1′ is 2′-F, q² is 1, B2′ is 2′-OMe or 2′-F, q³ is 4, q⁴ is 0, B3′ is 2′-OMe or 2′-F, q⁵ is 7, T3′ is 2′-F, q⁶ is 1, B4′ is 2′-OMe, and q⁷ is 1; with two phosphorothioate internucleotide linkage modifications within position 1-5 of the sense strand (counting from the 5′-end), and two phosphorothioate internucleotide linkage modifications at positions 1 and 2 and two phosphorothioate internucleotide linkage modifications within positions 18-23 of the antisense strand (counting from the 5′-end). The RNAi agent also comprises a 5′-PS.

[0480] In certain embodiments, B1 is 2′-OMe or 2′-F, n¹ is 8, T1 is 2′F, n² is 3, B2 is 2′-OMe, n³ is 7, n⁴ is 0, B3 is 2′-OMe, n⁵ is 3, B1′ is 2′-OMe or 2′-F, q′ is 9, T1′ is 2′-F, q² is 1, B2′ is 2′-OMe or 2′-F, q³ is 4, q⁴ is 0, B3′ is 2′-OMe or 2′-F, q⁵ is 7, T3′ is 2′-F, q⁶ is 1, B4′ is 2′-OMe, and q⁷ is 1; with two phosphorothioate internucleotide linkage modifications within position 1-5 of the sense strand (counting from the 5′-end), and two phosphorothioate internucleotide linkage modifications at positions 1 and 2 and two phosphorothioate internucleotide linkage modifications within positions 18-23 of the antisense strand (counting from the 5′-end). The RNAi agent also comprises a 5′-VP. The 5′-VP may be 5′-E-VP, 5′-Z-VP, or combination thereof.

[0481] In certain embodiments, B1 is 2′-OMe or 2′-F, n¹ is 8, T1 is 2′F, n² is 3, B2 is 2′-OMe, n³ is 7, n⁴ is 0, B3 is 2′-OMe, n⁵ is 3, B1′ is 2′-OMe or 2′-F, q′ is 9, T1′ is 2′-F, q² is 1, B2′ is 2′-OMe or 2′-F, q³ is 4, q⁴ is 0, B3′ is 2′-OMe or 2′-F, q⁵ is 7, T3′ is 2′-F, q⁶ is 1, B4′ is 2′-OMe, and q⁷ is 1; with two phosphorothioate internucleotide linkage modifications within position 1-5 of the sense strand (counting from the 5′-end), and two phosphorothioate internucleotide linkage modifications at positions 1 and 2 and two phosphorothioate internucleotide linkage modifications within positions 18-23 of the antisense strand (counting from the 5′-end). The RNAi agent also comprises a 5′- PS₂.

[0482] In certain embodiments, B1 is 2′-OMe or 2′-F, n¹ is 8, T1 is 2′F, n² is 3, B2 is 2′-OMe, n³ is 7, n⁴ is 0, B3 is 2′-OMe, n⁵ is 3, B1′ is 2′-OMe or 2′-F, q′ is 9, T1′ is 2′-F, q² is 1, B2′ is 2′-OMe or 2′-F, q³ is 4, q⁴ is 0, B3′ is 2′-OMe or 2′-F, q⁵ is 7, T3′ is 2′-F, q⁶ is 1, B4′ is 2′-OMe, and q⁷ is 1; with two phosphorothioate internucleotide linkage modifications within position 1-5 of the sense strand (counting from the 5′-end), and two phosphorothioate internucleotide linkage modifications at positions 1 and 2 and two phosphorothioate internucleotide linkage modifications within positions 18-23 of the antisense strand (counting from the 5′-end). The RNAi agent also comprises a 5′-deoxy-5′-C-malonyl.

[0483] In certain embodiments, B1 is 2′-OMe or 2′-F, n¹ is 8, T1 is 2′F, n² is 3, B2 is 2′-OMe, n³ is 7, n⁴ is 0, B3 is 2′OMe, n⁵ is 3, B1′ is 2′-OMe or 2′-F, q′ is 9, T1′ is 2′-F, q² is 1, B2′ is 2′-OMe or 2′-F, q³ is 4, T2′ is 2′-F, q⁴ is 2, B3′ is 2′-OMe or 2′-F, q⁵ is 5, T3′ is 2′-F, q⁶ is 1, B4′ is 2′-F, and q⁷ is 1. The RNAi agent also comprises a 5′- P.

[0484] In certain embodiments, B1 is 2′-OMe or 2′-F, n¹ is 8, T1 is 2′F, n² is 3, B2 is 2′-OMe, n³ is 7, n⁴ 20 is 0, B3 is 2′OMe, n⁵ is 3, B1′ is 2′-OMe or 2′-F, q′ is 9, T1′ is 2′-F, q² is 1, B2′ is 2′-OMe or 2′-F, q³ is 4, T2′ is 2′-F, q⁴ is 2, B3′ is 2′-OMe or 2′-F, q⁵ is 5, T3′ is 2′-F, q⁶ is 1, B4′ is 2′-F, and q⁷ is 1. The RNAi agent also comprises a 5′- PS.

[0485] In certain embodiments, B1 is 2′-OMe or 2′-F, n¹ is 8, T1 is 2′F, n² is 3, B2 is 2′-OMe, n³ is 7, n⁴ is 0, B3 is 2′OMe, n⁵ is 3, B1′ is 2′-OMe or 2′-F, q′ is 9, T1′ is 2′-F, q² is 1, B2′ is 2′-OMe or 2′-F, q³ is 4, T2′ is 2′-F, q⁴ is 2, B3′ is 2′-OMe or 2′-F, q⁵ is 5, T3′ is 2′-F, q⁶ is 1, B4′ is 2′-F, and q⁷ is 1. The RNAi agent also comprises a 5′- VP. The 5′-VP may be 5′-E-VP, 5′-Z-VP, or combination thereof.

[0486] In certain embodiments, B1 is 2′-OMe or 2′-F, n¹ is 8, T1 is 2′F, n² is 3, B2 is 2′-OMe, n³ is 7, n⁴ is 0, B3 is 2′OMe, n⁵ is 3, B1′ is 2′-OMe or 2′-F, q′ is 9, T1′ is 2′-F, q² is 1, B2′ is 2′-OMe or 2′-F, q³ is 4, T2′ is 2′-F, q⁴ is 2, B3′ is 2′-OMe or 2′-F, q⁵ is 5, T3′ is 2′-F, q⁶ is 1, B4′ is 2′-F, and q⁷ is 1. The dsRNA RNA agent also comprises a 5′- PS₂.

[0487] In certain embodiments, B1 is 2′-OMe or 2′-F, n¹ is 8, T1 is 2′F, n² is 3, B2 is 2′-OMe, n³ is 7, n⁴ is 0, B3 is 2′OMe, n⁵ is 3, B1′ is 2′-OMe or 2′-F, q′ is 9, T1′ is 2′-F, q² is 1, B2′ is 2′-OMe or 2′-F, q³ is 4, T2′ is 2′-F, q⁴ is 2, B3′ is 2′-OMe or 2′-F, q⁵ is 5, T3′ is 2′-F, q⁶ is 1, B4′ is 2′-F, and q⁷ is 1. The RNAi agent also comprises a 5′-deoxy-5′-C-malonyl.

[0488] In certain embodiments, B1 is 2′-OMe or 2′-F, n¹ is 8, T1 is 2′F, n² is 3, B2 is 2′-OMe, n³ is 7, n⁴ is 0, B3 is 2′-OMe, n⁵ is 3, B1′ is 2′-OMe or 2′-F, q′ is 9, T1′ is 2′-F, q² is 1, B2′ is 2′-OMe or 2′-F, q³ is 4, T2′ is 2′-F, q⁴ is 2, B3′ is 2′-OMe or 2′-F, q⁵ is 5, T3′ is 2′-F, q⁶ is 1, B4′ is 2′-F, and q⁷ is 1; with two phosphorothioate internucleotide linkage modifications within position 1-5 of the sense strand (counting from the 5′-end of the sense strand), and two phosphorothioate internucleotide linkage modifications at positions 1 and 2 and two phosphorothioate internucleotide linkage modifications within positions 18-23 of the antisense strand (counting from the 5′-end of the antisense strand). The RNAi agent also comprises a 5′- P.

[0489] In certain embodiments, B1 is 2′-OMe or 2′-F, n¹ is 8, T1 is 2′F, n² is 3, B2 is 2′-OMe, n³ is 7, n⁴ is 0, B3 is 2′-OMe, n⁵ is 3, B1′ is 2′-OMe or 2′-F, q′ is 9, T1′ is 2′-F, q² is 1, B2′ is 2′-OMe or 2′-F, q³ is 4, T2′ is 2′-F, q⁴ is 2, B3′ is 2′-OMe or 2′-F, q⁵ is 5, T3′ is 2′-F, q⁶ is 1, B4′ is 2′-F, and q⁷ is 1; with two phosphorothioate internucleotide linkage modifications within position 1-5 of the sense strand (counting from the 5′-end of the sense strand), and two phosphorothioate internucleotide linkage modifications at positions 1 and 2 and two phosphorothioate internucleotide linkage modifications within positions 18-23 of the antisense strand (counting from the 5′-end of the antisense strand). The RNAi agent also comprises a 5′- PS.

[0490] In certain embodiments, B1 is 2′-OMe or 2′-F, n¹ is 8, T1 is 2′F, n² is 3, B2 is 2′-OMe, n³ is 7, n⁴ is 0, B3 is 2′-OMe, n⁵ is 3, B1′ is 2′-OMe or 2′-F, q′ is 9, T1′ is 2′-F, q² is 1, B2′ is 2′-OMe or 2′-F, q³ is 4, T2′ is 2′-F, q⁴ is 2, B3′ is 2′-OMe or 2′-F, q⁵ is 5, T3′ is 2′-F, q⁶ is 1, B4′ is 2′-F, and q⁷ is 1; with two phosphorothioate internucleotide linkage modifications within position 1-5 of the sense strand (counting from the 5′-end of the sense strand), and two phosphorothioate internucleotide linkage modifications at positions 1 and 2 and two phosphorothioate internucleotide linkage modifications within positions 18-23 of the antisense strand (counting from the 5′-end of the antisense strand). The RNAi agent also comprises a 5′- VP. The 5′-VP may be 5′-E-VP, 5′-Z-VP, or combination thereof.

[0491] In certain embodiments, B1 is 2′-OMe or 2′-F, n¹ is 8, T1 is 2′F, n² is 3, B2 is 2′-OMe, n³ is 7, n⁴ is 0, B3 is 2′-OMe, n⁵ is 3, B1′ is 2′-OMe or 2′-F, q′ is 9, T1′ is 2′-F, q² is 1, B2′ is 2′-OMe or 2′-F, q³ is 4, T2′ is 2′-F, q⁴ is 2, B3′ is 2′-OMe or 2′-F, q⁵ is 5, T3′ is 2′-F, q⁶ is 1, B4′ is 2′-F, and q⁷ is 1; with two phosphorothioate internucleotide linkage modifications within position 1-5 of the sense strand (counting from the 5′-end of the sense strand), and two phosphorothioate internucleotide linkage modifications at positions 1 and 2 and two phosphorothioate internucleotide linkage modifications within positions 18-23 of the antisense strand (counting from the 5′-end of the antisense strand). The RNAi agent also comprises a 5′- PS₂.

[0492] In certain embodiments, B1 is 2′-OMe or 2′-F, n¹ is 8, T1 is 2′F, n² is 3, B2 is 2′-OMe, n³ is 7, n⁴ is 0, B3 is 2′-OMe, n⁵ is 3, B1′ is 2′-OMe or 2′-F, q′ is 9, T1′ is 2′-F, q² is 1, B2′ is 2′-OMe or 2′-F, q³ is 4, T2′ is 2′-F, q⁴ is 2, B3′ is 2′-OMe or 2′-F, q⁵ is 5, T3′ is 2′-F, q⁶ is 1, B4′ is 2′-F, and q⁷ is 1; with two phosphorothioate internucleotide linkage modifications within position 1-5 of the sense strand (counting from the 5′-end of the sense strand), and two phosphorothioate internucleotide linkage modifications at positions 1 and 2 and two phosphorothioate internucleotide linkage modifications within positions 18-23 of the antisense strand (counting from the 5′-end of the antisense strand). The RNAi agent also comprises a 5′-deoxy-5′-C-malonyl.

[0493] In certain embodiments, B1 is 2′-OMe or 2′-F, n¹ is 8, T1 is 2′F, n² is 3, B2 is 2′-OMe, n³ is 7, n⁴ is 0, B3 is 2′-OMe, n⁵ is 3, B1′ is 2′-OMe or 2′-F, q′ is 9, T1′ is 2′-F, q² is 1, B2′ is 2′-OMe or 2′-F, q³ is 4, q⁴ is 0, B3′ is 2′-OMe or 2′-F, q⁵ is 7, T3′ is 2′-F, q⁶ is 1, B4′ is 2′-F, and q⁷ is 1. The RNAi agent also comprises a 5′- P.

[0494] In certain embodiments, B1 is 2′-OMe or 2′-F, n¹ is 8, T1 is 2′F, n² is 3, B2 is 2′-OMe, n³ is 7, n⁴ is 0, B3 is 2′-OMe, n⁵ is 3, B1′ is 2′-OMe or 2′-F, q′ is 9, T1′ is 2′-F, q² is 1, B2′ is 2′-OMe or 2′-F, q³ is 4, q⁴ is 0, B3′ is 2′-OMe or 2′-F, q⁵ is 7, T3′ is 2′-F, q⁶ is 1, B4′ is 2′-F, and q⁷ is 1. The RNAi agent also comprises a 5′- PS.

[0495] In certain embodiments, B1 is 2′-OMe or 2′-F, n¹ is 8, T1 is 2′F, n² is 3, B2 is 2′-OMe, n³ is 7, n⁴ is 0, B3 is 2′-OMe, n⁵ is 3, B1′ is 2′-OMe or 2′-F, q′ is 9, T1′ is 2′-F, q² is 1, B2′ is 2′-OMe or 2′-F, q³ is 4, q⁴ is 0, B3′ is 2′-OMe or 2′-F, q⁵ is 7, T3′ is 2′-F, q⁶ is 1, B4′ is 2′-F, and q⁷ is 1. The RNAi agent also comprises a 5′- VP. The 5′-VP may be 5′-E-VP, 5′-Z-VP, or combination thereof.

[0496] In certain embodiments, B1 is 2′-OMe or 2′-F, n¹ is 8, T1 is 2′F, n² is 3, B2 is 2′-OMe, n³ is 7, n⁴ is 0, B3 is 2′-OMe, n⁵ is 3, B1′ is 2′-OMe or 2′-F, q′ is 9, T1′ is 2′-F, q² is 1, B2′ is 2′-OMe or 2′-F, q³ is 4, q⁴ is 0, B3′ is 2′-OMe or 2′-F, q⁵ is 7, T3′ is 2′-F, q⁶ is 1, B4′ is 2′-F, and q⁷ is 1. The RNAi agent also comprises a 5′- PS₂.

[0497] In certain embodiments, B1 is 2′-OMe or 2′-F, n¹ is 8, T1 is 2′F, n² is 3, B2 is 2′-OMe, n³ is 7, n⁴ is 0, B3 is 2′-OMe, n⁵ is 3, B1′ is 2′-OMe or 2′-F, q′ is 9, T1′ is 2′-F, q² is 1, B2′ is 2′-OMe or 2′-F, q³ is 4, q⁴ is 0, B3′ is 2′-OMe or 2′-F, q⁵ is 7, T3′ is 2′-F, q⁶ is 1, B4′ is 2′-F, and q⁷ is 1. The RNAi agent also comprises a 5′-deoxy-5′-C-malonyl.

[0498] In certain embodiments, B1 is 2′-OMe or 2′-F, n¹ is 8, T1 is 2′F, n² is 3, B2 is 2′-OMe, n³ is 7, n⁴ is 0, B3 is 2′-OMe, n⁵ is 3, B1′ is 2′-OMe or 2′-F, q′ is 9, T1′ is 2′-F, q² is 1, B2′ is 2′-OMe or 2′-F, q³ is 4, q⁴ is 0, B3′ is 2′-OMe or 2′-F, q⁵ is 7, T3′ is 2′-F, q⁶ is 1, B4′ is 2′-F, and q⁷ is 1; with two phosphorothioate internucleotide linkage modifications within position 1-5 of the sense strand (counting from the 5′-end of the sense strand), and two phosphorothioate internucleotide linkage modifications at positions 1 and 2 and two phosphorothioate internucleotide linkage modifications within positions 18-23 of the antisense strand (counting from the 5′-end of the antisense strand). The RNAi agent also comprises a 5′- P.

[0499] In certain embodiments, B1 is 2′-OMe or 2′-F, n¹ is 8, T1 is 2′F, n² is 3, B2 is 2′-OMe, n³ is 7, n⁴ is 0, B3 is 2′-OMe, n⁵ is 3, B1′ is 2′-OMe or 2′-F, q′ is 9, T1′ is 2′-F, q² is 1, B2′ is 2′-OMe or 2′-F, q³ is 4, q⁴ is 0, B3′ is 2′-OMe or 2′-F, q⁵ is 7, T3′ is 2′-F, q⁶ is 1, B4′ is 2′-F, and q⁷ is 1; with two phosphorothioate internucleotide linkage modifications within position 1-5 of the sense strand (counting from the 5′-end of the sense strand), and two phosphorothioate internucleotide linkage modifications at positions 1 and 2 and two phosphorothioate internucleotide linkage modifications within positions 18-23 of the antisense strand (counting from the 5′-end of the antisense strand). The RNAi agent also comprises a 5′- PS.

[0500] In certain embodiments, B1 is 2′-OMe or 2′-F, n¹ is 8, T1 is 2′F, n² is 3, B2 is 2′-OMe, n³ is 7, n⁴ is 0, B3 is 2′-OMe, n⁵ is 3, B1′ is 2′-OMe or 2′-F, q′ is 9, T1′ is 2′-F, q² is 1, B2′ is 2′-OMe or 2′-F, q³ is 4, q⁴ is 0, B3′ is 2′-OMe or 2′-F, q⁵ is 7, T3′ is 2′-F, q⁶ is 1, B4′ is 2′-F, and q⁷ is 1; with two phosphorothioate internucleotide linkage modifications within position 1-5 of the sense strand (counting from the 5′-end of the sense strand), and two phosphorothioate internucleotide linkage modifications at positions 1 and 2 and two phosphorothioate internucleotide linkage modifications within positions 18-23 of the antisense strand (counting from the 5′-end of the antisense strand). The RNAi agent also comprises a 5′- VP. The 5′-VP may be 5′-E-VP, 5′-Z-VP, or combination thereof.

[0501] In certain embodiments, B1 is 2′-OMe or 2′-F, n¹ is 8, T1 is 2′F, n² is 3, B2 is 2′-OMe, n³ is 7, n⁴ is 0, B3 is 2′-OMe, n⁵ is 3, B1′ is 2′-OMe or 2′-F, q′ is 9, T1′ is 2′-F, q² is 1, B2′ is 2′-OMe or 2′-F, q³ is 4, q⁴ is 0, B3′ is 2′-OMe or 2′-F, q⁵ is 7, T3′ is 2′-F, q⁶ is 1, B4′ is 2′-F, and q⁷ is 1; with two phosphorothioate internucleotide linkage modifications within position 1-5 of the sense strand (counting from the 5′-end of the sense strand), and two phosphorothioate internucleotide linkage modifications at positions 1 and 2 and two phosphorothioate internucleotide linkage modifications within positions 18-23 of the antisense strand (counting from the 5′-end of the antisense strand). The RNAi agent also comprises a 5′- PS₂.

[0502] In certain embodiments, B1 is 2′-OMe or 2′-F, n¹ is 8, T1 is 2′F, n² is 3, B2 is 2′-OMe, n³ is 7, n⁴ is 0, B3 is 2′-OMe, n⁵ is 3, B1′ is 2′-OMe or 2′-F, q′ is 9, T1′ is 2′-F, q² is 1, B2′ is 2′-OMe or 2′-F, q³ is 4, q⁴ is 0, B3′ is 2′-OMe or 2′-F, q⁵ is 7, T3′ is 2′-F, q⁶ is 1, B4′ is 2′-F, and q⁷ is 1; with two phosphorothioate internucleotide linkage modifications within position 1-5 of the sense strand (counting from the 5′-end of the sense strand), and two phosphorothioate internucleotide linkage modifications at positions 1 and 2 and two phosphorothioate internucleotide linkage modifications within positions 18-23 of the antisense strand (counting from the 5′-end of the antisense strand). The RNAi agent also comprises a 5′-deoxy-5′-C-malonyl.

[0503] In certain embodiments, B1 is 2′-OMe or 2′-F, n¹ is 8, T1 is 2′F, n² is 3, B2 is 2′-OMe, n³ is 7, n⁴ is 0, B3 is 2′-OMe, n⁵ is 3, B1′ is 2′-OMe or 2′-F, q′ is 9, T1′ is 2′-F, q² is 1, B2′ is 2′-OMe or 2′-F, q³ is 4, T2′ is 2′-F, q⁴ is 2, B3′ is 2′-OMe or 2′-F, q⁵ is 5, T3′ is 2′-F, q⁶ is 1, B4′ is 2′-OMe, and q⁷ is 1; with two phosphorothioate internucleotide linkage modifications within position 1-5 of the sense strand (counting from the 5′-end of the sense strand), and two phosphorothioate internucleotide linkage modifications at positions 1 and 2 and two phosphorothioate internucleotide linkage modifications within positions 18-23 of the antisense strand (counting from the 5′-end of the antisense strand). The RNAi agent also comprises a 5′-P and a targeting ligand. In certain embodiments, the 5′-P is at the 5′-end of the antisense strand, and the targeting ligand is at the 3′-end of the sense strand.

[0504] In certain embodiments, B1 is 2′-OMe or 2′-F, n¹ is 8, T1 is 2′F, n² is 3, B2 is 2′-OMe, n³ is 7, n⁴ is 0, B3 is 2′-OMe, n⁵ is 3, B1′ is 2′-OMe or 2′-F, q′ is 9, T1′ is 2′-F, q² is 1, B2′ is 2′-OMe or 2′-F, q³ is 4, T2′ is 2′-F, q⁴ is 2, B3′ is 2′-OMe or 2′-F, q⁵ is 5, T3′ is 2′-F, q⁶ is 1, B4′ is 2′-OMe, and q⁷ is 1; with two phosphorothioate internucleotide linkage modifications within position 1-5 of the sense strand (counting from the 5′-end of the sense strand), and two phosphorothioate internucleotide linkage modifications at positions 1 and 2 and two phosphorothioate internucleotide linkage modifications within positions 18-23 of the antisense strand (counting from the 5′-end of the antisense strand). The RNAi agent also comprises a 5′-PS and a targeting ligand. In certain embodiments, the 5′-PS is at the 5′-end of the antisense strand, and the targeting ligand is at the 3′-end of the sense strand.

[0505] In certain embodiments, B1 is 2′-OMe or 2′-F, n¹ is 8, T1 is 2′F, n² is 3, B2 is 2′-OMe, n³ is 7, n⁴ is 0, B3 is 2′-OMe, n⁵ is 3, B1′ is 2′-OMe or 2′-F, q′ is 9, T1′ is 2′-F, q² is 1, B2′ is 2′-OMe or 2′-F, q³ is 4, T2′ is 2′-F, q⁴ is 2, B3′ is 2′-OMe or 2′-F, q⁵ is 5, T3′ is 2′-F, q⁶ is 1, B4′ is 2′-OMe, and q⁷ is 1; with two phosphorothioate internucleotide linkage modifications within position 1-5 of the sense strand (counting from the 5′-end of the sense strand), and two phosphorothioate internucleotide linkage modifications at positions 1 and 2 and two phosphorothioate internucleotide linkage modifications within positions 18-23 of the antisense strand (counting from the 5′-end of the antisense strand). The RNAi agent also comprises a 5′-VP (e.g., a 5′-E-VP, 5′-Z-VP, or combination thereof), and a targeting ligand.

[0506] In certain embodiments, the 5′-VP is at the 5′-end of the antisense strand, and the targeting ligand is at the 3′-end of the sense strand.

[0507] In certain embodiments, B1 is 2′-OMe or 2′-F, n¹ is 8, T1 is 2′F, n² is 3, B2 is 2′-OMe, n³ is 7, n⁴ is 0, B3 is 2′-OMe, n⁵ is 3, B1′ is 2′-OMe or 2′-F, q′ is 9, T1′ is 2′-F, q² is 1, B2′ is 2′-OMe or 2′-F, q³ is 4, T2′ is 2′-F, q⁴ is 2, B3′ is 2′-OMe or 2′-F, q⁵ is 5, T3′ is 2′-F, q⁶ is 1, B4′ is 2′-OMe, and q⁷ is 1; with two phosphorothioate internucleotide linkage modifications within position 1-5 of the sense strand (counting from the 5′-end of the sense strand), and two phosphorothioate internucleotide linkage modifications at positions 1 and 2 and two phosphorothioate internucleotide linkage modifications within positions 18-23 of the antisense strand (counting from the 5′-end of the antisense strand). The RNAi agent also comprises a 5′- PS₂ and a targeting ligand. In certain embodiments, the 5′-PS₂ is at the 5′-end of the antisense strand, and the targeting ligand is at the 3′-end of the sense strand.

[0508] In certain embodiments, B1 is 2′-OMe or 2′-F, n¹ is 8, T1 is 2′F, n² is 3, B2 is 2′-OMe, n³ is 7, n⁴ is 0, B3 is 2′-OMe, n⁵ is 3, B1′ is 2′-OMe or 2′-F, q′ is 9, T1′ is 2′-F, q² is 1, B2′ is 2′-OMe or 2′-F, q³ is 4, T2′ is 2′-F, q⁴ is 2, B3′ is 2′-OMe or 2′-F, q⁵ is 5, T3′ is 2′-F, q⁶ is 1, B4′ is 2′-OMe, and q⁷ is 1; with two phosphorothioate internucleotide linkage modifications within position 1-5 of the sense strand (counting from the 5′-end of the sense strand), and two phosphorothioate internucleotide linkage modifications at positions 1 and 2 and two phosphorothioate internucleotide linkage modifications within positions 18-23 of the antisense strand (counting from the 5′-end of the antisense strand). The RNAi agent also comprises a 5′-deoxy-5′-C-malonyl and a targeting ligand. In certain embodiments, the 5′-deoxy-5′-C-malonyl is at the 5′-end of the antisense strand, and the targeting ligand is at the 3′-end of the sense strand.

[0509] In certain embodiments, B1 is 2′-OMe or 2′-F, n¹ is 8, T1 is 2′F, n² is 3, B2 is 2′-OMe, n³ is 7, n⁴ is 0, B3 is 2′-OMe, n⁵ is 3, B1′ is 2′-OMe or 2′-F, q′ is 9, T1′ is 2′-F, q² is 1, B2′ is 2′-OMe or 2′-F, q³ is 4, q⁴ is 0, B3′ is 2′-OMe or 2′-F, q⁵ is 7, T3′ is 2′-F, q⁶ is 1, B4′ is 2′-OMe, and q⁷ is 1; with two phosphorothioate internucleotide linkage modifications within position 1-5 of the sense strand (counting from the 5′-end), and two phosphorothioate internucleotide linkage modifications at positions 1 and 2 and two phosphorothioate internucleotide linkage modifications within positions 18-23 of the antisense strand (counting from the 5′-end). The RNAi agent also comprises a 5′-P and a targeting ligand. In certain embodiments, the 5′-P is at the 5′-end of the antisense strand, and the targeting ligand is at the 3′-end of the sense strand.

[0510] In certain embodiments, B1 is 2′-OMe or 2′-F, n¹ is 8, T1 is 2′F, n² is 3, B2 is 2′-OMe, n³ is 7, n⁴ is 0, B3 is 2′-OMe, n⁵ is 3, B1′ is 2′-OMe or 2′-F, q′ is 9, T1′ is 2′-F, q² is 1, B2′ is 2′-OMe or 2′-F, q³ is 4, q⁴ is 0, B3′ is 2′-OMe or 2′-F, q⁵ is 7, T3′ is 2′-F, q⁶ is 1, B4′ is 2′-OMe, and q⁷ is 1; with two phosphorothioate internucleotide linkage modifications within position 1-5 of the sense strand (counting from the 5′-end), and two phosphorothioate internucleotide linkage modifications at positions 1 and 2 and two phosphorothioate internucleotide linkage modifications within positions 18-23 of the antisense strand (counting from the 5′-end). The RNAi agent also comprises a 5′-PS and a targeting ligand. In certain embodiments, the 5′-PS is at the 5′-end of the antisense strand, and the targeting ligand is at the 3′-end of the sense strand.

[0511] In certain embodiments, B1 is 2′-OMe or 2′-F, n¹ is 8, T1 is 2′F, n² is 3, B2 is 2′-OMe, n³ is 7, n⁴ is 0, B3 is 2′-OMe, n⁵ is 3, B1′ is 2′-OMe or 2′-F, q′ is 9, T1′ is 2′-F, q² is 1, B2′ is 2′-OMe or 2′-F, q³ is 4, q⁴ is 0, B3′ is 2′-OMe or 2′-F, q⁵ is 7, T3′ is 2′-F, q⁶ is 1, B4′ is 2′-OMe, and q⁷ is 1; with two phosphorothioate internucleotide linkage modifications within position 1-5 of the sense strand (counting from the 5′-end), and two phosphorothioate internucleotide linkage modifications at positions 1 and 2 and two phosphorothioate internucleotide linkage modifications within positions 18-23 of the antisense strand (counting from the 5′-end). The RNAi agent also comprises a 5′-VP (e.g., a 5′-E-VP, 5′-Z-VP, or combination thereof) and a targeting ligand. In certain embodiments, the 5′-VP is at the 5′-end of the antisense strand, and the targeting ligand is at the 3′-end of the sense strand. In certain embodiments, B1 is 2′-OMe or 2′-F, n¹ is 8, T1 is 2′F, n² is 3, B2 is 2′-OMe, n³ is 7, n⁴ is 0, B3 is 2′-OMe, n⁵ is 3, B1′ is 2′-OMe or 2′-F, q′ is 9, T1′ is 2′-F, q² is 1, B2′ is 2′-OMe or 2′-F, q³ is 4, q⁴ is 0, B3′ is 2′-OMe or 2′-F, q⁵ is 7, T3′ is 2′-F, q⁶ is 1, B4′ is 2′-OMe, and q⁷ is 1; with two phosphorothioate internucleotide linkage modifications within position 1-5 of the sense strand (counting from the 5′-end), and two phosphorothioate internucleotide linkage modifications at positions 1 and 2 and two phosphorothioate internucleotide linkage modifications within positions 18-23 of the antisense strand (counting from the 5′-end). The RNAi agent also comprises a 5′-PS₂ and a targeting ligand. In certain embodiments, the 5′-PS₂ is at the 5′-end of the antisense strand, and the targeting ligand is at the 3′-end of the sense strand.

[0512] In certain embodiments, B1 is 2′-OMe or 2′-F, n¹ is 8, T1 is 2′F, n² is 3, B2 is 2′-OMe, n³ is 7, n⁴ is 0, B3 is 2′-OMe, n⁵ is 3, B1′ is 2′-OMe or 2′-F, q′ is 9, T1′ is 2′-F, q² is 1, B2′ is 2′-OMe or 2′-F, q³ is 4, q⁴ is 0, B3′ is 2′-OMe or 2′-F, q⁵ is 7, T3′ is 2′-F, q⁶ is 1, B4′ is 2′-OMe, and q⁷ is 1; with two phosphorothioate internucleotide linkage modifications within position 1-5 of the sense strand (counting from the 5′-end), and two phosphorothioate internucleotide linkage modifications at positions 1 and 2 and two phosphorothioate internucleotide linkage modifications within positions 18-23 of the antisense strand (counting from the 5′-end). The RNAi agent also comprises a 5′-deoxy-5′-C-malonyl and a targeting ligand. In certain embodiments, the 5′-deoxy-5′-C-malonyl is at the 5′-end of the antisense strand, and the targeting ligand is at the 3′-end of the sense strand.

[0513] In certain embodiments, B1 is 2′-OMe or 2′-F, n¹ is 8, T1 is 2′F, n² is 3, B2 is 2′-OMe, n³ is 7, n⁴ is 0, B3 is 2′-OMe, n⁵ is 3, B1′ is 2′-OMe or 2′-F, q′ is 9, T1′ is 2′-F, q² is 1, B2′ is 2′-OMe or 2′-F, q³ is 4, T2′ is 2′-F, q⁴ is 2, B3′ is 2′-OMe or 2′-F, q⁵ is 5, T3′ is 2′-F, q⁶ is 1, B4′ is 2′-F, and q⁷ is 1; with two phosphorothioate internucleotide linkage modifications within position 1-5 of the sense strand (counting from the 5′-end of the sense strand), and two phosphorothioate internucleotide linkage modifications at positions 1 and 2 and two phosphorothioate internucleotide linkage modifications within positions 18-23 of the antisense strand (counting from the 5′-end of the antisense strand). The RNAi agent also comprises a 5′-P and a targeting ligand. In certain embodiments, the 5′-P is at the 5′-end of the antisense strand, and the targeting ligand is at the 3′-end of the sense strand.

[0514] In certain embodiments, B1 is 2′-OMe or 2′-F, n¹ is 8, T1 is 2′F, n² is 3, B2 is 2′-OMe, n³ is 7, n⁴ is 0, B3 is 2′-OMe, n⁵ is 3, B1′ is 2′-OMe or 2′-F, q′ is 9, T1′ is 2′-F, q² is 1, B2′ is 2′-OMe or 2′-F, q³ is 4, T2′ is 2′-F, q⁴ is 2, B3′ is 2′-OMe or 2′-F, q⁵ is 5, T3′ is 2′-F, q⁶ is 1, B4′ is 2′-F, and q⁷ is 1; with two phosphorothioate internucleotide linkage modifications within position 1-5 of the sense strand (counting from the 5′-end of the sense strand), and two phosphorothioate internucleotide linkage modifications at positions 1 and 2 and two phosphorothioate internucleotide linkage modifications within positions 18-23 of the antisense strand (counting from the 5′-end of the antisense strand). The RNAi agent also comprises a 5′-PS and a targeting ligand. In certain embodiments, the 5′-PS is at the 5′-end of the antisense strand, and the targeting ligand is at the 3′-end of the sense strand.

[0515] In certain embodiments, B1 is 2′-OMe or 2′-F, n¹ is 8, T1 is 2′F, n² is 3, B2 is 2′-OMe, n³ is 7, n⁴ is 0, B3 is 2′-OMe, n⁵ is 3, B1′ is 2′-OMe or 2′-F, q′ is 9, T1′ is 2′-F, q² is 1, B2′ is 2′-OMe or 2′-F, q³ is 4, T2′ is 2′-F, q⁴ is 2, B3′ is 2′-OMe or 2′-F, q⁵ is 5, T3′ is 2′-F, q⁶ is 1, B4′ is 2′-F, and q⁷ is 1; with two phosphorothioate internucleotide linkage modifications within position 1-5 of the sense strand (counting from the 5′-end of the sense strand), and two phosphorothioate internucleotide linkage modifications at positions 1 and 2 and two phosphorothioate internucleotide linkage modifications within positions 18-23 of the antisense strand (counting from the 5′-end of the antisense strand). The RNAi agent also comprises a 5′-VP (e.g., a 5′-E-VP, 5′-Z-VP, or combination thereof) and a targeting ligand. In certain embodiments, the 5′-VP is at the 5′-end of the antisense strand, and the targeting ligand is at the 3′-end of the sense strand.

[0516] In certain embodiments, B1 is 2′-OMe or 2′-F, n¹ is 8, T1 is 2′F, n² is 3, B2 is 2′-OMe, n³ is 7, n⁴ is 0, B3 is 2′-OMe, n⁵ is 3, B1′ is 2′-OMe or 2′-F, q′ is 9, T1′ is 2′-F, q² is 1, B2′ is 2′-OMe or 2′-F, q³ is 4, T2′ is 2′-F, q⁴ is 2, B3′ is 2′-OMe or 2′-F, q⁵ is 5, T3′ is 2′-F, q⁶ is 1, B4′ is 2′-F, and q⁷ is 1; with two phosphorothioate internucleotide linkage modifications within position 1-5 of the sense strand (counting from the 5′-end of the sense strand), and two phosphorothioate internucleotide linkage modifications at positions 1 and 2 and two phosphorothioate internucleotide linkage modifications within positions 18-23 of the antisense strand (counting from the 5′-end of the antisense strand). The RNAi agent also comprises a 5′-PS₂ and a targeting ligand. In certain embodiments, the 5′-PS₂ is at the 5′-end of the antisense strand, and the targeting ligand is at the 3′-end of the sense strand.

[0517] In certain embodiments, B1 is 2′-OMe or 2′-F, n¹ is 8, T1 is 2′F, n² is 3, B2 is 2′-OMe, n³ is 7, n⁴ is 0, B3 is 2′-OMe, n⁵ is 3, B1′ is 2′-OMe or 2′-F, q′ is 9, T1′ is 2′-F, q² is 1, B2′ is 2′-OMe or 2′-F, q³ is 4, T2′ is 2′-F, q⁴ is 2, B3′ is 2′-OMe or 2′-F, q⁵ is 5, T3′ is 2′-F, q⁶ is 1, B4′ is 2′-F, and q⁷ is 1; with two phosphorothioate internucleotide linkage modifications within position 1-5 of the sense strand (counting from the 5′-end of the sense strand), and two phosphorothioate internucleotide linkage modifications at positions 1 and 2 and two phosphorothioate internucleotide linkage modifications within positions 18-23 of the antisense strand (counting from the 5′-end of the antisense strand). The RNAi agent also comprises a 5′-deoxy-5′-C-malonyl and a targeting ligand. In certain embodiments, the 5′-deoxy-5′-C-malonyl is at the 5′-end of the antisense strand, and the targeting ligand is at the 3′-end of the sense strand.

[0518] In certain embodiments, B1 is 2′-OMe or 2′-F, n¹ is 8, T1 is 2′F, n² is 3, B2 is 2′-OMe, n³ is 7, n⁴ is 0, B3 is 2′-OMe, n⁵ is 3, B1′ is 2′-OMe or 2′-F, q′ is 9, T1′ is 2′-F, q² is 1, B2′ is 2′-OMe or 2′-F, q³ is 4, q⁴ is 0, B3′ is 2′-OMe or 2′-F, q⁵ is 7, T3′ is 2′-F, q⁶ is 1, B4′ is 2′-F, and q⁷ is 1; with two phosphorothioate internucleotide linkage modifications within position 1-5 of the sense strand (counting from the 5′-end of the sense strand), and two phosphorothioate internucleotide linkage modifications at positions 1 and 2 and two phosphorothioate internucleotide linkage modifications within positions 18-23 of the antisense strand (counting from the 5′-end of the antisense strand). The RNAi agent also comprises a 5′-P and a targeting ligand. In certain embodiments, the 5′-P is at the 5′-end of the antisense strand, and the targeting ligand is at the 3′-end of the sense strand.

[0519] In certain embodiments, B1 is 2′-OMe or 2′-F, n¹ is 8, T1 is 2′F, n² is 3, B2 is 2′-OMe, n³ is 7, n⁴ is 0, B3 is 2′-OMe, n⁵ is 3, B1′ is 2′-OMe or 2′-F, q′ is 9, T1′ is 2′-F, q² is 1, B2′ is 2′-OMe or 2′-F, q³ is 4, q⁴ is 0, B3′ is 2′-OMe or 2′-F, q⁵ is 7, T3′ is 2′-F, q⁶ is 1, B4′ is 2′-F, and q⁷ is 1; with two phosphorothioate internucleotide linkage modifications within position 1-5 of the sense strand (counting from the 5′-end of the sense strand), and two phosphorothioate internucleotide linkage modifications at positions 1 and 2 and two phosphorothioate internucleotide linkage modifications within positions 18-23 of the antisense strand (counting from the 5′-end of the antisense strand). The RNAi agent also comprises a 5′- PS and a targeting ligand. In certain embodiments, the 5′-PS is at the 5′-end of the antisense strand, and the targeting ligand is at the 3′-end of the sense strand.

[0520] In certain embodiments, B1 is 2′-OMe or 2′-F, n¹ is 8, T1 is 2′F, n² is 3, B2 is 2′-OMe, n³ is 7, n⁴ is 0, B3 is 2′-OMe, n⁵ is 3, B1′ is 2′-OMe or 2′-F, q′ is 9, T1′ is 2′-F, q² is 1, B2′ is 2′-OMe or 2′-F, q³ is 4, q⁴ is 0, B3′ is 2′-OMe or 2′-F, q⁵ is 7, T3′ is 2′-F, q⁶ is 1, B4′ is 2′-F, and q⁷ is 1; with two phosphorothioate internucleotide linkage modifications within position 1-5 of the sense strand (counting from the 5′-end of the sense strand), and two phosphorothioate internucleotide linkage modifications at positions 1 and 2 and two phosphorothioate internucleotide linkage modifications within positions 18-23 of the antisense strand (counting from the 5′-end of the antisense strand). The RNAi agent also comprises a 5′- VP (e.g., a 5′-E-VP, 5′-Z-VP, or combination thereof) and a targeting ligand. In certain embodiments, the 5′-VP is at the 5′-end of the antisense strand, and the targeting ligand is at the 3′-end of the sense strand.

[0521] In certain embodiments, B1 is 2′-OMe or 2′-F, n¹ is 8, T1 is 2′F, n² is 3, B2 is 2′-OMe, n³ is 7, n⁴ is 0, B3 is 2′-OMe, n⁵ is 3, B1′ is 2′-OMe or 2′-F, q′ is 9, T1′ is 2′-F, q² is 1, B2′ is 2′-OMe or 2′-F, q³ is 4, q⁴ is 0, B3′ is 2′-OMe or 2′-F, q⁵ is 7, T3′ is 2′-F, q⁶ is 1, B4′ is 2′-F, and q⁷ is 1; with two phosphorothioate internucleotide linkage modifications within position 1-5 of the sense strand (counting from the 5′-end of the sense strand), and two phosphorothioate internucleotide linkage modifications at positions 1 and 2 and two phosphorothioate internucleotide linkage modifications within positions 18-23 of the antisense strand (counting from the 5′-end of the antisense strand). The RNAi agent also comprises a 5′- PS₂ and a targeting ligand. In certain embodiments, the 5′-PS₂ is at the 5′-end of the antisense strand, and the targeting ligand is at the 3′-end of the sense strand.

[0522] In certain embodiments, B1 is 2′-OMe or 2′-F, n¹ is 8, T1 is 2′F, n² is 3, B2 is 2′-OMe, n³ is 7, n⁴ is 0, B3 is 2′-OMe, n⁵ is 3, B1′ is 2′-OMe or 2′-F, q′ is 9, T1′ is 2′-F, q² is 1, B2′ is 2′-OMe or 2′-F, q³ is 4, q⁴ is 0, B3′ is 2′-OMe or 2′-F, q⁵ is 7, T3′ is 2′-F, q⁶ is 1, B4′ is 2′-F, and q⁷ is 1; with two phosphorothioate internucleotide linkage modifications within position 1-5 of the sense strand (counting from the 5′-end of the sense strand), and two phosphorothioate internucleotide linkage modifications at positions 1 and 2 and two phosphorothioate internucleotide linkage modifications within positions 18-23 of the antisense strand (counting from the 5′-end of the antisense strand). The RNAi agent also comprises a 5′-deoxy-5′-C-malonyl and a targeting ligand. In certain embodiments, the 5′-deoxy-5′-C-malonyl is at the 5′-end of the antisense strand, and the targeting ligand is at the 3′-end of the sense strand.

[0523] In a particular embodiment, an RNAi agent of the present invention comprises:
[0524] (a) a sense strand having:
   [0525] (i) a length of 21 nucleotides;
   [0526] (ii) an ASGPR ligand attached to the 3′-end, wherein said ASGPR ligand comprises three GalNAc derivatives attached through a trivalent branched linker; and
   [0527] (iii) 2′-F modifications at positions 1, 3, 5, 7, 9 to 11, 13, 17, 19, and 21, and 2′-OMe
[0528] modifications at positions 2, 4, 6, 8, 12, 14 to 16, 18, and 20 (counting from the 5′ end); and
[0529] (b) an antisense strand having:
   [0530] (i) a length of 23 nucleotides;
   [0531] (ii) 2′-OMe modifications at positions 1, 3, 5, 9, 11 to 13, 15, 17, 19, 21, and 23, and 2′F modifications at positions 2, 4, 6 to 8, 10, 14, 16, 18, 20, and 22 (counting from the 5′ end); and
   [0532] (iii) phosphorothioate internucleotide linkages between nucleotide positions 21 and
   [0533] 22, and between nucleotide positions 22 and 23 (counting from the 5′ end);
[0534] wherein the dsRNA agents have a two-nucleotide overhang at the 3′-end of the antisense strand, and a blunt end at the 5′-end of the antisense strand.

[0535] In another particular embodiment, an RNAi agent of the present invention comprises:
[0536] (a) a sense strand having:
   [0537] (i) a length of 21 nucleotides;
   [0538] (ii) an ASGPR ligand attached to the 3′-end, wherein said ASGPR ligand comprises three GalNAc derivatives attached through a trivalent branched linker;
   [0539] (iii) 2′-F modifications at positions 1, 3, 5, 7, 9 to 11, 13, 15, 17, 19, and 21, and 2′-OMe modifications at positions 2, 4, 6, 8, 12, 14, 16, 18, and 20 (counting from the 5′ end); and
   [0540] (iv) phosphorothioate internucleotide linkages between nucleotide positions 1 and 2, and
   [0541] between nucleotide positions 2 and 3 (counting from the 5′ end); and
[0542] (b) an antisense strand having:
   [0543] (i) a length of 23 nucleotides;
   [0544] (ii) 2′-OMe modifications at positions 1, 3, 5, 7, 9, 11 to 13, 15, 17, 19, and 21 to 23, and 2′F modifications at positions 2, 4, 6, 8, 10, 14, 16, 18, and 20 (counting from the 5′ end); and
   [0545] (iii) phosphorothioate intemucleotide linkages between nucleotide positions 1 and 2, between nucleotide positions 2 and 3, between nucleotide positions 21 and 22, and between nucleotide positions 22 and 23 (counting from the 5′ end);
[0546] wherein the RNAi agents have a two-nucleotide overhang at the 3′-end of the antisense strand, and a blunt end at the 5′-end of the antisense strand.

[0547] In another particular embodiment, an RNAi agent of the present invention comprises:
[0548] (a) a sense strand having:
   [0549] (i) a length of 21 nucleotides;
   [0550] (ii) an ASGPR ligand attached to the 3′-end, wherein said ASGPR ligand comprises three GalNAc derivatives attached through a trivalent branched linker;
   [0551] (iii) 2′-OMe modifications at positions 1 to 6, 8, 10, and 12 to 21, 2′-F modifications at positions 7, and 9, and a desoxy-nucleotide (e.g. dT) at position 11 (counting from the 5′ end); and
   [0552] (iv) phosphorothioate intemucleotide linkages between nucleotide positions 1 and 2,
   [0553] and between nucleotide positions 2 and 3 (counting from the 5′ end); and
[0554] (b) an antisense strand having:
   [0555] (i) a length of 23 nucleotides;
   [0556] (ii) 2′-OMe modifications at positions 1, 3, 7, 9, 11, 13, 15, 17, and 19 to 23, and 2′-F modifications at positions 2, 4 to 6, 8, 10, 12, 14, 16, and 18 (counting from the 5′ end); and
   [0557] (iii) phosphorothioate intemucleotide linkages between nucleotide positions 1 and 2, between nucleotide positions 2 and 3, between nucleotide positions 21 and 22, and between nucleotide positions 22 and 23 (counting from the 5′ end);
[0558] wherein the RNAi agents have a two-nucleotide overhang at the 3′-end of the antisense strand, and a blunt end at the 5′-end of the antisense strand.

[0559] In another particular embodiment, an RNAi agent of the present invention comprises:
[0560] (a) a sense strand having:
   [0561] (i) a length of 21 nucleotides;
   [0562] (ii) an ASGPR ligand attached to the 3′-end, wherein said ASGPR ligand comprises three GalNAc derivatives attached through a trivalent branched linker;
   [0563] (iii) 2′-OMe modifications at positions 1 to 6, 8, 10, 12, 14, and 16 to 21, and 2′-F
   [0564] modifications at positions 7, 9, 11, 13, and 15; and
   [0565] (iv) phosphorothioate intemucleotide linkages between nucleotide positions 1 and 2,
[0566] and between nucleotide positions 2 and 3 (counting from the 5′ end); and
[0567] (b) an antisense strand having:
   [0568] (i) a length of 23 nucleotides;
   [0569] (ii) 2′-OMe modifications at positions 1, 5, 7, 9, 11, 13, 15, 17, 19, and 21 to 23, and 2′-F modifications at positions 2 to 4, 6, 8, 10, 12, 14, 16, 18, and 20 (counting from the 5′ end); and
   [0570] (iii) phosphorothioate intemucleotide linkages between nucleotide positions 1 and 2, between nucleotide positions 2 and 3, between nucleotide positions 21 and 22, and between nucleotide positions 22 and 23 (counting from the 5′ end);
[0571] wherein the RNAi agents have a two-nucleotide overhang at the 3′-end of the antisense strand, and a blunt end at the 5′-end of the antisense strand.

[0572] In another particular embodiment, an RNAi agent of the present invention comprises:
[0573] (a) a sense strand having:
   [0574] (i) a length of 21 nucleotides;
   [0575] (ii) an ASGPR ligand attached to the 3′-end, wherein said ASGPR ligand comprises three GalNAc derivatives attached through a trivalent branched linker;
   [0576] (iii) 2′-OMe modifications at positions 1 to 9, and 12 to 21, and 2′-F modifications at positions 10, and 11; and
   [0577] (iv) phosphorothioate intemucleotide linkages between nucleotide positions 1 and 2,
[0578] and between nucleotide positions 2 and 3 (counting from the 5′ end); and
[0579] (b) an antisense strand having:
   [0580] (i) a length of 23 nucleotides;
   [0581] (ii) 2′-OMe modifications at positions 1, 3, 5, 7, 9, 11 to 13, 15, 17, 19, and 21 to 23, and 2′-F modifications at positions 2, 4, 6, 8, 10, 14, 16, 18, and 20 (counting from the 5′ end); and
   [0582] (iii) phosphorothioate intemucleotide linkages between nucleotide positions 1 and 2, between nucleotide positions 2 and 3, between nucleotide positions 21 and 22, and between nucleotide positions 22 and 23 (counting from the 5′ end);
[0583] wherein the RNAi agents have a two-nucleotide overhang at the 3′-end of the antisense strand, and a blunt end at the 5′-end of the antisense strand.

[0584] In another particular embodiment, a RNAi agent of the present invention comprises:
[0585] (a) a sense strand having:
   [0586] (i) a length of 21 nucleotides;
   [0587] (ii) an ASGPR ligand attached to the 3′-end, wherein said ASGPR ligand comprises three GalNAc derivatives attached through a trivalent branched linker;
   [0588] (iii) 2′-F modifications at positions 1, 3, 5, 7, 9 to 11, and 13, and 2′-OMe modifications at positions 2, 4, 6, 8, 12, and 14 to 21; and
   [0589] (iv) phosphorothioate intemucleotide linkages between nucleotide positions 1 and 2,
[0590] and between nucleotide positions 2 and 3 (counting from the 5′ end); and
[0591] (b) an antisense strand having:
   [0592] (i) a length of 23 nucleotides;
   [0593] (ii) 2′-OMe modifications at positions 1, 3, 5 to 7, 9, 11 to 13, 15, 17 to 19, and 21 to 23, and 2′-F modifications at positions 2, 4, 8, 10, 14, 16, and 20 (counting from the 5′ end); and
   [0594] (iii) phosphorothioate intemucleotide linkages between nucleotide positions 1 and 2, between nucleotide positions 2 and 3, between nucleotide positions 21 and 22, and between nucleotide positions 22 and 23 (counting from the 5′ end);
[0595] wherein the RNAi agents have a two-nucleotide overhang at the 3′-end of the antisense strand, and a blunt end at the 5′-end of the antisense strand.

[0596] In another particular embodiment, an RNAi agent of the present invention comprises:
[0597] (a) a sense strand having:
   [0598] (i) a length of 21 nucleotides;
   [0599] (ii) an ASGPR ligand attached to the 3′-end, wherein said ASGPR ligand comprises three GalNAc derivatives attached through a trivalent branched linker;
   [0600] (iii) 2′-OMe modifications at positions 1, 2, 4, 6, 8, 12, 14, 15, 17, and 19 to 21, and 2′-F modifications at positions 3, 5, 7, 9 to 11, 13, 16, and 18; and
   [0601] (iv) phosphorothioate intemucleotide linkages between nucleotide positions 1 and 2, and between nucleotide positions 2 and 3 (counting from the 5′ end); and
[0602] (b) an antisense strand having:
   [0603] (i) a length of 25 nucleotides;
   [0604] (ii) 2′-OMe modifications at positions 1, 4, 6, 7, 9, 11 to 13, 15, 17, and 19 to 23, 2′-F modifications at positions 2, 3, 5, 8, 10, 14, 16, and 18, and desoxy-nucleotides (e.g. dT) at positions 24 and 25 (counting from the 5′ end); and
   [0605] (iii) phosphorothioate internucleotide linkages between nucleotide positions 1 and 2, between nucleotide positions 2 and 3, between nucleotide positions 21 and 22, and between nucleotide positions 22 and 23 (counting from the 5′ end);
[0606] wherein the RNAi agents have a four-nucleotide overhang at the 3′-end of the antisense strand, and a blunt end at the 5′-end of the antisense strand.

[0607] In another particular embodiment, a RNAi agent of the present invention comprises:
[0608] (a) a sense strand having:
   [0609] (i) a length of 21 nucleotides;
   [0610] (ii) an ASGPR ligand attached to the 3′-end, wherein said ASGPR ligand comprises three GalNAc derivatives attached through a trivalent branched linker;
   [0611] (iii) 2′-OMe modifications at positions 1 to 6, 8, and 12 to 21, and 2′-F modifications at positions 7, and 9 to 11; and
   [0612] (iv) phosphorothioate intemucleotide linkages between nucleotide positions 1 and 2, and
[0613] between nucleotide positions 2 and 3 (counting from the 5′ end); and
[0614] (b) an antisense strand having:
   [0615] (i) a length of 23 nucleotides;
   [0616] (ii) 2′-OMe modifications at positions 1, 3 to 5, 7, 8, 10 to 13, 15, and 17 to 23, and
   [0617] 2′-F modifications at positions 2, 6, 9, 14, and 16 (counting from the 5′ end); and (iii) phosphorothioate intemucleotide linkages between nucleotide positions 1 and 2, between nucleotide positions 2 and 3, between nucleotide positions 21 and 22, and between nucleotide positions 22 and 23 (counting from the 5′ end);
[0618] wherein the RNAi agents have a two-nucleotide overhang at the 3′-end of the antisense strand, and a blunt end at the 5′-end of the antisense strand.

[0619] In another particular embodiment, a RNAi agent of the present invention comprises:
[0620] (a) a sense strand having:
   [0621] (i) a length of 21 nucleotides;
   [0622] (ii) an ASGPR ligand attached to the 3′-end, wherein said ASGPR ligand comprises three GalNAc derivatives attached through a trivalent branched linker;
   [0623] (iii) 2′-OMe modifications at positions 1 to 6, 8, and 12 to 21, and 2′-F modifications at positions 7, and 9 to 11; and
   [0624] (iv) phosphorothioate intemucleotide linkages between nucleotide positions 1 and 2,
[0625] and between nucleotide positions 2 and 3 (counting from the 5′ end); and
[0626] (b) an antisense strand having:
   [0627] (i) a length of 23 nucleotides;
   [0628] (ii) 2′-OMe modifications at positions 1, 3 to 5, 7, 10 to 13, 15, and 17 to 23, and 2′-F modifications at positions 2, 6, 8, 9, 14, and 16 (counting from the 5′ end); and
   [0629] (iii) phosphorothioate intemucleotide linkages between nucleotide positions 1 and 2, between nucleotide positions 2 and 3, between nucleotide positions 21 and 22, and between nucleotide positions 22 and 23 (counting from the 5′ end);
[0630] wherein the RNAi agents have a two-nucleotide overhang at the 3′-end of the antisense strand, and a blunt end at the 5′-end of the antisense strand.

[0631] In another particular embodiment, a RNAi agent of the present invention comprises:
[0632] (a) a sense strand having:
   [0633] (i) a length of 19 nucleotides;
   [0634] (ii) an ASGPR ligand attached to the 3′-end, wherein said ASGPR ligand comprises three GalNAc derivatives attached through a trivalent branched linker;
   [0635] (iii) 2′-OMe modifications at positions 1 to 4, 6, and 10 to 19, and 2′-F modifications at positions 5, and 7 to 9; and
   [0636] (iv) phosphorothioate intemucleotide linkages between nucleotide positions 1 and 2,
[0637] and between nucleotide positions 2 and 3 (counting from the 5′ end); and
[0638] (b) an antisense strand having:
   [0639] (i) a length of 21 nucleotides;
   [0640] (ii) 2′-OMe modifications at positions 1, 3 to 5, 7, 10 to 13, 15, and 17 to 21, and 2′-F modifications at positions 2, 6, 8, 9, 14, and 16 (counting from the 5′ end); and
   [0641] (iii) phosphorothioate intemucleotide linkages between nucleotide positions 1 and 2, between nucleotide positions 2 and 3, between nucleotide positions 19 and 20, and between nucleotide positions 20 and 21 (counting from the 5′ end);
[0642] wherein the RNAi agents have a two-nucleotide overhang at the 3′-end of the antisense strand, and a blunt end at the 5′-end of the antisense strand.

[0643] In certain embodiments, the iRNA for use in the methods of the invention is an agent selected from agents listed in Tables 3, 4, 5, 6, 7, 8A, or 8B. These agents may further comprise a ligand.

IV. iRNAs Conjugated to Ligands

[0644] Another modification of the RNA of an iRNA of the invention involves chemically linking to the RNA one or more ligands, moieties or conjugates that enhance the activity, cellular distribution or cellular uptake of the iRNA. Such moieties include but are not limited to lipid moieties such as a cholesterol moiety 35 (Letsinger et al., (1989) Proc. Natd. Acid. Sci. USA, 86: 6553-6556), cholic acid (Manoharan et al., (1994) Biorg. Med. Chem. Let., 4:1053-1060), a thioether, e.g., beryl-S-tritylthiol (Manoharan et al., (1992) Ann. N.Y. Acad. Sci., 660:306-309; Manoharan et al., (1993) Biorg. Med. Chem. Let., 3:2765-2770), a thiocholesterol (Oberhauser et al., (1992) Nucl. Acids Res., 20:533-538), an aliphatic chain, e.g., dodecandiol or undecyl residues (Saison-Behmoaras et al., (1991) EMBO J, 10:1111-1118; Kabanov et al., (1990) FEBS Lett., 259:327-330; Svinarchuk et al., (1993) Biochimie, 75:49-54), a phospholipid, e.g., di-hexadecyl-rac-glycerol or triethyl-ammonium 1,2-di-O-hexadecyl-rac-glycero-3-phosphonate (Manoharan et al., (1995) Tetrahedron Lett., 36:3651-3654; Shea et al., (1990) Nucl. Acids Res., 18:3777-3783), a polyamine or a polyethylene glycol chain (Manoharan et al., (1995) Nucleosides & Nucleotides, 14:969-973), or adamantane acetic acid (Manoharan et al., (1995) Tetrahedron Lett., 36:3651-3654), a palmityl moiety (Mishra et al., (1995) Biochim. 10 Biophys. Acta, 1264:229-237), or an octadecylamine or hexylamino-carbonyloxycholesterol moiety (Crooke et al., (1996) J. Pharmacol. Exp. Ther., 277:923-937).

[0645] In one embodiment, a ligand alters the distribution, targeting or lifetime of an iRNA agent into which it is incorporated. In preferred embodiments a ligand provides an enhanced affinity for a selected target, e.g., molecule, cell or cell type, compartment, e.g., a cellular or organ compartment, tissue, organ or region of the body, as, e.g., compared to a species absent such a ligand. Preferred ligands will not take part in duplex pairing in a duplexed nucleic acid.

[0646] Ligands can include a naturally occurring substance, such as a protein (e.g., human serum albumin (HSA), low-density lipoprotein (LDL), or globulin); carbohydrate (e.g., a dextran, pullulan, chitin, chitosan, inulin, cyclodextrin, N-acetylglucosamine, N-acetylgalactosamine or hyaluronic acid); or a lipid. The ligand can also be a recombinant or synthetic molecule, such as a synthetic polymer, e.g., a synthetic polyamino acid. Examples of polyamino acids include polyamino acid is a polylysine (PLL), poly L-aspartic acid, poly L-glutamic acid, styrene-maleic acid anhydride copolymer, poly(L-lactide-co-glycolied) copolymer, divinyl ether-maleic anhydride copolymer, N-(2-hydroxypropyl)methacrylamide copolymer (HMPA), polyethylene glycol (PEG), polyvinyl alcohol (PVA), polyurethane, poly(2-ethylacryllic acid), N-isopropylacrylamide polymers, or polyphosphazine. Example of polyamines include: polyethylenimine, polylysine (PLL), spermine, spermidine, polyamine, pseudopeptide-polyamine, peptidomimetic polyamine, dendrimer polyamine, arginine, amidine, protamine, cationic lipid, cationic porphyrin, quaternary salt of a polyamine, or an alpha helical peptide.

[0647] Ligands can also include targeting groups, e.g., a cell or tissue targeting agent, e.g., a lectin, glycoprotein, lipid or protein, e.g., an antibody, that binds to a specified cell type such as a kidney cell. A targeting group can be a thyrotropin, melanotropin, lectin, glycoprotein, surfactant protein A, Mucin carbohydrate, multivalent lactose, multivalent galactose, N-acetyl-galactosamine, N-acetyl-gulucosamine multivalent mannose, multivalent fucose, glycosylated polyaminoacids, multivalent galactose, transferrin, bisphosphonate, polyglutamate, polyaspartate, a lipid, cholesterol, a steroid, bile acid, folate, vitamin B12, vitamin A, biotin, or an RGD peptide or RGD peptide mimetic.

[0648] Other examples of ligands include dyes, intercalating agents (e.g. acridines), cross-linkers (e.g. psoralene, mitomycin C), porphyrins (TPPC4, texaphyrin, Sapphyrin), polycyclic aromatic hydrocarbons (e.g., phenazine, dihydrophenazine), artificial endonucleases (e.g. EDTA), lipophilic molecules, e.g., cholesterol, cholic acid, adamantane acetic acid, 1-pyrene butyric acid, dihydrotestosterone, 1,3-Bis-O(hexadecyl)glycerol, geranyloxyhexyl group, hexadecylglycerol, bomeol, menthol, 1,3-propanediol, heptadecyl group, palmitic acid, myristic acid,03-(oleoyl)lithocholic acid, 03-(oleoyl)cholenic acid, dimethoxytrityl, or phenoxazine)and peptide conjugates (e.g., antennapedia peptide, Tat peptide), alkylating agents, phosphate, amino, mercapto, PEG (e.g., PEG-40K), MPEG, [MPEG]₂, polyamino, alkyl, substituted alkyl, radiolabeled markers, enzymes, haptens (e.g. biotin), transport/absorption facilitators (e.g., aspirin, vitamin E, folic acid), synthetic ribonucleases (e.g., imidazole, bisimidazole, histamine, imidazole clusters, acridine-imidazole conjugates, Eu3+complexes of tetraazamacrocycles), dinitrophenyl, HRP, or AP.

[0649] Ligands can be proteins, e.g., glycoproteins, or peptides, e.g., molecules having a specific affinity for a co-ligand, or antibodies e.g., an antibody, that binds to a specified cell type such as a hepatic cell. Ligands can also include hormones and hormone receptors. They can also include non-peptidic species, such as lipids, lectins, carbohydrates, vitamins, cofactors, multivalent lactose, multivalent galactose, N-acetyl-galactosamine, N-acetyl-gulucosamine multivalent mannose, or multivalent fucose. The ligand can be, for example, a lipopolysaccharide, an activator of p38 MAP kinase, or an activator of NF-KB.

[0650] The ligand can be a substance, e.g., a drug, which can increase the uptake of the iRNA agent into the cell, for example, by disrupting the cell's cytoskeleton, e.g., by disrupting the cell's microtubules, microfilaments, and/or intermediate filaments. The drug can be, for example, taxon, vincristine, vinblastine, cytochalasin, nocodazole, japlakinolide, latrunculin A, phalloidin, swinholide A, indanocine, or myoservin.

[0651] In some embodiments, a ligand attached to an iRNA as described herein acts as a pharmacokinetic modulator (PK modulator). PK modulators include lipophiles, bile acids, steroids, phospholipid analogues, peptides, protein binding agents, PEG, vitamins etc. Exemplary PK modulators include, but are not limited to, cholesterol, fatty acids, cholic acid, lithocholic acid, dialkylglycerides, diacylglyceride, phospholipids, sphingolipids, naproxen, ibuprofen, vitamin E, biotin etc. Oligonucleotides that comprise a number of phosphorothioate linkages are also known to bind to serum protein, thus short oligonucleotides, e.g., oligonucleotides of about 5 bases, 10 bases, 15 bases or 20 bases, comprising multiple of phosphorothioate linkages in the backbone are also amenable to the present invention as ligands (e.g. as PK modulating ligands). In addition, aptamers that bind serum components (e.g. serum proteins) are also suitable for use as PK modulating ligands in the embodiments described herein.

[0652] Ligand-conjugated oligonucleotides of the invention may be synthesized by the use of an oligonucleotide that bears a pendant reactive functionality, such as that derived from the attachment of a linking molecule onto the oligonucleotide (described below). This reactive oligonucleotide may be reacted directly with commercially-available ligands, ligands that are synthesized bearing any of a variety of protecting groups, or ligands that have a linking moiety attached thereto.

[0653] The oligonucleotides used in the conjugates of the present invention may be conveniently and routinely made through the well-known technique of solid-phase synthesis. Equipment for such synthesis is sold by several vendors including, for example, Applied Biosystems (Foster City, Calif). Any other means for such synthesis known in the art may additionally or alternatively be employed. It is also known to use similar techniques to prepare other oligonucleotides, such as the phosphorothioates and alkylated derivatives.

[0654] In the ligand-conjugated oligonucleotides and ligand-molecule bearing sequence-specific linked nucleosides of the present invention, the oligonucleotides and oligonucleosides may be assembled on a suitable DNA synthesizer utilizing standard nucleotide or nucleoside precursors, or nucleotide or nucleoside conjugate precursors that already bear the linking moiety, ligand-nucleotide or nucleoside-conjugate precursors that already bear the ligand molecule, or non-nucleoside ligand-bearing building blocks.

[0655] When using nucleotide-conjugate precursors that already bear a linking moiety, the synthesis of the sequence-specific linked nucleosides is typically completed, and the ligand molecule is then reacted with the linking moiety to form the ligand-conjugated oligonucleotide. In some embodiments, the oligonucleotides or linked nucleosides of the present invention are synthesized by an automated synthesizer using phosphoramidites derived from ligand-nucleoside conjugates in addition to the standard phosphoramidites and non-standard phosphoramidites that are commercially available and routinely used in oligonucleotide synthesis.

### A. Lipid Conjugates

[0656] In one embodiment, the ligand or conjugate is a lipid or lipid-based molecule. Such a lipid or lipid-based molecule preferably binds a serum protein, e.g., human serum albumin (HSA). An HSA binding ligand allows for distribution of the conjugate to a target tissue, e.g., a non-kidney target tissue of the body. For example, the target tissue can be the liver, including parenchymal cells of the liver. Other molecules that can bind HSA can also be used as ligands. For example, neproxin or aspirin can be used. A lipid or lipid-based ligand can (a) increase resistance to degradation of the conjugate, (b) increase targeting or transport into a target cell or cell membrane, and/or (c) can be used to adjust binding to a serum protein, e.g., HSA.

[0657] A lipid based ligand can be used to inhibit, e.g., control the binding of the conjugate to a target tissue. For example, a lipid or lipid-based ligand that binds to HSA more strongly will be less likely to be targeted to the kidney and therefore less likely to be cleared from the body. A lipid or lipid-based ligand that binds to HSA less strongly can be used to target the conjugate to the kidney.

[0658] In a preferred embodiment, the lipid based ligand binds HSA. Preferably, it binds HSA with a sufficient affinity such that the conjugate will be preferably distributed to a non-kidney tissue. However, it is preferred that the affinity not be so strong that the HSA-ligand binding cannot be reversed.

[0659] In another preferred embodiment, the lipid based ligand binds HSA weakly or not at all, such that the conjugate will be preferably distributed to the kidney. Other moieties that target to kidney cells can also be used in place of or in addition to the lipid based ligand.

[0660] In another aspect, the ligand is a moiety, e.g., a vitamin, which is taken up by a target cell, e.g., a proliferating cell. These are particularly useful for treating disorders characterized by unwanted cell proliferation, e.g., of the malignant or non-malignant type, e.g., cancer cells. Exemplary vitamins include vitamin A, E, and K. Other exemplary vitamins include are B vitamin, e.g., folic acid, B12, riboflavin, biotin, pyridoxal or other vitamins or nutrients taken up by target cells such as liver cells. Also included are HSA and low density lipoprotein (LDL).

### B. Cell Permeation Agents

[0661] In another aspect, the ligand is a cell-permeation agent, preferably a helical cell-permeation agent. Preferably, the agent is amphipathic. An exemplary agent is a peptide such as tat or antennopedia. If the agent is a peptide, it can be modified, including a peptidylmimetic, invertomers, non-peptide or pseudo-peptide linkages, and use of D-amino acids. The helical agent is preferably an alpha-helical agent, which preferably has a lipophilic and a lipophobic phase.

[0662] The ligand can be a peptide or peptidomimetic. A peptidomimetic (also referred to herein as an oligopeptidomimetic) is a molecule capable of folding into a defined three-dimensional structure similar to a natural peptide. The attachment of peptide and peptidomimetics to iRNA agents can affect pharmacokinetic distribution of the iRNA, such as by enhancing cellular recognition and absorption. The peptide or peptidomimetic moiety can be about 5-50 amino acids long, e.g., about 5, 10, 15, 20, 25, 30, 35, 40, 45, or 50 amino acids long.

[0663] A peptide or peptidomimetic can be, for example, a cell permeation peptide, cationic peptide, amphipathic peptide, or hydrophobic peptide (e.g., consisting primarily of Tyr, Trp or Phe). The peptide moiety can be a dendrimer peptide, constrained peptide or cross-linked peptide. In another alternative, the peptide moiety can include a hydrophobic membrane translocation sequence (MTS). An exemplary hydrophobic MTS-containing peptide is RFGF having the amino acid sequence AAVALLPAVLLALLAP (SEQ ID NO: 5). An RFGF analogue (e.g., amino acid sequence AALLPVLLAAP (SEQ ID NO: 6) containing a hydrophobic MTS can also be a targeting moiety. The peptide moiety can be a “delivery” peptide, which can carry large polar molecules including peptides, oligonucleotides, and protein across cell membranes. For example, sequences from the HIV Tat protein (GRKKRRQRRRPPQ (SEQ ID NO: 7) and the Drosophila Antennapedia protein (RQIKIWFQNRRMKWKK (SEQ ID NO: 8) have been found to be capable of functioning as delivery peptides. A peptide or peptidomimetic can be encoded by a random sequence of DNA, such as a peptide identified from a phage-display library, or one-bead-one-compound (OBOC) combinatorial library (Lam et al., Nature, 354:82-84, 1991). Examples of a peptide or peptidomimetic tethered to a dsRNA agent via an incorporated monomer unit for cell targeting purposes is an arginine-glycine-aspartic acid (RGD)-peptide, or RGD mimic. A peptide moiety can range in length from about 5 amino acids to about 40 amino acids. The peptide moieties can have a structural modification, such as to increase stability or direct conformational properties. Any of the structural modifications described below can be utilized.

[0664] An RGD peptide for use in the compositions and methods of the invention may be linear or cyclic, and may be modified, e.g., glyciosylated or methylated, to facilitate targeting to a specific tissue(s). RGD-containing peptides and peptidiomimemtics may include D-amino acids, as well as synthetic RGD mimics. In addition to RGD, one can use other moieties that target the integrin ligand. Preferred conjugates of this ligand target PECAM-1 or VEGF.

[0665] A “cell permeation peptide” is capable of permeating a cell, e.g., a microbial cell, such as a bacterial or fungal cell, or a mammalian cell, such as a human cell. A microbial cell-permeating peptide can be, for example, a α-helical linear peptide (e.g., LL-37 or Ceropin P1), a disulfide bond-containing peptide (e.g., a -defensin, β-defensin or bactenecin), or a peptide containing only one or two dominating amino acids (e.g., PR-39 or indolicidin). A cell permeation peptide can also include a nuclear localization signal (NLS). For example, a cell permeation peptide can be a bipartite amphipathic peptide, such as MPG, which is derived from the fusion peptide domain of HIV-1 gp41 and the NLS of SV40 large T antigen (Simeoni et al., Nucl. Acids Res. 31:2717-2724, 2003).

### C. Carbohydrate Conjugates

[0666] In some embodiments of the compositions and methods of the invention, an iRNA oligonucleotide further comprises a carbohydrate. The carbohydrate conjugated iRNA are advantageous for the in vivo delivery of nucleic acids, as well as compositions suitable for in vivo therapeutic use, as described herein. As used herein, “carbohydrate” refers to a compound which is either a carbohydrate per se made up of one or more monosaccharide units having at least 6 carbon atoms (which can be linear, branched or cyclic) with an oxygen, nitrogen or sulfur atom bonded to each carbon atom; or a compound having as a part thereof a carbohydrate moiety made up of one or more monosaccharide units each having at least six carbon atoms (which can be linear, branched or cyclic), with an oxygen, nitrogen or sulfur atom bonded to each carbon atom. Representative carbohydrates include the sugars (mono-, di-, tri- and oligosaccharides containing from about 4, 5, 6, 7, 8, or 9 monosaccharide units), and polysaccharides such as starches, glycogen, cellulose and polysaccharide gums. Specific monosaccharides include C5 and above (e.g., C5, C6, C7, or C8) sugars; di-and trisaccharides include sugars having two or three monosaccharide units (e.g., C5, C6, C7, or C8).

[0667] In one embodiment, a carbohydrate conjugate for use in the compositions and methods of the invention is selected from the group consisting of:

[chemical structure]

[chemical structure]

[chemical structure]

[chemical structure]

[chemical structure]

[chemical structure]

[chemical structure]

[0668] In another embodiment, a carbohydrate conjugate for use in the compositions and methods of the invention is a monosaccharide. In one embodiment, the monosaccharide is an N-acetylgalactosamine, such as

[chemical structure]

[0669] Another representative carbohydrate conjugate for use in the embodiments described herein includes, but is not limited to,

[chemical structure]

when one of X or Y is an oligonucleotide, the other is a hydrogen.

[0670] In certain embodiments of the invention, the GalNAc or GalNAc derivative is attached to an iRNA 5 agent of the invention via a monovalent linker. In some embodiments, the GalNAc or GalNAc derivative is attached to an iRNA agent of the invention via a bivalent linker. In yet other embodiments of the invention, the GalNAc or GalNAc derivative is attached to an iRNA agent of the invention via a trivalent linker.

[0671] In one embodiment, the double stranded RNAi agents of the invention comprise one GalNAc or GalNAc derivative attached to the iRNA agent, e.g., the 3′ or 5′end of the sense strand of a dsRNA agent as 10 described herein. In another embodiment, the double stranded RNAi agents of the invention comprise a plurality (e.g., 2, 3, 4, 5, or 6) of GalNAc or GalNAc derivatives, each independently attached to a plurality of nucleotides of the double stranded RNAi agent through a plurality of monovalent linkers.

[0672] In some embodiments, for example, when the two strands of an iRNA agent of the invention are part of one larger molecule connected by an uninterrupted chain of nucleotides between the 3′-end of one strand and the 5′-end of the respective other strand forming a hairpin loop comprising, a plurality of unpaired nucleotides, each unpaired nucleotide within the hairpin loop may independently comprise a GalNAc or GalNAc derivative attached via a monovalent linker.

[0673] In some embodiments, the carbohydrate conjugate further comprises one or more additional ligands as described above, such as, but not limited to, a PK modulator and/or a cell permeation peptide.

[0674] Additional carbohydrate conjugates (and linkers) suitable for use in the present invention include those described in PCT Publication Nos. WO 2014/179620 and WO 2014/179627, the entire contents of each of which are incorporated herein by reference.

### D. Linkers

[0675] In some embodiments, the conjugate or ligand described herein can be attached to an iRNA oligonucleotide with various linkers that can be cleavable or non-cleavable.

[0676] The term “linker” or “linking group” means an organic moiety that connects two parts of a compound, e.g., covalently attaches two parts of a compound. Linkers typically comprise a direct bond or an atom such as oxygen or sulfur, a unit such as NR8, C(O), C(O)NH, SO, SO₂, SO₂NH or a chain of atoms, such as, but not limited to, substituted or unsubstituted alkyl, substituted or unsubstituted alkenyl, substituted or unsubstituted alkynyl, arylalkyl, arylalkenyl, arylalkynyl, heteroarylalkyl, heteroarylalkenyl, heteroarylalkynyl, heterocyclylalkyl, heterocyclylalkenyl, heterocyclylalkynyl, aryl, heteroaryl, heterocyclyl, cycloalkyl, cycloalkenyl, alkylarylalkyl, alkylarylalkenyl, alkylarylalkynyl, alkenylarylalkyl, alkenylarylalkenyl, alkenylarylalkynyl, alkynylarylalkyl, alkynylarylalkenyl, alkynylarylalkynyl, alkylheteroarylalkyl, alkylheteroarylalkenyl, alkylheteroarylalkynyl, alkenylheteroarylalkyl, alkenylheteroarylalkenyl, alkenylheteroarylalkynyl, alkynylheteroarylalkyl, alkynylheteroarylalkenyl, alkynylheteroarylalkynyl, alkylheterocyclylalkyl, alkylheterocyclylalkenyl, alkylhererocyclylalkynyl, alkenylheterocyclylalkyl, alkenylheterocyclylalkenyl, alkenylheterocyclylalkynyl, alkynylheterocyclylalkyl, alkynylheterocyclylalkenyl, alkynylheterocyclylalkynyl, alkylaryl, alkenylaryl, alkynylaryl, alkylheteroaryl, alkenylheteroaryl, alkynylhereroaryl, which one or more methylenes can be interrupted or terminated by O, S, S(O), SO₂, N(R8), C(O), substituted or unsubstituted aryl, substituted or unsubstituted heteroaryl, substituted or unsubstituted heterocyclic; where R8 is hydrogen, acyl, aliphatic or substituted aliphatic. In one embodiment, the linker is between about 1-24 atoms, 2-24, 3-24, 4-24, 5-24, 6-24, 6-18, 7-18, 8-18 atoms, 7-17, 8-17, 6-16, 7-17, or 8-16 atoms.

[0677] A cleavable linking group is one which is sufficiently stable outside the cell, but which upon entry into a target cell is cleaved to release the two parts the linker is holding together. In a preferred embodiment, the cleavable linking group is cleaved at least about 10 times, 20, times, 30 times, 40 times, 50 times, 60 times, 70 times, 80 times, 90 times or more, or at least about 100 times faster in a target cell or under a first reference condition (which can, e.g., be selected to mimic or represent intracellular conditions) than in the blood of a subject, or under a second reference condition (which can, e.g., be selected to mimic or represent conditions found in the blood or serum).

[0678] Cleavable linking groups are susceptible to cleavage agents, e.g., pH, redox potential or the presence of degradative molecules. Generally, cleavage agents are more prevalent or found at higher levels or activities inside cells than in serum or blood. Examples of such degradative agents include: redox agents which are selected for particular substrates or which have no substrate specificity, including, e.g., oxidative or reductive enzymes or reductive agents such as mercaptans, present in cells, that can degrade a redox cleavable linking group by reduction; esterases; endosomes or agents that can create an acidic environment, e.g., those that result in a pH of five or lower; enzymes that can hydrolyze or degrade an acid cleavable linking group by acting as a general acid, peptidases (which can be substrate specific), and phosphatases.

[0679] A cleavable linkage group, such as a disulfide bond can be susceptible to pH. The pH of human serum is 7.4, while the average intracellular pH is slightly lower, ranging from about 7.1-7.3. Endosomes have a more acidic pH, in the range of 5.5-6.0, and lysosomes have an even more acidic pH at around 5.0. Some linkers will have a cleavable linking group that is cleaved at a preferred pH, thereby releasing a cationic lipid from the ligand inside the cell, or into the desired compartment of the cell.

[0680] A linker can include a cleavable linking group that is cleavable by a particular enzyme. The type of cleavable linking group incorporated into a linker can depend on the cell to be targeted. For example, a liver-targeting ligand can be linked to a cationic lipid through a linker that includes an ester group. Liver cells are rich in esterases, and therefore the linker will be cleaved more efficiently in liver cells than in cell types that are not esterase-rich. Other cell-types rich in esterases include cells of the lung, renal cortex, and testis.

[0681] Linkers that contain peptide bonds can be used when targeting cell types rich in peptidases, such as liver cells and synoviocytes.

[0682] In general, the suitability of a candidate cleavable linking group can be evaluated by testing the ability of a degradative agent (or condition) to cleave the candidate linking group. It will also be desirable to also test the candidate cleavable linking group for the ability to resist cleavage in the blood or when in contact with other non-target tissue. Thus, one can determine the relative susceptibility to cleavage between a first and a second condition, where the first is selected to be indicative of cleavage in a target cell and the second is selected to be indicative of cleavage in other tissues or biological fluids, e.g., blood or serum. The evaluations can be carried out in cell free systems, in cells, in cell culture, in organ or tissue culture, or in whole animals.

[0683] It can be useful to make initial evaluations in cell-free or culture conditions and to confirm by further evaluations in whole animals. In preferred embodiments, useful candidate compounds are cleaved at least about 2, 4, 10, 20, 30, 40, 50, 60, 70, 80, 90, or about 100 times faster in the cell (or under in vitro conditions selected to mimic intracellular conditions) as compared to blood or serum (or under in vitro conditions selected to mimic extracellular conditions).

i. Redox Cleavable Linking Groups

[0684] In one embodiment, a cleavable linking group is a redox cleavable linking group that is cleaved upon reduction or oxidation. An example of reductively cleavable linking group is a disulphide linking group (—S—S—). To determine if a candidate cleavable linking group is a suitable “reductively cleavable linking group,” or for example is suitable for use with a particular iRNA moiety and particular targeting agent one can look to methods described herein. For example, a candidate can be evaluated by incubation with dithiothreitol (DTT), or other reducing agent using reagents know in the art, which mimic the rate of cleavage which would be observed in a cell, e.g., a target cell. The candidates can also be evaluated under conditions which are selected to mimic blood or serum conditions. In one, candidate compounds are cleaved by at most about 10% in the blood. In other embodiments, useful candidate compounds are degraded at least about 2, 4, 10, 20, 30, 40, 50, 60, 70, 80, 90, or about 100 times faster in the cell (or under in vitro conditions selected to mimic intracellular conditions) as compared to blood (or under in vitro conditions selected to mimic extracellular conditions).

[0685] The rate of cleavage of candidate compounds can be determined using standard enzyme kinetics assays under conditions chosen to mimic intracellular media and compared to conditions chosen to mimic extracellular media.

ii. Phosphate-Based Cleavable Linking Groups

[0686] In another embodiment, a cleavable linker comprises a phosphate-based cleavable linking group. A phosphate-based cleavable linking group is cleaved by agents that degrade or hydrolyze the phosphate group.

[0687] An example of an agent that cleaves phosphate groups in cells are enzymes such as phosphatases in cells. Examples of phosphate-based linking groups are —O—P(O)(ORk)—O—, —O—P(S)(ORk)—O—, —O—P(S)(SRk)—O—, —S—P(O)(ORk)—O—, —O—P(O)(ORk)—S—, —S—P(O)(ORk)—S—, —O—P(S)(ORk)—S—, —S—P(S)(ORk)—O—, —O—P(O)(Rk)—O—, —O—P(S)(Rk)—O—, —S—P(O)(Rk)—O—, —S—P(S)(Rk)—O—, —S—P(O)(Rk)—S—, —O—P(S)(Rk)—S—. Preferred embodiments are —O—P(O)(OH)—O—, —O—P(S)(OH)—O—, —O—P(S)(SH)—O—, —S—P(O)(OH)—O—, —O—P(O)(OH)—S—, —S—P(O)(OH)—S—, —O—P(S)(OH)—S—, —S—P(S)(OH)—O—, —O—P(O)(H)—O—, —O—P(S)(H)—O—, —S—P(O)(H)—O—, —S—P(S)(H)—O—, —S—P(O)(H)—S—, —O—P(S)(H)—S—. A preferred embodiment is —O—P(O)(OH)—O—. These candidates can be evaluated using methods analogous to those described above.

iii. Acid Cleavable Linking Groups

[0688] In another embodiment, a cleavable linker comprises an acid cleavable linking group. An acid cleavable linking group is a linking group that is cleaved under acidic conditions. In preferred embodiments acid cleavable linking groups are cleaved in an acidic environment with a pH of about 6.5 or lower (e.g., about 6.0, 5.75, 5.5, 5.25, 5.0, or lower), or by agents such as enzymes that can act as a general acid. In a cell, specific low pH organelles, such as endosomes and lysosomes can provide a cleaving environment for acid cleavable linking groups. Examples of acid cleavable linking groups include but are not limited to hydrazones, esters, and esters of amino acids. Acid cleavable groups can have the general formula —C═NN—, C(O)O, or —OC(O). A preferred embodiment is when the carbon attached to the oxygen of the ester (the alkoxy group) is an aryl group, substituted alkyl group, or tertiary alkyl group such as dimethyl pentyl or t-butyl. These candidates can be evaluated using methods analogous to those described above. iv. Ester-based linking groups In another embodiment, a cleavable linker comprises an ester-based cleavable linking group. An ester-based cleavable linking group is cleaved by enzymes such as esterases and amidases in cells. Examples of ester-based cleavable linking groups include but are not limited to esters of alkylene, alkenylene and alkynylene groups. Ester cleavable linking groups have the general formula —C(O)O—, or —OC(O)—.

[0689] These candidates can be evaluated using methods analogous to those described above.

v. Peptide-Based Cleaving Groups

[0690] In yet another embodiment, a cleavable linker comprises a peptide-based cleavable linking group. A peptide-based cleavable linking group is cleaved by enzymes such as peptidases and proteases in cells. Peptide-based cleavable linking groups are peptide bonds formed between amino acids to yield oligopeptides (e.g., dipeptides, tripeptides etc.) and polypeptides. Peptide-based cleavable groups do not include the amide group (—C(O)NH—). The amide group can be formed between any alkylene, alkenylene or alkynelene. A peptide bond is a special type of amide bond formed between amino acids to yield peptides and proteins. The peptide based cleavage group is generally limited to the peptide bond (i.e., the amide bond) formed between amino acids yielding peptides and proteins and does not include the entire amide functional group. Peptide-based cleavable linking groups have the general formula —NHCHRAC(O)NHCHRBC(O)—, where RA and RB are the R groups of the two adjacent amino acids. These candidates can be evaluated using methods analogous to those described above.

[0691] In one embodiment, an iRNA of the invention is conjugated to a carbohydrate through a linker. Non-limiting examples of iRNA carbohydrate conjugates with linkers of the compositions and methods of the invention include, but are not limited to,

[chemical structure]

[chemical structure]

when one of X or Y is an oligonucleotide, the other is a hydrogen.

[0692] In certain embodiments of the compositions and methods of the invention, a ligand is one or more GalNAc (N-acetylgalactosamine) derivatives attached through a bivalent or trivalent branched linker.

[0693] In one embodiment, a dsRNA of the invention is conjugated to a bivalent or trivalent branched linker selected from the group of structures shown in any of Formula XLIV - XLVII:

[chemical structure]

wherein:
[0694] q2A, q2B, q3A, q3B, q4A, q4B, q5A, q5B and q5C represent independently for each occurrence 0-20 and wherein the repeating unit can be the same or different;
[0695] P^{2A}, P^{2B}, P^{3A}, P^{3B}, P^{4A}, P^{4B}, P^{5A}, P^{5B}, P^{5C}, T^{2A}, T^{2B}, T^{3A}, T^{3B}, T^{4A} T^{4B} T^{4A} T^{5B} T^{5C} are each independently for each occurrence absent, CO, NH, O, S, OC(O), NHC(O), CH₂, CH₂NH or CH₂O;
[0696] Q^{2A} Q^{2B} Q^{3A} Q^{3B}, Q^{4A}, Q^{4B}, Q^{5A}, Q^{5B}, Q^{5C} are independently for each occurrence absent, alkylene, substituted alkylene wherein one or more methylenes can be interrupted or terminated by one or more of O, S, S(O), SO₂, N(R^{N}), C(R′)═C(R″), C≡C or C(O);
[0697] R^{2A}, R^{2B}, R^{3A}, R^{3B}, R^{4A}, R^{4B}, R^{5A}, R^{5B}, R^{5C} are each independently for each occurrence absent, NH, O, S, CH₂, C(O)O, C(O)NH, NHCH(R^{a})C(O), —C(O)—CH(R^{a})—NH—, CO, CH═N—O

[chemical structure]

[0698] L^{2A}, L^{2B}, L^{3A}, L^{3B}, L^{4A}, L^{4B}, L^{5A}, L^{5B} and L^{5C} represent the ligand; i.e. each independently for each occurrence a monosaccharide (such as GalNAc), disaccharide, trisaccharide, tetrasaccharide, oligosaccharide, or polysaccharide; and R^{a} is H or amino acid side chain. Trivalent conjugating GalNAc derivatives are particularly useful for use with RNAi agents for inhibiting the expression of a target gene, such as those of formula XLIII.

[chemical structure]

wherein L^{5A} L^{5B} and L^{5C} represent a monosaccharide, such as GalNAc derivative.

[0699] Examples of suitable bivalent and trivalent branched linker groups conjugating GalNAc derivatives include, but are not limited to, the structures recited above as formulas II, VII, XI, X, and XIII.

[0700] Representative U.S. patents that teach the preparation of RNA conjugates include, but are not limited to, U.S. Pat. Nos. 4,828,979; 4,948,882; 5,218,105; 5,525,465; 5,541,313; 5,545,730; 5,552,538; 5,578,717, 5,580,731; 5,591,584; 5,109,124; 5,118,802; 5,138,045; 5,414,077; 5,486,603; 5,512,439; 5,578,718; 5,608,046; 4,587,044; 4,605,735; 4,667,025; 4,762,779; 4,789,737; 4,824,941; 4,835,263; 4,876,335; 4,904,582; 4,958,013; 5,082,830; 5,112,963; 5,214,136; 5,082,830; 5,112,963; 5,214,136; 5,245,022; 5,254,469; 5,258,506; 5,262,536; 5,272,250; 5,292,873; 5,317,098; 5,371,241, 5,391,723; 5,416,203, 5,451,463; 5,510,475; 5,512,667; 5,514,785; 5,565,552; 5,567,810; 5,574,142; 5,585,481; 5,587,371; 5,595,726; 5,597,696; 5,599,923; 5,599,928 and 5,688,941; 6,294,664; 6,320,017; 6,576,752; 6,783,931; 6,900,297; 7,037,646; 8,106,022, the entire contents of each of which are hereby incorporated herein by reference.

[0701] It is not necessary for all positions in a given compound to be uniformly modified, and in fact more than one of the aforementioned modifications can be incorporated in a single compound or even at a single nucleoside within an iRNA. The present invention also includes iRNA compounds that are chimeric compounds. “Chimeric” iRNA compounds or “chimeras,” in the context of this invention, are iRNA compounds, preferably dsRNAs, which contain two or more chemically distinct regions, each made up of at least one monomer unit, i.e., a nucleotide in the case of a dsRNA compound. These iRNAs typically contain at least one region wherein the RNA is modified so as to confer upon the iRNA increased resistance to nuclease degradation, increased cellular uptake, and/or increased binding affinity for the target nucleic acid. An additional region of the iRNA can serve as a substrate for enzymes capable of cleaving RNA:DNA or RNA:RNA hybrids. By way of example, RNase H is a cellular endonuclease which cleaves the RNA strand of an RNA:DNA duplex. Activation of RNase H, therefore, results in cleavage of the RNA target, thereby greatly enhancing the efficiency of iRNA inhibition of gene expression. Consequently, comparable results can often be obtained with shorter iRNAs when chimeric dsRNAs are used, compared to phosphorothioate deoxy dsRNAs hybridizing to the same target region. Cleavage of the RNA target can be routinely detected by gel electrophoresis and, if necessary, associated nucleic acid hybridization techniques known in the art.

[0702] In certain instances, the RNA of an iRNA can be modified by a non-ligand group. A number of non-ligand molecules have been conjugated to iRNAs in order to enhance the activity, cellular distribution or cellular uptake of the iRNA, and procedures for performing such conjugations are available in the scientific literature. Such non-ligand moieties have included lipid moieties, such as cholesterol (Kubo, T. et al., Biochem. Biophys. Res. Comm., 2007, 365(1):54-61; Letsinger et al., Proc. Natl. Acad. Sci. USA, 1989, 86:6553), cholic acid (Manoharan et al., Bioorg. Med. Chem. Lett., 1994, 4:1053), a thioether, e.g., hexyl-S— tritylthiol (Manoharan et al., Ann. N.Y. Acad. Sci., 1992, 660:306; Manoharan et al., Bioorg. Med. Chem. Let., 1993, 3:2765), a thiocholesterol (Oberhauser et al., Nucl. Acids Res., 1992, 20:533), an aliphatic chain, e.g., dodecandiol or undecyl residues (Saison-Behmoaras et al., EMBO J., 1991, 10:111; Kabanov et al., FEBS Lett., 1990, 259:327; Svinarchuk et al., Biochimie, 1993, 75:49), a phospholipid, e.g., di-hexadecyl-rac-glycerol or triethylammonium 1,2-di-O-hexadecyl-rac-glycero-3-H-phosphonate (Manoharan et al., Tetrahedron Lett., 1995, 36:3651; Shea et al., Nucl. Acids Res., 1990, 18:3777), a polyamine or a polyethylene glycol chain (Manoharan et al., Nucleosides & Nucleotides, 1995, 14:969), or adamantane acetic acid (Manoharan et al., Tetrahedron Lett., 1995, 36:3651), a palmityl moiety (Mishra et al., Biochim. Biophys. Acta, 1995, 1264:229), or an octadecylamine or hexylamino-carbonyl-oxycholesterol moiety (Crooke et al., J. Pharmacol. Exp. Ther., 1996, 277:923). Representative United States patents that teach the preparation of such RNA conjugates have been listed above. Typical conjugation protocols involve the synthesis of an RNAs bearing an aminolinker at one or more positions of the sequence. The amino group is then reacted with the molecule being conjugated using appropriate coupling or activating reagents. The conjugation reaction can be performed either with the RNA still bound to the solid support or following cleavage of the RNA, in solution phase. Purification of the RNA conjugate by HPLC typically affords the pure conjugate.

V. Delivery of an iRNA of the Invention

[0703] The delivery of an iRNA of the invention to a cell e.g., a cell within a subject, such as a human subject (e.g., a subject in need thereof, such as a subject having a bleeding disorder) can be achieved in a number of different ways. For example, delivery may be performed by contacting a cell with an iRNA of the invention either in vitro or in vivo. In vivo delivery may also be performed directly by administering a composition comprising an iRNA, e.g., a dsRNA, to a subject. Alternatively, in vivo delivery may be performed indirectly by administering one or more vectors that encode and direct the expression of the iRNA. These alternatives are discussed further below.

[0704] In general, any method of delivering a nucleic acid molecule (in vitro or in vivo) can be adapted for use with an iRNA of the invention (see e.g., Akhtar S. and Julian RL., (1992) Trends Cell. Biol. 2(5):139-144 and WO94/02595, which are incorporated herein by reference in their entireties). For in vivo delivery, factors to consider in order to deliver an iRNA molecule include, for example, biological stability of the delivered molecule, prevention of non-specific effects, and accumulation of the delivered molecule in the target tissue. The non-specific effects of an iRNA can be minimized by local administration, for example, by direct injection or implantation into a tissue or topically administering the preparation. Local administration to a treatment site maximizes local concentration of the agent, limits the exposure of the agent to systemic tissues that can otherwise be harmed by the agent or that can degrade the agent, and permits a lower total dose of the iRNA molecule to be administered. Several studies have shown successful knockdown of gene products when an iRNA is administered locally. For example, intraocular delivery of a VEGF dsRNA by intravitreal injection in cynomolgus monkeys (Tolentino, M J. et al., (2004) Retina 24:132-138) and subretinal injections in mice (Reich, S J. et al. (2003) Mol. Vis. 9:210-216) were both shown to prevent neovascularization in an experimental model of age-related macular degeneration. In addition, direct intratumoral injection of a dsRNA in mice reduces tumor volume (Pille, J. et al. (2005) Mol. Ther. 11:267-274) and can prolong survival of tumor-bearing mice (Kim, W J. et al., (2006) Mol. Ther. 14:343-350; Li, S. et al., (2007) Mol. Ther. 15:515-523). RNA interference has also shown success with local delivery to the CNS by direct injection (Dorn, G. et al., (2004) Nucleic Acids 32:e49; Tan, P H. et al. (2005) Gene Ther. 12:59-66; Makimura, H. et al. (2002) BMC Neurosci. 3:18; Shishkina, G T., et al. (2004) Neuroscience 129:521-528; Thakker, E R., et al. (2004) Proc. Natl. Acad. Sci. U.S.A. 101:17270-17275; Akaneya,Y., et al. (2005)J. Neurophysiol. 93:594-602) and to the lungs by intranasal administration (Howard, K A. et al., (2006) Mol. Ther. 14:476-484; Zhang, X. et al., (2004) J Biol. Chem. 279:10677-10684; Bitko, V. et al., (2005) Nat. Med. 11:50-55). For administering an iRNA systemically for the treatment of a disease, the RNA can be modified or alternatively delivered using a drug delivery system; both methods act to prevent the rapid degradation of the dsRNA by endo- and exo-nucleases in vivo. Modification of the RNA or the pharmaceutical carrier can also permit targeting of the iRNA composition to the target tissue and avoid undesirable off-target effects. iRNA molecules can be modified by chemical conjugation to lipophilic groups such as cholesterol to enhance cellular uptake and prevent degradation. For example, an iRNA directed against ApoB conjugated to a lipophilic cholesterol moiety was injected systemically into mice and resulted in knockdown of apoB mRNA in both the liver and jejunum (Soutschek, J. et al., (2004) Nature 432:173-178). Conjugation of an iRNA to an aptamer has been shown to inhibit tumor growth and mediate tumor regression in a mouse model of prostate cancer (McNamara, J O. et al., (2006) Nat. Biotechnol. 24:1005-1015). In an alternative embodiment, the iRNA can be delivered using drug delivery systems such as a nanoparticle, a dendrimer, a polymer, liposomes, or a cationic delivery system. Positively charged cationic delivery systems facilitate binding of an iRNA molecule (negatively charged) and also enhance interactions at the negatively charged cell membrane to permit efficient uptake of an iRNA by the cell. Cationic lipids, dendrimers, or polymers can either be bound to an iRNA, or induced to form a vesicle or micelle (see e.g., Kim SH. et al., (2008) Journal of Controlled Release 129(2):107-116) that encases an iRNA. The formation of vesicles or micelles further prevents degradation of the iRNA when administered systemically. Methods for making and administering cationic- iRNA complexes are well within the abilities of one skilled in the art (see e.g., Sorensen, D R., et al. (2003) J. Mol. Biol 327:761-766; Verma, U N. et al., (2003) Clin. Cancer Res. 9:1291-1300; Arnold, A S et al., (2007) J Hypertens. 25:197-205, which are incorporated herein by reference in their entirety). Some non-limiting examples of drug delivery systems useful for systemic delivery of iRNAs include DOTAP (Sorensen, D R., et al (2003), supra; Verma, U N. et al., (2003), supra), Oligofectamine, “solid nucleic acid lipid particles” (Zimmermann, T S. et al., (2006) Nature 441:111-114), cardiolipin (Chien, P Y. et al., (2005) Cancer Gene Ther. 12:321-328; Pal, A. et al., (2005) Int J. Oncol. 26:1087-1091), polyethyleneimine (Bonnet ME. et al., (2008) Pharm. Res. Aug 16 Epub ahead of print; Aigner, A. (2006) J. Biomed. Biotechnol. 71659), Arg-Gly-Asp (RGD) peptides (Liu, S. (2006) Mol. Pharm. 3:472-487), and polyamidoamines (Tomalia, D A. et al., (2007) Biochem. Soc. Trans. 35:61-67; Yoo, H. et al., (1999) Pharm. Res. 16:1799-1804). In some embodiments, an iRNA forms a complex with cyclodextrin for systemic administration. Methods for administration and pharmaceutical compositions of iRNAs and cyclodextrins can be found in U.S. Patent No. 7, 427, 605, which is herein incorporated by reference in its entirety.

A. Vector encoded iRNAs of the Invention

[0705] iRNA targeting the PLG gene can be expressed from transcription units inserted into DNA or RNA vectors (see, e.g., Couture, A, et al., TIG. (1996), 12:5-10; Skillern, A., et al., International PCT Publication No. WO 00/22113, Conrad, International PCT Publication No. WO 00/22114, and Conrad, U.S. Pat. No. 6,054,299). Expression can be transient (on the order of hours to weeks) or sustained (weeks to months or longer), depending upon the specific construct used and the target tissue or cell type. These transgenes can be introduced as a linear construct, a circular plasmid, or a viral vector, which can be an integrating or non-integrating vector. The transgene can also be constructed to permit it to be inherited as an extrachromosomal plasmid (Gassmann, et al., (1995) Proc. Natl. Acad. Sci. USA 92:1292).

[0706] The individual strand or strands of an iRNA can be transcribed from a promoter on an expression vector. Where two separate strands are to be expressed to generate, for example, a dsRNA, two separate expression vectors can be co-introduced (e.g., by transfection or infection) into a target cell. Alternatively, each individual strand of a dsRNA can be transcribed by promoters both of which are located on the same expression plasmid. In one embodiment, a dsRNA is expressed as inverted repeat polynucleotides joined by a linker polynucleotide sequence such that the dsRNA has a stem and loop structure. iRNA expression vectors are generally DNA plasmids or viral vectors. Expression vectors compatible with eukaryotic cells, preferably those compatible with vertebrate cells, can be used to produce recombinant constructs for the expression of an iRNA as described herein. Eukaryotic cell expression vectors are well known in the art and are available from a number of commercial sources. Typically, such vectors are provided containing convenient restriction sites for insertion of the desired nucleic acid segment. Delivery of iRNA expressing vectors can be systemic, such as by intravenous or intramuscular administration, by administration to target cells ex-planted from the patient followed by reintroduction into the patient, or by any other means that allows for introduction into a desired target cell.

[0707] Viral vector systems which can be utilized with the methods and compositions described herein include, but are not limited to, (a) adenovirus vectors; (b) retrovirus vectors, including but not limited to lentiviral vectors, moloney murine leukemia virus, etc.; (c) adeno- associated virus vectors; (d) herpes simplex virus vectors; (e) SV 40 vectors; (f) polyoma virus vectors; (g) papilloma virus vectors; (h) picornavirus vectors; (i) pox virus vectors such as an orthopox, e.g., vaccinia virus vectors or avipox, e.g. canary pox or fowl pox; and (j) a helper-dependent or gutless adenovirus. Replication-defective viruses can also be advantageous. Different vectors will or will not become incorporated into the cells' genome. The constructs can include viral sequences for transfection, if desired. Alternatively, the construct can be incorporated into vectors capable of episomal replication, e.g. EPV and EBV vectors. Constructs for the recombinant expression of an iRNA will generally require regulatory elements, e.g., promoters, enhancers, etc., to ensure the expression of the iRNA in target cells. Other aspects to consider for vectors and constructs are known in the art.

### VI. Pharmaceutical Compositions of the Invention

[0708] The present invention also includes pharmaceutical compositions and formulations which include the iRNAs of the invention. Accordingly, in one embodiment, provided herein are pharmaceutical compositions comprising a double stranded ribonucleic acid (dsRNA) agent that inhibits expression of plasminogen (PLG) in a cell, such as a liver cell, wherein the dsRNA agent comprises a sense strand and an antisense strand, wherein the sense strand comprises at least 15 contiguous nucleotides differing by no more than 1, 2, or 3 nucleotides from the nucleotide sequence of SEQ ID NO: 1 or 3, and said antisense strand comprises at least 15 contiguous nucleotides differing by no more than 1, 2, or 3 nucleotides from the nucleotide sequence of SEQ ID NO: 2 or 4; and a pharmaceutically acceptable carrier. In some embodiments, the dsRNA agent comprises a sense strand and an antisense strand, wherein the sense strand comprises at least 15 contiguous nucleotides from the nucleotide sequence of SEQ ID NO: 1 or 3, and said antisense strand comprises at least 15 contiguous nucleotides from the nucleotide sequence of SEQ ID NO: 2 or 4. In another embodiment, provided herein are pharmaceutical compositions comprising a dsRNA agent that inhibits expression of PLG in a cell, such as a liver cell, wherein the dsRNA agent comprises a sense strand and an antisense strand, the antisense strand comprising a region of complementarity which comprises at least 15 contiguous nucleotides differing by no more than 1, 2, or 3 nucleotides from any one of the antisense sequences listed in any one of Tables 3, 4, 5, 6, 7, 8A, or 8B; and a pharmaceutically acceptable carrier. In some embodiments, the dsRNA agent comprises a sense strand and an antisense strand, the antisense strand comprising a region of complementarity which comprises at least 15 contiguous nucleotides from any one of the antisense sequences listed in any one of Tables 3, 4, 5, 6, 7, 8A, or 8B.

[0709] The pharmaceutical compositions containing the iRNA of the invention are useful for treating a disease or disorder associated with the expression or activity of a PLG gene, e.g., a bleeding disorder.

[0710] Such pharmaceutical compositions are formulated based on the mode of delivery. One example is compositions that are formulated for systemic administration via parenteral delivery, e.g., by intravenous (IV), intramuscular (IM) or for subcutaneous delivery. Another example is compositions that are formulated for direct delivery into the liver, e.g., by infusion into the liver, such as by continuous pump infusion. The pharmaceutical compositions of the invention may be administered in dosages sufficient to inhibit expression of a PLG gene. In general, a suitable dose of an iRNA of the invention will be in the range of about 0.001 to about 200.0 milligrams per kilogram body weight of the recipient per day, generally in the range of about 1 to 50 mg per kilogram body weight per day. Typically, a suitable dose of an iRNA of the invention will be in the range of about 0.1 mg/kg to about 5.0 mg/kg, preferably about 0.3 mg/kg and about 3.0 mg/kg.

[0711] A repeat-dose regimen may include administration of a therapeutic amount of iRNA on a regular basis, such as every other day to once a year. In certain embodiments, the iRNA is administered about once per week, once every 7-10 days, once every 2 weeks, once every 3 weeks, once every 4 weeks, once every 5 weeks, once every 6 weeks, once every 7 weeks, once every 8 weeks, once every 9 weeks, once every 10 weeks, once every 11 weeks, once every 12 weeks, once per month, once every 2 months, once every 3 months (once per quarter), once every 4 months, once every 5 months, or once every 6 months.

[0712] After an initial treatment regimen, the treatments can be administered on a less frequent basis.

[0713] The skilled artisan will appreciate that certain factors can influence the dosage and timing required to effectively treat a subject, including but not limited to the severity of the disease or disorder, previous treatments, the general health and/or age of the subject, and other diseases present. Moreover, treatment of a subject with a therapeutically effective amount of a composition can include a single treatment or a series of treatments. Estimates of effective dosages and in vivo half-lives for the individual iRNAs encompassed by the invention can be made using conventional methodologies or on the basis of in vivo testing using an appropriate animal model, as described elsewhere herein.

[0714] Advances in mouse genetics have generated a number of mouse models for the study of various human diseases, such as a PLG-associated disease, disorder, or condition that would benefit from reduction in the expression of PLG. Such models can be used for in vivo testing of iRNA, as well as for determining a therapeutically effective dose. Such models can be used for in vivo testing of iRNA, as well as for determining a therapeutically effective dose. Suitable mouse models are known in the art and include, for example, mouse thrombosis models, mouse stroke models, hemophilia A mouse models (FVIII deficient mice). Non-limiting examples of such models for in vivo testing of iRNA include Strilchuk et al., Int. Society on Throm. and Haemost. abstract 2021; Batty, et al., Int. Society on Throm. and Haemost. abstract 2021; and Singh et al., 2016. J. Thromb. Haemost. 14(9): 1822-32.

[0715] The pharmaceutical compositions of the present invention can be administered in a number of ways depending upon whether local or systemic treatment is desired and upon the area to be treated. Administration can be topical (e.g., by a transdermal patch), pulmonary, e.g., by inhalation or insufflation of powders or aerosols, including by nebulizer; intratracheal, intranasal, epidermal and transdermal, oral or parenteral.

[0716] Parenteral administration includes intravenous, intraarterial, subcutaneous, intraperitoneal or intramuscular injection or infusion; subdermal, e.g., via an implanted device; or intracranial, e.g., by intraparenchymal, intrathecal or intraventricular, administration.

[0717] The iRNA can be delivered in a manner to target a particular cell or tissue, such as the liver (e.g., the hepatocytes of the liver).

[0718] In some embodiments, the pharmaceutical compositions of the invention are suitable for intramuscular administration to a subject. In other embodiments, the pharmaceutical compositions of the invention are suitable for intravenous administration to a subject. In some embodiments of the invention, the pharmaceutical compositions of the invention are suitable for subcutaneous administration to a subject, e.g., using a 29g or 30g needle.

[0719] The pharmaceutical compositions of the invention may include an RNAi agent of the invention in an unbuffered solution, such as saline or water, or in a buffer solution, such as a buffer solution comprising acetate, citrate, prolamine, carbonate, or phosphate or any combination thereof.

[0720] In one embodiment, the pharmaceutical compositions of the invention, e.g., such as the compositions suitable for subcutaneous administration, comprise an RNAi agent of the invention in phosphate buffered saline (PBS). Suitable concentrations of PBS include, for example, 1 mM, 1.5 mM, 2 mM, 2.5 mM, 3 mM, 3.5 mM, 4 mM, 4.5 mM, 5 mM, 6.5 mM, 7 mM, 7.5.mM, 9 mM, 8.5 mM, 9 mM, 9.5 mM, or about 10 mM PBS. In one embodiment of the invention, a pharmaceutical composition of the invention comprises an RNAi agent of the invention dissolved in a solution of about 5 mM PBS (e.g., 0.64 mM NaH₂PO₄, 4.36 mM Na₂HPO₄, 85 mM NaCl).

[0721] Values intermediate to the above recited ranges and values are also intended to be part of this invention. In addition, ranges of values using a combination of any of the above recited values as upper and/or lower limits are intended to be included.

[0722] The pH of the pharmaceutical compositions of the invention may be between about 5.0 to about 8.0, about 5.5 to about 8.0, about 6.0 to about 8.0, about 6.5 to about 8.0, about 7.0 to about 8.0, about 5.0 to about 7.5, about 5.5 to about 7.5, about 6.0 to about 7.5, about 6.5 to about 7.5, about 5.0 to about 7.2, about 5.25 to about 7.2, about 5.5 to about 7.2, about 5.75 to about 7.2, about 6.0 to about 7.2, about 6.5 to about 7.2, or about 6.8 to about 7.2. Ranges and values intermediate to the above recited ranges and values are also intended to be part of this invention.

[0723] The osmolality of the pharmaceutical compositions of the invention may be suitable for subcutaneous administration, such as no more than about 400 mOsm/kg, e.g., between 50 and 400 mOsm/kg, between 75 and 400 mOsm/kg, between 100 and 400 mOsm/kg, between 125 and 400 mOsm/kg, between 150 and 400 mOsm/kg, between 175 and 400 mOsm/kg, between 200 and 400 mOsm/kg, between 250 and 400 mOsm/kg, between 300 and 400 mOsm/kg, between 50 and 375 mOsm/kg, between 75 and 375 mOsm/kg, between 100 and 375 mOsm/kg, between 125 and 375 mOsm/kg, between 150 and 375 mOsm/kg, between 175 and 375 mOsm/kg, between 200 and 375 mOsm/kg, between 250 and 375 mOsm/kg, between 300 and 375 mOsm/kg, between 50 and 350 mOsm/kg, between 75 and 350 mOsm/kg, between 100 and 350 mOsm/kg, between 125 and 350 mOsm/kg, between 150 and 350 mOsm/kg, between 175 and 350 mOsm/kg, between 200 and 350 mOsm/kg, between 250 and 350 mOsm/kg, between 50 and 325 mOsm/kg, between 75 and 325 mOsm/kg, between 100 and 325 mOsm/kg, between 125 and 325 mOsm/kg, between 150 and 325 mOsm/kg, between 175 and 325 mOsm/kg, between 200 and 325 mOsm/kg, between 250 and 325 mOsm/kg, between 300 and 325 mOsm/kg, between 300 and 350 mOsm/kg, between 50 and 300 mOsm/kg, between 75 and 300 mOsm/kg, between 100 and 300 mOsm/kg, between 125 and 300 mOsm/kg, between 150 and 300 mOsm/kg, between 175 and 300 mOsm/kg, between 200 and 300 mOsm/kg, between 250 and 300, between 50 and 250 mOsm/kg, between 75 and 250 mOsm/kg, between 100 and 250 mOsm/kg, between 125 and 250 mOsm/kg, between 150 and 250 mOsm/kg, between 175 and 350 mOsm/kg, between 200 and 250 mOsm/kg, e.g., about 50, 55, 60, 65, 70, 75, 80, 85, 90, 95, 100, 105, 110, 120, 125, 130, 135, 140, 145, 150, 155, 160, 165, 170, 175, 180, 185, 190, 195, 200, 205, 210, 215, 220, 225, 230, 235, 240, 245, 250, 255, 260, 265, 270, 275, 280, 285, 295, 300, 305, 310, 320, 325, 330, 335, 340, 345, 350, 355, 360, 365, 370, 375, 380, 385, 390, 395, or about 400 mOsm/kg. Ranges and values intermediate to the above recited ranges and values are also intended to be part of this invention.

[0724] The pharmaceutical compositions of the invention comprising the RNAi agents of the invention, may be present in a vial that contains about 0.5, 0.6, 0.7, 0.8, 0.9, 1.0, 1.1, 1.2, 1.3, 1.4, 1.5, 1.6, 1.7, 1.8, 1.9, or about 2.0 mL of the pharmaceutical composition. The concentration of the RNAi agents in the pharmaceutical compositions of the invention may be about 10, 15, 20, 25, 30, 35, 40, 45, 50, 55, 60, 65, 70, 75, 80, 85, 90, 95, 100, 105, 110, 115, 130, 125, 130, 135, 140, 145, 150, 175, 180, 185, 190, 195, 200, 205, 210, 215, 230, 225, 230, 235, 240, 245, 250, 275, 280, 285, 290, 295, 300, 305, 310, 315, 330, 325, 330, 335, 340, 345, 350, 375, 380, 385, 390, 395, 400, 405, 410, 415, 430, 425, 430, 435, 440, 445, 450, 475, 480, 485, 490, 495, or about 500 mg/mL. In one embodiment, the concentration of the RNAi agents in the pharmaceutical compositions of the invention is about 100 mg/mL. Values intermediate to the above recited ranges and values are also intended to be part of this invention.

[0725] The pharmaceutical compositions of the invention may comprise a dsRNA agent of the invention in a free acid form. In other embodiments of the invention, the pharmaceutical compositions of the invention may comprise a dsRNA agent of the invention in a salt form, such as a sodium salt form. In certain embodiments, when the dsRNA agents of the invention are in the sodium salt form, sodium ions are present in the agent as counterions for substantially all of the phosphodiester and/or phosphorothiotate groups present in the agent. Agents in which substantially all of the phosphodiester and/or phosphorothioate linkages have a sodium counterion include not more than 5, 4, 3, 2, or 1 phosphodiester and/or phosphorothioate linkages without a sodium counterion. In some embodiments, when the dsRNA agents of the invention are in the sodium salt form, sodium ions are present in the agent as counterions for all of the phosphodiester and/or phosphorothiotate groups present in the agent.

[0726] Pharmaceutical compositions and formulations for topical administration can include transdermal patches, ointments, lotions, creams, gels, drops, suppositories, sprays, liquids and powders. Conventional pharmaceutical carriers, aqueous, powder or oily bases, thickeners and the like can be necessary or desirable. Coated condoms, gloves and the like can also be useful. Suitable topical formulations include those in which the iRNAs featured in the invention are in admixture with a topical delivery agent such as lipids, liposomes, fatty acids, fatty acid esters, steroids, chelating agents and surfactants. Suitable lipids and liposomes include neutral (e.g., dioleoylphosphatidyl DOPE ethanolamine, dimyristoylphosphatidyl choline DMPC, distearolyphosphatidyl choline) negative (e.g., dimyristoylphosphatidyl glycerol DMPG) and cationic (e.g., dioleoyltetramethylaminopropyl DOTAP and dioleoylphosphatidyl ethanolamine DOTMA). iRNAs featured in the invention can be encapsulated within liposomes or can form complexes thereto, in particular to cationic liposomes. Alternatively, iRNAs can be complexed to lipids, in particular to cationic lipids. Suitable fatty acids and esters include but are not limited to arachidonic acid, oleic acid, eicosanoic acid, lauric acid, caprylic acid, capric acid, myristic acid, palmitic acid, stearic acid, linoleic acid, linolenic acid, dicaprate, tricaprate, monoolein, dilaurin, glyceryl 1-monocaprate, 1-dodecylazacycloheptan-2-one, an acylcarnitine, an acylcholine, or a C₁₋₂₀ alkyl ester (e.g., isopropylmyristate IPM), monoglyceride, diglyceride or pharmaceutically acceptable salt thereof Topical formulations are described in detail in U.S. Pat. No. 6,747,014, which is incorporated herein by reference.

A. iRNA Formulations Comprising Membranous Molecular Assemblies

[0727] An iRNA for use in the compositions and methods of the invention can be formulated for delivery in a membranous molecular assembly, e.g., a liposome or a micelle. There are many organized surfactant structures besides microemulsions that have been studied and used for the formulation of drugs. These include monolayers, micelles, bilayers and vesicles. Vesicles, such as liposomes, have attracted great interest because of their specificity and the duration of action they offer from the standpoint of drug delivery. As used in the present invention, the term “liposome” means a vesicle composed of amphiphilic lipids arranged in a spherical bilayer or bilayers.

[0728] Liposomes include unilamellar or multilamellar vesicles which have a membrane formed from a lipophilic material and an aqueous interior. The aqueous portion contains the composition (e.g., iRNA) to be delivered. The lipophilic material isolates the aqueous interior from an aqueous exterior, which typically does not include the iRNA composition, although in some examples, it may. Cationic liposomes possess the advantage of being able to fuse to the cell wall. Non-cationic liposomes, although not able to fuse as efficiently with the cell wall, are taken up by macrophages in vivo.

[0729] In order to traverse intact mammalian skin, lipid vesicles must pass through a series of fine pores, each with a diameter less than 50 nm, under the influence of a suitable transdermal gradient. Therefore, it is desirable to use a liposome which is highly deformable and able to pass through such fine pores.

[0730] Liposomes are useful for the transfer and delivery of active ingredients to the site of action. Because the liposomal membrane is structurally similar to biological membranes, when liposomes are applied to a tissue, the liposomes start to merge with the cellular membranes and as the merging of the liposome and cell progresses, the liposomal contents are emptied into the cell where the active agent may act.

[0731] Liposomal formulations have been the focus of extensive investigation as the mode of delivery for many drugs. There is growing evidence that for topical administration, liposomes present several advantages over other formulations. Such advantages include reduced side-effects related to high systemic absorption of the administered drug, increased accumulation of the administered drug at the desired target, and the ability to administer a wide variety of drugs, both hydrophilic and hydrophobic, into the skin.

[0732] Several reports have detailed the ability of liposomes to deliver agents including high-molecular weight DNA into the skin. Compounds including analgesics, antibodies, hormones and high-molecular weight DNAs have been administered to the skin. The majority of applications resulted in the targeting of the upper epidermis.

[0733] A liposome containing an iRNA agent can be prepared by a variety of methods. In one example, the lipid component of a liposome is dissolved in a detergent so that micelles are formed with the lipid component. For example, the lipid component can be an amphipathic cationic lipid or lipid conjugate. The detergent can have a high critical micelle concentration and may be nonionic. Exemplary detergents include cholate, CHAPS, octylglucoside, deoxycholate, and lauroyl sarcosine. The iRNA agent preparation is then added to the micelles that include the lipid component. The cationic groups on the lipid interact with the iRNA agent and condense around the iRNA agent to form a liposome. After condensation, the detergent is removed, e.g., by dialysis, to yield a liposomal preparation of iRNA agent.

[0734] If necessary a carrier compound that assists in condensation can be added during the condensation 30 reaction, e.g., by controlled addition. For example, the carrier compound can be a polymer other than a nucleic acid (e.g., spermine or spermidine). pH can also be adjusted to favor condensation.

[0735] Methods for producing stable polynucleotide delivery vehicles, which incorporate a polynucleotide/cationic lipid complex as structural components of the delivery vehicle, are further described in, e.g., WO 96/37194, the entire contents of which are incorporated herein by reference. Liposome formation can also include one or more aspects of exemplary methods described in Felgner, P. L. et al., Proc. Natl. Acad. Sci., USA 8:7413-7417, 1987; U.S. Pat. Nos. 4,897,355; 5,171,678; Bangham, et al. M. Mol. Biol.23:238, 1965; Olson, et al. Biochim. Biophys. Acta 557:9, 1979; Szoka, et al. Proc. Natl. Acad. Sci.75: 4194, 1978; Mayhew, et al. Biochim. Biophys. Acta 775:169, 1984; Kim, et al. Biochim. Biophys. Acta 728:339, 1983; and Fukunaga, et al. Endocrinol. 115:757, 1984. Commonly used techniques for preparing lipid aggregates of appropriate size for use as delivery vehicles include sonication and freeze-thaw plus extrusion (see, e.g., Mayer, et al. Biochim. Biophys. Acta 858:161, 1986). Microfluidization can be used when consistently small (50 to 200 nm) and relatively uniform aggregates are desired (Mayhew, et al. Biochim. Biophys. Acta 775:169, 1984). These methods are readily adapted to packaging iRNA agent preparations into liposomes.

[0736] Liposomes fall into two broad classes. Cationic liposomes are positively charged liposomes which interact with the negatively charged DNA molecules to form a stable complex. The positively charged DNA/liposome complex binds to the negatively charged cell surface and is internalized in an endosome. Due to the acidic pH within the endosome, the liposomes are ruptured, releasing their contents into the cell cytoplasm (Wang et al., Biochem. Biophys. Res. Commun., 1987, 147, 980-985).

[0737] Liposomes which are pH-sensitive or negatively-charged, entrap DNA rather than complex with it. Since both the DNA and the lipid are similarly charged, repulsion rather than complex formation occurs. Nevertheless, some DNA is entrapped within the aqueous interior of these liposomes. pH-sensitive liposomes have been used to deliver DNA encoding the thymidine kinase gene to cell monolayers in culture. Expression of the exogenous gene was detected in the target cells (Zhou et al., Journal of Controlled Release, 1992, 19, 269-274).

[0738] One major type of liposomal composition includes phospholipids other than naturally-derived phosphatidylcholine. Neutral liposome compositions, for example, can be formed from dimyristoyl phosphatidylcholine (DMPC) or dipalmitoyl phosphatidylcholine (DPPC). Anionic liposome compositions generally are formed from dimyristoyl phosphatidylglycerol, while anionic fusogenic liposomes are formed primarily from dioleoyl phosphatidylethanolamine (DOPE). Another type of liposomal composition is formed from phosphatidylcholine (PC) such as, for example, soybean PC, and egg PC. Another type is formed from mixtures of phospholipid and/or phosphatidylcholine and/or cholesterol.

[0739] Examples of other methods to introduce liposomes into cells in vitro and in vivo include US 30 Patent Nos.5,283,185 and 5,171,678; WO 94/00569; WO 93/24640; WO 91/16024; Felgner, J. Biol. Chem.269:2550, 1994; Nabel, Proc. Natl. Acad. Sci.90:11307, 1993; Nabel, Human Gene Ther. 3:649, 1992; Gershon, Biochem.32:7143, 1993; and Strauss EMBO 1.11:417, 1992.

[0740] Non-ionic liposomal systems have also been examined to determine their utility in the delivery of drugs to the skin, in particular systems comprising non-ionic surfactant and cholesterol. Non-ionic liposomal formulations comprising Novasome™ I (glyceryl dilaurate/cholesterol/polyoxyethylene-10-stearyl ether) and Novasome™ II (glyceryl distearate/cholesterol/polyoxyethylene-10-stearyl ether) were used to deliver cyclosporin-A into the dernmis of mouse skin. Results indicated that such non-ionic liposomal systems were effective in facilitating the deposition of cyclosporin-A into different layers of the skin (Hu et al. S.T.P. Pharma. Sci., 1994, 4, 6, 466).

[0741] Liposomes also include “sterically stabilized” liposomes, a term which, as used herein, refers to liposomes comprising one or more specialized lipids that, when incorporated into liposomes, result in enhanced circulation lifetimes relative to liposomes lacking such specialized lipids. Examples of sterically stabilized liposomes are those in which part of the vesicle-forming lipid portion of the liposome (A) comprises one or more glycolipids, such as monosialoganglioside G_{M1}, or (B) is derivatized with one or more hydrophilic polymers, such as a polyethylene glycol (PEG) moiety. While not wishing to be bound by any particular theory, it is thought in the art that, at least for sterically stabilized liposomes containing gangliosides, sphingomyelin, or PEG-derivatized lipids, the enhanced circulation half-life of these sterically stabilized liposomes derives from a reduced uptake into cells of the reticuloendothelial system (RES) (Allen et al., FEBSLetters, 1987, 223, 42; Wu et al., Cancer Research, 1993, 53, 3765).

[0742] Various liposomes comprising one or more glycolipids are known in the art. Papahadjopoulos et al. (Ann. N. Y. Acad. Sci., 1987, 507, 64) reported the ability ofmonosialoganglioside G_{M}1, galactocerebroside sulfate and phosphatidylinositol to improve blood half-lives of liposomes. These findings were expounded upon by Gabizon et al. (Proc. Nat!. Acad. Sci. U.S.A., 1988, 85, 6949). U.S. Pat. No. 4,837,028 and WO 88/04924, both to Allen et al., disclose liposomes comprising (1) sphingomyelin and (2) the ganglioside G_{M}1 or a galactocerebroside sulfate ester. U.S. Pat. No. 5,543,152 (Webb et al.) discloses liposomes comprising sphingomyelin. Liposomes comprising 1,2-sn-dimyristoylphosphatidylcholine are disclosed in WO 97/13499 (Lim et al).

[0743] In some embodiments, cationic liposomes are used. Cationic liposomes possess the advantage of being able to fuse to the cell membrane. Non-cationic liposomes, although not able to fuse as efficiently with the plasma membrane, are taken up by macrophages in vivo and can be used to deliver iRNA agents to macrophages.

[0744] Further advantages of liposomes include: liposomes obtained from natural phospholipids are biocompatible and biodegradable; liposomes can incorporate a wide range of water and lipid soluble drugs; liposomes can protect encapsulated iRNAs in their internal compartments from metabolism and degradation (Rosoff, in “Pharmaceutical Dosage Forms,” Lieberman, Rieger and Banker (Eds.), 1988, volume 1, p.245). Important considerations in the preparation of liposome formulations are the lipid surface charge, vesicle size, and the aqueous volume of the liposomes.

[0745] A positively charged synthetic cationic lipid, N-[1-(2,3-dioleyloxy)propyl]-N,N,N-trimethylammonium chloride (DOTMA) can be used to form small liposomes that interact spontaneously with nucleic acid to form lipid-nucleic acid complexes which are capable of fusing with the negatively charged lipids of the cell membranes of tissue culture cells, resulting in delivery of iRNA agent (see, e.g., Felgner, P. L. et al., Proc. Natl. Acad. Sci., USA 8:7413-7417, 1987 and U.S. Pat. No. 4,897,355 for a description of DOTMA and its use with DNA).

[0746] A DOTMA analogue, 1,2-bis(oleoyloxy)-3-(trimethylammonia)propane (DOTAP) can be used in combination with a phospholipid to form DNA-complexing vesicles. Lipofectin™ (Bethesda Research Laboratories, Gaithersburg, Md.) is an effective agent for the delivery of highly anionic nucleic acids into living tissue culture cells that comprise positively charged DOTMA liposomes which interact spontaneously with negatively charged polynucleotides to form complexes. When enough positively charged liposomes are used, the net charge on the resulting complexes is also positive. Positively charged complexes prepared in this way spontaneously attach to negatively charged cell surfaces, fuse with the plasma membrane, and efficiently deliver functional nucleic acids into, for example, tissue culture cells.

[0747] Another commercially available cationic lipid, 1,2- bis(oleoyloxy)-3,3-(trimethylammonia)propane (“DOTAP”) (Boehringer Mannheim, Indianapolis, Indiana) differs from DOTMA in that the oleoyl moieties are linked by ester, rather than ether linkages.

[0748] Other reported cationic lipid compounds include those that have been conjugated to a variety of moieties including, for example, carboxyspermine which has been conjugated to one of two types of lipids and includes compounds such as 5-carboxyspermylglycine dioctaoleoylamide (“DOGS”) (Transfectam™, Promega, Madison, Wisconsin) and dipalmitoylphosphatidylethanolamine 5-carboxyspermyl-amide (“DPPES”) (see, e.g., U.S. Pat. No. 5,171,678).

[0749] Another cationic lipid conjugate includes derivatization of the lipid with cholesterol (“DC- Chol”) which has been formulated into liposomes in combination with DOPE (See, Gao, X. and Huang, L., Biochim. Biophys. Res. Commun.179:280, 1991). Lipopolylysine, made by conjugating polylysine to DOPE, has been reported to be effective for transfection in the presence of serum (Zhou, X. et al., Biochim. Biophys. Acta 1065:8, 1991). For certain cell lines, these liposomes containing conjugated cationic lipids, are said to exhibit lower toxicity and provide more efficient transfection than the DOTMA-containing compositions. Other commercially available cationic lipid products include DMRIE and DMRIE-HP (Vical, La Jolla, California) and Lipofectamine (DOSPA) (Life Technology, Inc., Gaithersburg, Maryland). Other cationic lipids suitable for the delivery of oligonucleotides are described in WO 98/39359 and WO 96/37194.

[0750] Liposomal formulations are particularly suited for topical administration; liposomes present several advantages over other formulations. Such advantages include reduced side effects related to high systemic absorption of the administered drug, increased accumulation of the administered drug at the desired target, and the ability to administer iRNA agent into the skin. In some implementations, liposomes are used for delivering iRNA agent to epidermal cells and also to enhance the penetration of iRNA agent into dermal tissues, e.g., into skin. For example, the liposomes can be applied topically. Topical delivery of drugs formulated as liposomes to the skin has been documented (see, e.g., Weiner et al., Journal of Drug Targeting, 1992, vol. 2,405-410 and du Plessis et al., Antiviral Research, 18, 1992, 259-265; Mannino, R. J. and Fould-Fogerite, S., Biotechniques 6:682-690, 1988; Itani, T. et al. Gene 56:267-276.1987; Nicolau, C. et al. Meth. Enz.149:157-176, 1987; Straubinger, R. M. and Papahadjopoulos, D. Meth. Enz.101:512-527, 1983; Wang, C. Y. and Huang, L., Proc. Natl. Acad. Sci. USA 84:7851-7855, 1987).

[0751] Non-ionic liposomal systems have also been examined to determine their utility in the delivery of drugs to the skin, in particular systems comprising non-ionic surfactant and cholesterol. Non-ionic liposomal formulations comprising Novasome™ I (glyceryl dilaurate/cholesterol/polyoxyethylene-10-stearyl ether) and Novasome™ II (glyceryl distearate/cholesterol/polyoxyethylene-10-stearyl ether) were used to deliver a drug into the dermis of mouse skin. Such formulations with iRNA agent are useful for treating a dermatological disorder.

[0752] Liposomes that include iRNA can be made highly deformable. Such deformability can enable the liposomes to penetrate through pore that are smaller than the average radius of the liposome. For example, transfersomes are a type of deformable liposomes. Transferosomes can be made by adding surface edge activators, usually surfactants, to a standard liposomal composition. Transfersomes that include iRNAs can be delivered, for example, subcutaneously by infection in order to deliver iRNAs to keratinocytes in the skin. In order to cross intact mammalian skin, lipid vesicles must pass through a series of fine pores, each with a diameter less than 50 nm, under the influence of a suitable transdermal gradient. In addition, due to the lipid properties, these transferosomes can be self- optimizing (adaptive to the shape of pores, e.g., in the skin), self-repairing, and can frequently reach their targets without fragmenting, and often self-loading.

[0753] Other formulations amenable to the present invention are described in WO 2008/042973.

[0754] Transfersomes are yet another type of liposomes and are highly deformable lipid aggregates which are attractive candidates for drug delivery vehicles. Transfersomes may be described as lipid droplets which are so highly deformable that they are easily able to penetrate through pores which are smaller than the droplet. Transfersomes are adaptable to the environment in which they are used, e.g., they are self-optimizing (adaptive to the shape of pores in the skin), self-repairing, frequently reach their targets without fragmenting, and often self-loading. To make transfersomes it is possible to add surface edge-activators, usually surfactants, to a standard liposomal composition. Transfersomes have been used to deliver serum albumin to the skin. The transfersome-mediated delivery of serum albumin has been shown to be as effective as subcutaneous injection of a solution containing serum albumin.

[0755] Surfactants find wide application in formulations such as emulsions (including microemulsions) and liposomes. The most common way of classifying and ranking the properties of the many different types of surfactants, both natural and synthetic, is by the use of the hydrophile/lipophile balance (HLB). The nature of the hydrophilic group (also known as the “head”) provides the most useful means for categorizing the different surfactants used in formulations (Rieger, in Pharmaceutical Dosage Forms, Marcel Dekker, Inc., New York, N.Y., 1988, p. 285).

[0756] If the surfactant molecule is not ionized, it is classified as a nonionic surfactant. Nonionic surfactants find wide application in pharmaceutical and cosmetic products and are usable over a wide range of pH values. In general, their HLB values range from 2 to about 18 depending on their structure.

[0757] Nonionic surfactants include nonionic esters such as ethylene glycol esters, propylene glycol esters, glyceryl esters, polyglyceryl esters, sorbitan esters, sucrose esters, and ethoxylated esters. Nonionic alkanolamides and ethers such as fatty alcohol ethoxylates, propoxylated alcohols, and ethoxylated/propoxylated block polymers are also included in this class. The polyoxyethylene surfactants are the most popular members of the nonionic surfactant class.

[0758] If the surfactant molecule carries a negative charge when it is dissolved or dispersed in water, the surfactant is classified as anionic. Anionic surfactants include carboxylates such as soaps, acyl lactylates, acyl amides of amino acids, esters of sulfuric acid such as alkyl sulfates and ethoxylated alkyl sulfates, sulfonates such as alkyl benzene sulfonates, acyl isethionates, acyl taurates and sulfosuccinates, and phosphates. The most important members of the anionic surfactant class are the alkyl sulfates and the soaps.

[0759] If the surfactant molecule carries a positive charge when it is dissolved or dispersed in water, the surfactant is classified as cationic. Cationic surfactants include quaternary ammonium salts and ethoxylated amines. The quaternary ammonium salts are the most used members of this class.

[0760] If the surfactant molecule has the ability to carry either a positive or negative charge, the surfactant is classified as amphoteric. Amphoteric surfactants include acrylic acid derivatives, substituted alkylamides, N-alkylbetaines and phosphatides.

[0761] The use of surfactants in drug products, formulations and in emulsions has been reviewed (Rieger, in Pharmaceutical Dosage Forms, Marcel Dekker, Inc., New York, N.Y., 1988, p. 285).

[0762] The iRNA for use in the methods of the invention can also be provided as micellar formulations. “Micelles” are defined herein as a particular type of molecular assembly in which amphipathic molecules are arranged in a spherical structure such that all the hydrophobic portions of the molecules are directed inward, leaving the hydrophilic portions in contact with the surrounding aqueous phase. The converse arrangement exists if the environment is hydrophobic.

[0763] A mixed micellar formulation suitable for delivery through transdermal membranes may be prepared by mixing an aqueous solution of iRNA, an alkali metal C₈ to C₂₂ alkyl sulphate, and a micelle forming compounds. Exemplary micelle forming compounds include lecithin, hyaluronic acid, pharmaceutically acceptable salts of hyaluronic acid, glycolic acid, lactic acid, chamomile extract, cucumber extract, oleic acid, linoleic acid, linolenic acid, monoolein, monooleates, monolaurates, borage oil, evening of primrose oil, menthol, trihydroxy oxo cholanyl glycine and pharmaceutically acceptable salts thereof, glycerin, polyglycerin, lysine, polylysine, triolein, polyoxyethylene ethers and analogues thereof, polidocanol alkyl ethers and analogues thereof, chenodeoxycholate, deoxycholate, and mixtures thereof. The micelle forming compounds may be added at the same time or after addition of the alkali metal alkyl sulphate. Mixed micelles will form with substantially any kind of mixing of the ingredients but vigorous mixing in order to provide smaller size micelles.

[0764] In one method a first micellar composition is prepared which contains the RNAi and at least the alkali metal alkyl sulphate. The first micellar composition is then mixed with at least three micelle forming compounds to form a mixed micellar composition. In another method, the micellar composition is prepared by mixing the RNAi, the alkali metal alkyl sulphate and at least one of the micelle forming compounds, followed by addition of the remaining micelle forming compounds, with vigorous mixing.

[0765] Phenol or m-cresol may be added to the mixed micellar composition to stabilize the formulation and protect against bacterial growth. Alternatively, phenol or m-cresol may be added with the micelle forming ingredients. An isotonic agent such as glycerin may also be added after formation of the mixed micellar composition.

[0766] For delivery of the micellar formulation as a spray, the formulation can be put into an aerosol dispenser and the dispenser is charged with a propellant. The propellant, which is under pressure, is in liquid form in the dispenser. The ratios of the ingredients are adjusted so that the aqueous and propellant phases become one, i.e., there is one phase. If there are two phases, it is necessary to shake the dispenser prior to dispensing a portion of the contents, e.g., through a metered valve. The dispensed dose of pharmaceutical agent is propelled from the metered valve in a fine spray.

[0767] Propellants may include hydrogen-containing chlorofluorocarbons, hydrogen-containing fluorocarbons, dimethyl ether and diethyl ether. In certain embodiments, HFA 134a (1,1,1,2 tetrafluoroethane) may be used.

[0768] The specific concentrations of the essential ingredients can be determined by relatively straightforward experimentation. For absorption through the oral cavities, it is often desirable to increase, e.g., at least double or triple, the dosage for through injection or administration through the gastrointestinal tract.

### B. Lipid Particles

[0769] iRNAs, e.g., dsRNA agents of in the invention may be fully encapsulated in a lipid formulation, e.g., an LNP, or other nucleic acid-lipid particle.

[0770] As used herein, the term “LNP” refers to a stable nucleic acid-lipid particle. LNPs typically contain a cationic lipid, a non-cationic lipid, and a lipid that prevents aggregation of the particle (e.g., a PEG-lipid conjugate). LNPs are extremely useful for systemic applications, as they exhibit extended circulation lifetimes following intravenous (i.v.) injection and accumulate at distal sites (e.g., sites physically separated from the administration site). As used herein, the term “SPLP” refers to a nucleic acid-lipid particle comprising plasmid DNA encapsulated within a lipid vesicle. LNPs include “pSPLP,” which include an encapsulated condensing agent-nucleic acid complex as set forth in PCT Publication No. WO 00/03683. The particles of the present invention typically have a mean diameter of about 50 nm to about 150 nm, more typically about 60 nm to about 130 nm, more typically about 70 nm to about 110 nm, most typically about 70 nm to about 90 nm, and are substantially nontoxic. In addition, the nucleic acids when present in the nucleic acid- lipid particles of the present invention are resistant in aqueous solution to degradation with a nuclease. Nucleic acid-lipid particles and their method of preparation are disclosed in, e.g., U.S. Pat. Nos. 5,976,567; 5,981,501; 6,534,484; 6,586,410; 6,815,432; and PCT Publication No. WO 96/40964.

[0771] In certain embodiments, the lipid to drug ratio (mass/mass ratio) (e.g., lipid to dsRNA ratio) will be in the range of from about 1:1 to about 50:1, from about 1:1 to about 25:1, from about 3:1 to about 15:1, from about 4:1 to about 10:1, from about 5:1 to about 9:1, or about 6:1 to about 9:1. Ranges intermediate to the above recited ranges are also contemplated to be part of the invention.

[0772] The cationic lipid may be, for example, N,N-dioleyl-N,N-dimethylammonium chloride (DODAC), N,N-distearyl-N,N-dimethylammonium bromide (DDAB), N-(I -(2,3- dioleoyloxy)propyl)-N,N,N-trimethylammonium chloride (DOTAP), N-(I -(2,3- dioleyloxy)propyl)-N,N,N-trimethylammonium chloride (DOTMA), N,N-dimethyl-2,3- dioleyloxy)propylamine (DODMA), 1,2-DiLinoleyloxy-N,N-dimethylaminopropane (DLinDMA), 1,2-Dilinolenyloxy-N,N-dimethylaminopropane (DLenDMA), 1,2-Dilinoleylcarbamoyloxy-3-dimethylaminopropane (DLin-C-DAP), 1,2-Dilinoleyoxy-3-(dimethylamino)acetoxypropane (DLin-DAC), 1,2-Dilinoleyoxy-3-morpholinopropane (DLin-MA), 1,2-Dilinoleoyl-3-dimethylaminopropane (DLinDAP), 1,2-Dilinoleylthio-3-dimethylaminopropane (DLin-S-DMA), 1-Linoleoyl-2-linoleyloxy-3-dimethylaminopropane (DLin-2-DMAP), 1,2-Dilinoleyloxy-3-trimethylaminopropane chloride salt (DLin-TMA.Cl), 1,2-Dilinoleoyl-3-trimethylaminopropane chloride salt (DLin-TAP.Cl), 1,2-Dilinoleyloxy-3-(N-methylpiperazino)propane (DLin-MPZ), or 3-(N,N-Dilinoleylamino)-1,2-propanediol (DLinAP), 3-(N,N-Dioleylamino)-1,2-propanedio (DOAP), 1,2-Dilinoleyloxo-3-(2-N,N-dimethylamino)ethoxypropane (DLin-EG-DMA), 1,2-Dilinolenyloxy-N,N-dimethylaminopropane (DLinDMA), 2,2-Dilinoleyl-4-dimethylaminomethyl-[1,3]-dioxolane (DLin-K-DMA) or analogs thereof, (3aR,5s,6aS)-N,N-dimethyl-2,2-di((9Z,12Z)-octadeca-9,12-dienyl)tetrahydro-3aH-cyclopenta[d][1,3]dioxol-5-amine (ALN100), (6Z,9Z,28Z,31Z)-heptatriaconta-6,9,28,31-tetraen-19-yl 4-(dimethylamino)butanoate (MC3), 1,1′-(2-(4-(2-((2-(bis(2-hydroxydodecyl)amino)ethyl)(2-hydroxydodecyl)amino)ethyl)piperazin-1-yl)ethylazanediyl)didodecan-2-ol (Tech G1), or a mixture thereof The cationic lipid may comprise from about 20 mol % to about 50 mol % or about 40 mol % of the total lipid present in the particle.

[0773] In certain embodiments, the compound 2,2-Dilinoleyl-4-dimethylaminoethyl-[1,3]-dioxolane can be used to prepare lipid-siRNA nanoparticles. Synthesis of 2,2-Dilinoleyl-4-dimethylaminoethyl-[1,3]-dioxolane is described in U.S. provisional patent application No. 61/107,998 filed on Oct. 23, 2008, which is herein incorporated by reference.

[0774] In certain embodiments, the lipid-siRNA particle includes 40% 2, 2-Dilinoleyl-4-dimethylaminoethyl-[1,3]-dioxolane: 10% DSPC: 40% Cholesterol: 10% PEG-C-DOMG (mole percent) with a particle size of 63.0±20 nm and a 0.027 siRNA/Lipid Ratio.

[0775] The non-cationic lipid may be an anionic lipid or a neutral lipid including, but not limited to, distearoylphosphatidylcholine (DSPC), dioleoylphosphatidylcholine (DOPC), dipalmitoylphosphatidylcholine (DPPC), dioleoylphosphatidylglycerol (DOPG), dipalmitoylphosphatidylglycerol (DPPG), dioleoyl-phosphatidylethanolamine (DOPE), palmitoyloleoylphosphatidylcholine (POPC), palmitoyloleoylphosphatidylethanolamine (POPE), dioleoyl- phosphatidylethanolamine 4-(N-maleimidomethyl)-cyclohexane-l- carboxylate (DOPE-mal), dipalmitoyl phosphatidyl ethanolamine (DPPE), dimyristoylphosphoethanolamine (DMPE), distearoyl-phosphatidyl-ethanolamine (DSPE), 16—O-monomethyl PE, 16—O-dimethyl PE, 18-1-trans PE, 1 -stearoyl-2-oleoyl- phosphatidyethanolamine (SOPE), cholesterol, or a mixture thereof. The non-cationic lipid may be from about 5 mol % to about 90 mol %, about 10 mol %, or about 58 mol % if cholesterol is included, of the total lipid present in the particle.

[0776] The conjugated lipid that inhibits aggregation of particles may be, for example, a polyethyleneglycol (PEG)-lipid including, without limitation, a PEG-diacylglycerol (DAG), a PEG-dialkyloxypropyl (DAA), a PEG-phospholipid, a PEG-ceramide (Cer), or a mixture thereof. The PEG-DAA conjugate may be, for example, a PEG-dilauryloxypropyl (Ci₂), a PEG-dimyristyloxypropyl (Ci₄), a PEG-dipalmityloxypropyl (Ci₆), or a PEG- distearyloxypropyl (C]₈). The conjugated lipid that prevents aggregation of particles may be from 0 mol % to about 20 mol % or about 2 mol % of the total lipid present in the particle.

[0777] In some embodiments, the nucleic acid-lipid particle further includes cholesterol at, e.g., about 10 mol % to about 60 mol % or about 48 mol % of the total lipid present in the particle.

### LNP01

[0778] In certain embodiments, the lipidoid ND98-4HC1 (MW 1487) (see U.S. patent application Ser. No. 12/056,230, filed Mar. 26, 2008, which is herein incorporated by reference), Cholesterol (Sigma-Aldrich), and PEG-Ceramide C16 (Avanti Polar Lipids) can be used to prepare lipid-dsRNA nanoparticles (e.g., LNPO1 particles). Stock solutions of each in ethanol can be prepared as follows: ND98, 133 mg/ml; Cholesterol, 25 mg/ml, PEG-Ceramide C16, 100 mg/ml. The ND98, Cholesterol, and PEG-Ceramide C16 stock solutions can then be combined in a, e.g., 42:48:10 molar ratio. The combined lipid solution can be mixed with aqueous dsRNA (e.g., in sodium acetate pH 5) such that the final ethanol concentration is about 35-45% and the final sodium acetate concentration is about 100-300 mM. Lipid-dsRNA nanoparticles typically form spontaneously upon mixing. Depending on the desired particle size distribution, the resultant nanoparticle mixture can be extruded through a polycarbonate membrane (e.g., 100 nm cut-off) using, for example, a thermobarrel extruder, such as Lipex Extruder (Northern Lipids, Inc). In some cases, the extrusion step can be omitted. Ethanol removal and simultaneous buffer exchange can be accomplished by, for example, dialysis or tangential flow filtration. Buffer can be exchanged with, for example, phosphate buffered saline (PBS) at about pH 7, e.g., about pH 6.9, about pH 7.0, about pH 7.1, about pH 7.2, about pH 7.3, or about pH 7.4.

[chemical structure]

[0779] LNPO1 formulations are described, e.g., in International Application Publication No. WO 2008/042973, which is hereby incorporated by reference.

[0780] Additional exemplary lipid-dsRNA formulations are provided in the following Table 1.

TABLE 1
Exemplary lipid formulations

| | | cationic lipid/non-cationic lipid/cholesterol/PEG- |
|---|---|---|
| | | lipid conjugate |
| | Cationic Lipid | Lipid:siRNA ratio |
| SNALP | 1,2-Dilinolenyloxy-N,N- | DLinDMA/DPPC/Cholesterol/PEG-cDMA |
| | dimethylaminopropane (DLinDMA) | (57.1/7.1/34.4/1.4) |
| | | lipid:siRNA ~ 7:1 |
| S-XTC | 2,2-Dilinoleyl-4-dimethylaminoethyl- | XTC/DPPC/Cholesterol/PEG-cDMA |
| | [1,3]-dioxolane (XTC) | 57.1/7.1/34.4/1.4 |
| | | lipid:siRNA ~ 7:1 |
| LNP05 | 2,2-Dilinoleyl-4-dimethylaminoethyl- | XTC/DSPC/Cholesterol/PEG-DMG |
| | [1,3]-dioxolane (XTC) | 57.5/7.5/31.5/3.5 |
| | | lipid:siRNA ~ 6:1 |
| LNP06 | 2,2-Dilinoleyl-4-dimethylaminoethyl- | XTC/DSPC/Cholesterol/PEG-DMG |
| | [1,3]-dioxolane (XTC) | 57.5/7.5/31.5/3.5 |
| | | lipid:siRNA ~ 11:1 |
| LNP07 | 2,2-Dilinoleyl-4-dimethylaminoethyl- | XTC/DSPC/Cholesterol/PEG-DMG |
| | [1,3]-dioxolane (XTC) | 60/7.5/31/1.5, |
| | | lipid:siRNA ~ 6:1 |
| LNP08 | 2,2-Dilinoleyl-4-dimethylaminoethyl- | XTC/DSPC/Cholesterol/PEG-DMG |
| | [1,3]-dioxolane (XTC) | 60/7.5/31/1.5, |
| | | lipid:siRNA ~ 11:1 |
| LNP09 | 2,2-Dilinoleyl-4-dimethylaminoethyl- | XTC/DSPC/Cholesterol/PEG-DMG |
| | [1,3]-dioxolane (XTC) | 50/10/38.5/1.5 |
| | | Lipid:siRNA 10:1 |
| LNP10 | (3aR,5s,6aS)-N,N-dimethyl-2,2- | ALN100/DSPC/Cholesterol/PEG-DMG |
| | di((9Z,12Z)-octadeca-9,12- | 50/10/38.5/1.5 |
| | dienyl)tetrahydro-3aH- | Lipid:siRNA 10:1 |
| | cyclopenta[d][1,3]dioxol-5-amine | |
| | (ALN100) | |
| LNP11 | (6Z,9Z,28Z,31Z)-heptatriaconta- | MC-3/DSPC/Cholesterol/PEG-DMG |
| | 6,9,28,31-tetraen-19-yl 4- | 50/10/38.5/1.5 |
| | (dimethylamino)butanoate (MC3) | Lipid:siRNA 10:1 |
| LNP12 | 1,1′-(2-(4-(2-((2-(bis(2- | C12-200/DSPC/Cholesterol/PEG-DMG |
| | hydroxydodecyl)amino)ethyl)(2- | 50/10/38.5/1.5 |
| | hydroxydodecyl)amino)ethyl)piperazin- | Lipid:siRNA 10:1 |
| | 1-yl)ethylazanediyl)didodecan-2-ol | |
| | (C12-200) | |
| LNP13 | XTC | XTC/DSPC/Chol/PEG-DMG |
| | | 50/10/38.5/1.5 |
| | | Lipid:siRNA: 33:1 |
| LNP14 | MC3 | MC3/DSPC/Chol/PEG-DMG |
| | | 40/15/40/5 |
| | | Lipid:siRNA: 11:1 |
| LNP15 | MC3 | MC3/DSPC/Chol/PEG-DSG/GalNAc-PEG-DSG |
| | | 50/10/35/4.5/0.5 |
| | | Lipid:siRNA: 11:1 |
| LNP16 | MC3 | MC3/DSPC/Chol/PEG-DMG |
| | | 50/10/38.5/1.5 |
| | | Lipid:siRNA: 7:1 |
| LNP17 | MC3 | MC3/DSPC/Chol/PEG-DSG |
| | | 50/10/38.5/1.5 |
| | | Lipid:siRNA: 10:1 |
| LNP18 | MC3 | MC3/DSPC/Chol/PEG-DMG |
| | | 50/10/38.5/1.5 |
| | | Lipid:siRNA: 12:1 |
| LNP19 | MC3 | MC3/DSPC/Chol/PEG-DMG |
| | | 50/10/35/5 |
| | | Lipid:siRNA: 8:1 |
| LNP20 | MC3 | MC3/DSPC/Chol/PEG-DPG |
| | | 50/10/38.5/1.5 |
| | | Lipid:siRNA: 10:1 |
| LNP21 | C12-200 | C12-200/DSPC/Chol/PEG-DSG |
| | | 50/10/38.5/1.5 |
| | | Lipid:siRNA: 7:1 |
| LNP22 | XTC | XTC/DSPC/Chol/PEG-DSG |
| | | 50/10/38.5/1.5 |
| | | Lipid:siRNA: 10:1 |

DSPC: distearoylphosphatidylcholine
DPPC: dipalmitoylphosphatidylcholine
PEG-DMG: PEG-didimyristoyl glycerol (C14-PEG, or PEG-C14) (PEG with avg mol wt of 2000)
PEG-DSG: PEG-distyryl glycerol (C18-PEG, or PEG-C18) (PEG with avg mol wt of 2000)
PEG-cDMA: PEG-carbamoyl-1,2-dimyristyloxypropylamine (PEG with avg mol wt of 2000)
SNALP (1,2-Dilinolenyloxy-N,N-dimethylaminopropane (DLinDMA)) comprising formulations are described in International Publication No. WO2009/127060, filed Apr. 15, 2009, which is hereby incorporated by reference.
XTC comprising formulations are described, e.g., in U.S. Provisional Ser. No. 61/148,366, filed Jan. 29, 2009; U.S. Provisional Ser. No. 61/156,851, filed Mar. 2, 2009; U.S. Provisional Ser. No. 61/185,712, filed Jun. 10, 2009; U.S. Provisional Ser. No. 61/228,373, filed Jul. 24, 2009; U.S. Provisional Ser. No. 61/239,686, filed Sep. 3, 2009, and International Application No. PCT/US2010/022614, filed Jan. 29, 2010, which are hereby incorporated by reference.
MC3 comprising formulations are described, e.g., in U.S. Provisional Ser. No. 61/244,834, filed Sep. 22, 2009, U.S. Provisional Ser. No. 61/185,800, filed Jun. 10, 2009, and International Application No. PCT/US10/28224, filed Jun. 10, 2010, which are hereby incorporated by reference.
ALNY-100 comprising formulations are described, e.g., International patent application number PCT/US09/63933, filed on Nov. 10, 2009, which is hereby incorporated by reference.
C12-200 comprising formulations are described in U.S. Provisional Ser. No. 61/175,770, filed May 5, 2009 and International Application No. PCT/US10/33777, filed May 5, 2010, which are hereby incorporated by reference.

[0781] Compositions and formulations for oral administration include powders or granules, microparticulates, nanoparticulates, suspensions or solutions in water or non-aqueous media, capsules, gel capsules, sachets, tablets or minitablets. Thickeners, flavoring agents, diluents, emulsifiers, dispersing aids or binders can be desirable. In some embodiments, oral formulations are those in which dsRNAs featured in the invention are administered in conjunction with one or more penetration enhancer surfactants and chelators.

[0782] Suitable surfactants include fatty acids and/or esters or salts thereof, bile acids and/or salts thereof Suitable bile acids/salts include chenodeoxycholic acid (CDCA) and ursodeoxychenodeoxycholic acid (UDCA), cholic acid, dehydrocholic acid, deoxycholic acid, glucholic acid, glycholic acid, glycodeoxycholic acid, taurocholic acid, taurodeoxycholic acid, sodium tauro-24,25-dihydro-fusidate and sodium glycodihydrofusidate. Suitable fatty acids include arachidonic acid, undecanoic acid, oleic acid, lauric acid, caprylic acid, capric acid, myristic acid, palmitic acid, stearic acid, linoleic acid, linolenic acid, dicaprate, tricaprate, monoolein, dilaurin, glyceryl 1-monocaprate, 1-dodecylazacycloheptan-2-one, an acylcarnitine, an acylcholine, or a monoglyceride, a diglyceride or a pharmaceutically acceptable salt thereof (e.g., sodium). In some embodiments, combinations of penetration enhancers are used, for example, fatty acids/salts in combination with bile acids/salts. One exemplary combination is the sodium salt of lauric acid, capric acid and UDCA. Further penetration enhancers include polyoxyethylene-9-lauryl ether, polyoxyethylene-20-cetyl ether. DsRNAs featured in the invention can be delivered orally, in granular form including sprayed dried particles, or complexed to form micro or nanoparticles. DsRNA complexing agents include poly-amino acids; polyimines; polyacrylates; polyalkylacrylates, polyoxethanes, polyalkylcyanoacrylates; cationized gelatins, albumins, starches, acrylates, polyethyleneglycols (PEG) and starches; polyalkylcyanoacrylates; DEAE-derivatized polyimines, pollulans, celluloses and starches. Suitable complexing agents include chitosan, N-trimethylchitosan, poly-L-lysine, polyhistidine, polyornithine, polyspermines, protamine, polyvinylpyridine, polythiodiethylaminomethylethylene P(TDAE), polyaminostyrene (e.g., β-amino), poly(methylcyanoacrylate), poly(ethylcyanoacrylate), poly(butylcyanoacrylate), poly(isobutylcyanoacrylate), poly(isohexylcynaoacrylate), DEAE-methacrylate, DEAE-hexylacrylate, DEAE-acrylamide, DEAE-albumin and DEAE-dextran, polymethylacrylate, polyhexylacrylate, poly(D,L-lactic acid), poly(DL-lactic-co-glycolic acid (PLGA), alginate, and polyethyleneglycol (PEG). Oral formulations for dsRNAs and their preparation are described in detail in U.S. Pat. No. 6,887,906, US Publication. No. 20030027780, and U.S. Pat. No. 6,747,014, each of which is incorporated herein by reference.

[0783] Compositions and formulations for parenteral, intraparenchymal (into the brain), intrathecal, intraventricular or intrahepatic administration can include sterile aqueous solutions which can also contain buffers, diluents and other suitable additives such as, but not limited to, penetration enhancers, carrier compounds and other pharmaceutically acceptable carriers or excipients.

[0784] Pharmaceutical compositions of the present invention include, but are not limited to, solutions, emulsions, and liposome-containing formulations. These compositions can be generated from a variety of components that include, but are not limited to, preformed liquids, self-emulsifying solids and self-emulsifying semisolids. Particularly preferred are formulations that target the liver when treating hepatic disorders such as hepatic carcinoma.

[0785] The pharmaceutical formulations of the present invention, which can conveniently be presented in unit dosage form, can be prepared according to conventional techniques well known in the pharmaceutical industry. Such techniques include the step of bringing into association the active ingredients with the pharmaceutical carrier(s) or excipient(s). In general, the formulations are prepared by uniformly and intimately bringing into association the active ingredients with liquid carriers or finely divided solid carriers or both, and then, if necessary, shaping the product.

[0786] The compositions of the present invention can be formulated into any of many possible dosage forms such as, but not limited to, tablets, capsules, gel capsules, liquid syrups, soft gels, suppositories, and enemas.

[0787] The compositions of the present invention can also be formulated as suspensions in aqueous, non-aqueous or mixed media. Aqueous suspensions can further contain substances which increase the viscosity of the suspension including, for example, sodium carboxymethylcellulose, sorbitol and/or dextran. The suspension can also contain stabilizers.

[0788] Many liposomes comprising lipids derivatized with one or more hydrophilic polymers, and methods of preparation thereof, are known in the art. Sunamoto et al. (Bull. Chem. Soc. Jpn., 1980, 53, 2778) described liposomes comprising a nonionic detergent, 2C_{1215G}, that contains a PEG moiety. Illum et al. (FEBS Lett., 1984, 167, 79) noted that hydrophilic coating of polystyrene particles with polymeric glycols results in significantly enhanced blood half-lives. Synthetic phospholipids modified by the attachment of carboxylic groups of polyalkylene glycols (e.g., PEG) are described by Sears (U.S. Pat. Nos. 4,426,330 and 4,534,899). Klibanov et al. (FEBSLett., 1990, 268, 235) described experiments demonstrating that liposomes comprising phosphatidylethanolamine (PE) derivatized with PEG or PEG stearate have significant increases in blood circulation half-lives. Blume et al. (Biochimica et Biophysica Acta, 1990, 1029, 91) extended such observations to other PEG-derivatized phospholipids, e.g., DSPE-PEG, formed from the combination of distearoylphosphatidylethanolamine (DSPE) and PEG. Liposomes having covalently bound PEG moieties on their external surface are described in European Patent No. EP 0 445 131 B1 and WO 90/04384 to Fisher. Liposome compositions containing 1-20 mole percent of PE derivatized with PEG, and methods of use thereof, are described by Woodle et al. (U.S. Pat. Nos. 5,013,556 and 5,356,633) and Martin et al. (U.S. Pat. No. 5,213,804 and European Patent No. EP 0 496 813 B1). Liposomes comprising a number of other lipid-polymer conjugates are disclosed in WO 91/05545 and U.S. Pat. No. 5,225,212 (both to Martin et al.) and in WO 94/20073 (Zalipsky et al.). Liposomes comprising PEG-modified ceramide lipids are described in WO 96/10391 (Choi et al). U.S. Pat. No. 5,540,935 (Miyazaki et al.) and U.S. Pat. No. 5,556,948 (Tagawa et al.) describe PEG-containing liposomes that can be further derivatized with functional moieties on their surfaces.

[0789] A number of liposomes comprising nucleic acids are known in the art. WO 96/40062 to Thierry et al. discloses methods for encapsulating high molecular weight nucleic acids in liposomes. U.S. Pat. No. 5,264,221 to Tagawa et al. discloses protein-bonded liposomes and asserts that the contents of such liposomes may include a dsRNA. U.S. Pat. No. 5,665,710 to Rahman et al. describes certain methods of encapsulating oligodeoxynucleotides in liposomes. WO 97/04787 to Love et al. discloses liposomes comprising dsRNAs targeted to the raf gene.

### C. Additional Formulations

i. Emulsions

[0790] The compositions of the present invention can be prepared and formulated as emulsions. Emulsions are typically heterogeneous systems of one liquid dispersed in another in the form of droplets usually exceeding 0.1 m in diameter (see e.g., Ansel's Pharmaceutical Dosage Forms and Drug Delivery Systems, Allen, LV., Popovich NG., and Ansel HC., 2004, Lippincott Williams & Wilkins (8th ed.), New York, NY; Idson, in Pharmaceutical Dosage Forms, Lieberman, Rieger and Banker (Eds.), 1988, Marcel Dekker, Inc., New York, N.Y., volume 1, p. 199; Rosoff, in Pharmaceutical Dosage Forms, Lieberman, Rieger and Banker (Eds.), 1988, Marcel Dekker, Inc., New York, N.Y., Volume 1, p. 245; Block in Pharmaceutical Dosage Forms, Lieberman, Rieger and Banker (Eds.), 1988, Marcel Dekker, Inc., New York, N.Y., volume 2, p. 335; Higuchi et al., in Remington's Pharmaceutical Sciences, Mack Publishing Co., Easton, Pa., 1985, p. 301). Emulsions are often biphasic systems comprising two immiscible liquid phases intimately mixed and dispersed with each other. In general, emulsions can be of either the water-in-oil (w/o) or the oil-in-water (o/w) variety. When an aqueous phase is finely divided into and dispersed as minute droplets into a bulk oily phase, the resulting composition is called a water-in-oil (w/o) emulsion. Alternatively, when an oily phase is finely divided into and dispersed as minute droplets into a bulk aqueous phase, the resulting composition is called an oil-in-water (o/w) emulsion. Emulsions can contain additional components in addition to the dispersed phases, and the active drug which can be present as a solution in either aqueous phase, oily phase or itself as a separate phase. Pharmaceutical excipients such as emulsifiers, stabilizers, dyes, and anti-oxidants can also be present in emulsions as needed. Pharmaceutical emulsions can also be multiple emulsions that are comprised of more than two phases such as, for example, in the case of oil-in-water-in-oil (o/w/o) and water-in-oil-in-water (w/o/w) emulsions. Such complex formulations often provide certain advantages that simple binary emulsions do not. Multiple emulsions in which individual oil droplets of an o/w emulsion enclose small water droplets constitute a w/o/w emulsion. Likewise, a system of oil droplets enclosed in globules of water stabilized in an oily continuous phase provides an o/w/o emulsion.

[0791] Emulsions are characterized by little or no thermodynamic stability. Often, the dispersed or discontinuous phase of the emulsion is well dispersed into the external or continuous phase and maintained in this form through the means of emulsifiers or the viscosity of the formulation. Either of the phases of the emulsion can be a semisolid or a solid, as is the case of emulsion-style ointment bases and creams. Other means of stabilizing emulsions entail the use of emulsifiers that can be incorporated into either phase of the emulsion. Emulsifiers can broadly be classified into four categories: synthetic surfactants, naturally occurring emulsifiers, absorption bases, and finely dispersed solids (see e.g., Ansel's Pharmaceutical Dosage Forms and Drug Delivery Systems, Allen, LV., Popovich NG., and Ansel HC., 2004, Lippincott Williams & Wilkins (8th ed.), New York, NY; Idson, in Pharmaceutical Dosage Forms, Lieberman, Rieger and Banker (Eds.), 1988, Marcel Dekker, Inc., New York, N.Y., volume 1, p. 199).

[0792] Synthetic surfactants, also known as surface active agents, have found wide applicability in the formulation of emulsions and have been reviewed in the literature (see e.g., Ansel's Pharmaceutical Dosage Forms and Drug Delivery Systems, Allen, LV., Popovich NG., and Ansel HC., 2004, Lippincott Williams & Wilkins (8th ed.), New York, NY; Rieger, in Pharmaceutical Dosage Forms, Lieberman, Rieger and Banker (Eds.), 1988, Marcel Dekker, Inc., New York, N.Y., volume 1, p. 285; Idson, in Pharmaceutical Dosage Forms, Lieberman, Rieger and Banker (Eds.), Marcel Dekker, Inc., New York, N.Y., 1988, volume 1, p. 199).

[0793] Surfactants are typically amphiphilic and comprise a hydrophilic and a hydrophobic portion. The ratio of the hydrophilic to the hydrophobic nature of the surfactant has been termed the hydrophile/lipophile balance (HLB) and is a valuable tool in categorizing and selecting surfactants in the preparation of formulations.

[0794] Surfactants can be classified into different classes based on the nature of the hydrophilic group: nonionic, anionic, cationic and amphoteric (see e.g., Ansel's Pharmaceutical Dosage Forms and Drug Delivery Systems, Allen, LV., Popovich NG., and Ansel HC., 2004, Lippincott Williams & Wilkins (8th ed.), New York, NY Rieger, in Pharmaceutical Dosage Forms, Lieberman, Rieger and Banker (Eds.), 1988, Marcel Dekker, Inc., New York, N.Y., volume 1, p. 285).

[0795] Naturally occurring emulsifiers used in emulsion formulations include lanolin, beeswax, phosphatides, lecithin and acacia. Absorption bases possess hydrophilic properties such that they can soak up water to form w/o emulsions yet retain their semisolid consistencies, such as anhydrous lanolin and hydrophilic petrolatum.

[0796] Finely divided solids have also been used as good emulsifiers especially in combination with surfactants and in viscous preparations. These include polar inorganic solids, such as heavy metal hydroxides, nonswelling clays such as bentonite, attapulgite, hectorite, kaolin, montmorillonite, colloidal aluminum silicate and colloidal magnesium aluminum silicate, pigments and nonpolar solids such as carbon or glyceryl tristearate.

[0797] A large variety of non-emulsifying materials are also included in emulsion formulations and contribute to the properties of emulsions. These include fats, oils, waxes, fatty acids, fatty alcohols, fatty esters, humectants, hydrophilic colloids, preservatives and antioxidants (Block, in Pharmaceutical Dosage Forms, Lieberman, Rieger and Banker (Eds.), 1988, Marcel Dekker, Inc., New York, N.Y., volume 1, p. 335; Idson, in Pharmaceutical Dosage Forms, Lieberman, Rieger and Banker (Eds.), 1988, Marcel Dekker, Inc., New York, N.Y., volume 1, p. 199).

[0798] Hydrophilic colloids or hydrocolloids include naturally occurring gums and synthetic polymers such as polysaccharides (for example, acacia, agar, alginic acid, carrageenan, guar gum, karaya gum, and tragacanth), cellulose derivatives (for example, carboxymethylcellulose and carboxypropylcellulose), and synthetic polymers (for example, carbomers, cellulose ethers, and carboxyvinyl polymers). These disperse or swell in water to form colloidal solutions that stabilize emulsions by forming strong interfacial films around the dispersed-phase droplets and by increasing the viscosity of the external phase.

[0799] Since emulsions often contain a number of ingredients such as carbohydrates, proteins, sterols and phosphatides that can readily support the growth of microbes, these formulations often incorporate preservatives. Commonly used preservatives included in emulsion formulations include methyl paraben, propyl paraben, quaternary ammonium salts, benzalkonium chloride, esters of β-hydroxybenzoic acid, and boric acid. Antioxidants are also commonly added to emulsion formulations to prevent deterioration of the formulation. Antioxidants used can be free radical scavengers such as tocopherols, alkyl gallates, butylated hydroxyanisole, butylated hydroxytoluene, or reducing agents such as ascorbic acid and sodium metabisulfite, and antioxidant synergists such as citric acid, tartaric acid, and lecithin.

[0800] The application of emulsion formulations via dermatological, oral and parenteral routes and methods for their manufacture have been reviewed in the literature (see e.g., Ansel's Pharmaceutical Dosage Forms and Drug Delivery Systems, Allen, LV., Popovich NG., and Ansel HC., 2004, Lippincott Williams & Wilkins (8th ed.), New York, NY; Idson, in Pharmaceutical Dosage Forms, Lieberman, Rieger and Banker (Eds.), 1988, Marcel Dekker, Inc., New York, N.Y., volume 1, p. 199). Emulsion formulations for oral delivery have been very widely used because of ease of formulation, as well as efficacy from an absorption and bioavailability standpoint (see e.g., Ansel's Pharmaceutical Dosage Forms and Drug Delivery Systems, Allen, LV., Popovich NG., and Ansel HC., 2004, Lippincott Williams & Wilkins (8th ed.), New York, NY; Rosoff, in Pharmaceutical Dosage Forms, Lieberman, Rieger and Banker (Eds.), 1988, Marcel Dekker, Inc., New York, N.Y., volume 1, p. 245; Idson, in Pharmaceutical Dosage Forms, Lieberman, Rieger and Banker (Eds.), 1988, Marcel Dekker, Inc., New York, N.Y., volume 1, p. 199). Mineral-oil base laxatives, oil-soluble vitamins and high fat nutritive preparations are among the materials that have commonly been administered orally as o/w emulsions. ii. Microemulsions In one embodiment of the present invention, the compositions of iRNAs and nucleic acids are formulated as microemulsions. A microemulsion can be defined as a system of water, oil and amphiphile which is a single optically isotropic and thermodynamically stable liquid solution (see e.g., Ansel's Pharmaceutical Dosage Forms and Drug Delivery Systems, Allen, LV., Popovich NG., and Ansel HC., 2004, Lippincott Williams & Wilkins (8th ed.), New York, NY; Rosoff, in Pharmaceutical Dosage Forms, Lieberman, Rieger and Banker (Eds.), 1988, Marcel Dekker, Inc., New York, N.Y., volume 1, p. 245).

[0801] Typically, microemulsions are systems that are prepared by first dispersing an oil in an aqueous surfactant solution and then adding a sufficient amount of a fourth component, generally an intermediate chain-length alcohol to form a transparent system. Therefore, microemulsions have also been described as thermodynamically stable, isotropically clear dispersions of two immiscible liquids that are stabilized by interfacial films of surface-active molecules (Leung and Shah, in: Controlled Release of Drugs: Polymers and Aggregate Systems, Rosoff, M., Ed., 1989, VCH Publishers, New York, pages 185-215). Microemulsions commonly are prepared via a combination of three to five components that include oil, water, surfactant, cosurfactant and electrolyte. Whether the microemulsion is of the water-in-oil (w/o) or an oil-in-water (o/w) type is dependent on the properties of the oil and surfactant used and on the structure and geometric packing of the polar heads and hydrocarbon tails of the surfactant molecules (Schott, in Remington's Pharmaceutical Sciences, Mack Publishing Co., Easton, Pa., 1985, p. 271).

[0802] The phenomenological approach utilizing phase diagrams has been extensively studied and has yielded a comprehensive knowledge, to one skilled in the art, of how to formulate microemulsions (see e.g., Ansel's Pharmaceutical Dosage Forms and Drug Delivery Systems, Allen, LV., Popovich NG., and Ansel HC., 2004, Lippincott Williams & Wilkins (8th ed.), New York, NY; Rosoff, in Pharmaceutical Dosage Forms, Lieberman, Rieger and Banker (Eds.), 1988, Marcel Dekker, Inc., New York, N.Y., volume 1, p. 245; Block, in Pharmaceutical Dosage Forms, Lieberman, Rieger and Banker (Eds.), 1988, Marcel Dekker, Inc., New York, N.Y., volume 1, p. 335). Compared to conventional emulsions, microemulsions offer the advantage of solubilizing water-insoluble drugs in a formulation of thermodynamically stable droplets that are formed spontaneously.

[0803] Surfactants used in the preparation of microemulsions include, but are not limited to, ionic surfactants, non-ionic surfactants, Brij 96, polyoxyethylene oleyl ethers, polyglycerol fatty acid esters, tetraglycerol monolaurate (ML310), tetraglycerol monooleate (M0310), hexaglycerol monooleate (P0310), hexaglycerol pentaoleate (P0500), decaglycerol monocaprate (MCA750), decaglycerol monooleate (M0750), decaglycerol sequioleate (S0750), decaglycerol decaoleate (DA0750), alone or in combination with cosurfactants. The cosurfactant, usually a short-chain alcohol such as ethanol, 1-propanol, and 1-butanol, serves to increase the interfacial fluidity by penetrating into the surfactant film and consequently creating a disordered film because of the void space generated among surfactant molecules. Microemulsions can, however, be prepared without the use of cosurfactants and alcohol-free self-emulsifying microemulsion systems are known in the art. The aqueous phase can typically be, but is not limited to, water, an aqueous solution of the drug, glycerol, PEG300, PEG400, polyglycerols, propylene glycols, and derivatives of ethylene glycol. The oil phase can include, but is not limited to, materials such as Captex 300, Captex 355, Capmul MCM, fatty acid esters, medium chain (C8-C12) mono, di, and tri-glycerides, polyoxyethylated glyceryl fatty acid esters, fatty alcohols, polyglycolized glycerides, saturated polyglycolized C8-C10 glycerides, vegetable oils and silicone oil.

[0804] Microemulsions are particularly of interest from the standpoint of drug solubilization and the enhanced absorption of drugs. Lipid based microemulsions (both o/w and w/o) have been proposed to enhance the oral bioavailability of drugs, including peptides (see e.g., U.S. Pat. Nos. 6,191,105; 7,063,860; 7,070,802; 7,157,099; Constantinides et al., Pharmaceutical Research, 1994, 11, 1385-1390; Ritschel, Meth.

[0805] Find. Exp. Clin. Pharmacol., 1993, 13, 205). Microemulsions afford advantages of improved drug solubilization, protection of drug from enzymatic hydrolysis, possible enhancement of drug absorption due to surfactant-induced alterations in membrane fluidity and permeability, ease of preparation, ease of oral administration over solid dosage forms, improved clinical potency, and decreased toxicity (see e.g., U.S. Pat. Nos. 6,191,105; 7,063,860; 7,070,802; 7,157,099; Constantinides et al., Pharmaceutical Research, 1994, 11, 1385; Ho et al., J. Pharm. Sci., 1996, 85, 138-143). Often microemulsions can form spontaneously when their components are brought together at ambient temperature. This can be particularly advantageous when formulating thermolabile drugs, peptides or iRNAs. Microemulsions have also been effective in the transdermal delivery of active components in both cosmetic and pharmaceutical applications. It is expected that the microemulsion compositions and formulations of the present invention will facilitate the increased systemic absorption of iRNAs and nucleic acids from the gastrointestinal tract, as well as improve the local cellular uptake of iRNAs and nucleic acids.

[0806] Microemulsions of the present invention can also contain additional components and additives such as sorbitan monostearate (Grill 3), Labrasol, and penetration enhancers to improve the properties of the formulation and to enhance the absorption of the iRNAs and nucleic acids of the present invention.

[0807] Penetration enhancers used in the microemulsions of the present invention can be classified as belonging to one of five broad categories—surfactants, fatty acids, bile salts, chelating agents, and non-chelating non-surfactants (Lee et al., Critical Reviews in Therapeutic Drug Carrier Systems, 1991, p. 92). Each of these classes has been discussed above. iii. Microparticles An RNAi agent of the invention may be incorporated into a particle, e.g., a microparticle.

[0808] Microparticles can be produced by spray-drying, but may also be produced by other methods including lyophilization, evaporation, fluid bed drying, vacuum drying, or a combination of these techniques. iv. Penetration Enhancers In one embodiment, the present invention employs various penetration enhancers to effect the efficient delivery of nucleic acids, particularly iRNAs, to the skin of animals. Most drugs are present in solution in both ionized and nonionized forms. However, usually only lipid soluble or lipophilic drugs readily cross cell membranes. It has been discovered that even non-lipophilic drugs can cross cell membranes if the membrane to be crossed is treated with a penetration enhancer. In addition to aiding the diffusion of non-lipophilic drugs across cell membranes, penetration enhancers also enhance the permeability of lipophilic drugs.

[0809] Penetration enhancers can be classified as belonging to one of five broad categories, i.e., surfactants, fatty acids, bile salts, chelating agents, and non-chelating non-surfactants (see e.g., Malmsten, M. Surfactants and polymers in drug delivery, Informa Health Care, New York, NY, 2002; Lee et al., Critical Reviews in Therapeutic Drug Carrier Systems, 1991, p.92). Each of the above mentioned classes of penetration enhancers are described below in greater detail.

[0810] Surfactants (or “surface-active agents”) are chemical entities which, when dissolved in an aqueous solution, reduce the surface tension of the solution or the interfacial tension between the aqueous solution and another liquid, with the result that absorption of iRNAs through the mucosa is enhanced. In addition to bile salts and fatty acids, these penetration enhancers include, for example, sodium lauryl sulfate, polyoxyethylene-9-lauryl ether and polyoxyethylene-20-cetyl ether) (see e.g., Malmsten, M. Surfactants and polymers in drug delivery, Informa Health Care, New York, NY, 2002; Lee et al., Critical Reviews in Therapeutic Drug Carrier Systems, 1991, p.92); and perfluorochemical emulsions, such as FC-43. Takahashi et al., J. Pharm. Pharmacol., 1988, 40, 252).

[0811] Various fatty acids and their derivatives which act as penetration enhancers include, for example, oleic acid, lauric acid, capric acid (n-decanoic acid), myristic acid, palmitic acid, stearic acid, linoleic acid, linolenic acid, dicaprate, tricaprate, monoolein (1-monooleoyl-rac-glycerol), dilaurin, caprylic acid, arachidonic acid, glycerol 1-monocaprate, 1-dodecylazacycloheptan-2-one, acylcamitines, acylcholines, C₁₋₂₀ alkyl esters thereof (e.g., methyl, isopropyl and t-butyl), and mono- and di-glycerides thereof (i.e., oleate, laurate, caprate, myristate, palmitate, stearate, linoleate, etc.) (see e.g., Touitou, E., et al. Enhancement in Drug Delivery, CRC Press, Danvers, MA, 2006; Lee et al., Critical Reviews in Therapeutic Drug Carrier Systems, 1991, p.92; Muranishi, Critical Reviews in Therapeutic Drug Carrier Systems, 1990, 7, 1-33; El Hariri et al., J. Pharm. Pharmacol., 1992, 44, 651-654).

[0812] The physiological role of bile includes the facilitation of dispersion and absorption of lipids and fat-soluble vitamins (see e.g., Malmsten, M. Surfactants and polymers in drug delivery, Informa Health Care, New York, NY, 2002; Brunton, Chapter 38 in: Goodman & Gilman's The Pharmacological Basis of Therapeutics, 9th Ed., Hardman et al. Eds., McGraw-Hill, New York, 1996, pp. 934-935). Various natural bile salts, and their synthetic derivatives, act as penetration enhancers. Thus the term “bile salts” includes any of the naturally occurring components of bile as well as any of their synthetic derivatives. Suitable bile salts include, for example, cholic acid (or its pharmaceutically acceptable sodium salt, sodium cholate), dehydrocholic acid (sodium dehydrocholate), deoxycholic acid (sodium deoxycholate), glucholic acid (sodium glucholate), glycholic acid (sodium glycocholate), glycodeoxycholic acid (sodium glycodeoxycholate), taurocholic acid (sodium taurocholate), taurodeoxycholic acid (sodium taurodeoxycholate), chenodeoxycholic acid (sodium chenodeoxycholate), ursodeoxycholic acid (UDCA), sodium tauro-24,25-dihydro-fusidate (STDHF), sodium glycodihydrofusidate and polyoxyethylene-9-lauryl ether (POE) (see e.g., Malmsten, M. Surfactants and polymers in drug delivery, Informa Health Care, New York, NY, 2002; Lee et al., Critical Reviews in Therapeutic Drug Carrier Systems, 1991, page 92; Swinyard, Chapter 39 In: Remington's Pharmaceutical Sciences, 18th Ed., Gennaro, ed., Mack Publishing Co., Easton, Pa., 1990, pages 782-783; Muranishi, Critical Reviews in Therapeutic Drug Carrier Systems, 1990, 7, 1-33; Yamamoto et al., J. Pharm. Exp. Ther., 1992, 263, 25; Yamashita et al., J. Pharm. Sci., 1990, 79, 579-583).

[0813] Chelating agents, as used in connection with the present invention, can be defined as compounds that remove metallic ions from solution by forming complexes therewith, with the result that absorption of iRNAs through the mucosa is enhanced. With regards to their use as penetration enhancers in the present invention, chelating agents have the added advantage of also serving as DNase inhibitors, as most characterized DNA nucleases require a divalent metal ion for catalysis and are thus inhibited by chelating agents (Jarrett, J. Chromatogr., 1993, 618, 315-339). Suitable chelating agents include but are not limited to disodium ethylenediaminetetraacetate (EDTA), citric acid, salicylates (e.g., sodium salicylate, 5-methoxysalicylate and homovanilate), N-acyl derivatives of collagen, laureth-9 and N-amino acyl derivatives of beta-diketones (enamines)(see e.g., Katdare, A. et al., Excipient development for pharmaceutical, biotechnology, and drug delivery, CRC Press, Danvers, MA, 2006; Lee et al., Critical Reviews in Therapeutic Drug Carrier Systems, 1991, page 92; Muranishi, Critical Reviews in Therapeutic Drug Carrier Systems, 1990, 7, 1-33; Buur et al., J. Control Rel., 1990, 14, 43-51).

[0814] As used herein, non-chelating non-surfactant penetration enhancing compounds can be defined as compounds that demonstrate insignificant activity as chelating agents or as surfactants but that nonetheless enhance absorption of iRNAs through the alimentary mucosa (see e.g., Muranishi, Critical Reviews in Therapeutic Drug Carrier Systems, 1990, 7, 1-33). This class of penetration enhancers includes, for example, unsaturated cyclic ureas, 1-alkyl- and 1-alkenylazacyclo-alkanone derivatives (Lee et al., Critical Reviews in Therapeutic Drug Carrier Systems, 1991, page 92); and non-steroidal anti-inflammatory agents such as diclofenac sodium, indomethacin and phenylbutazone (Yamashita et al., J. Pharm. Pharmacol., 1987, 39, 621-626).

[0815] Agents that enhance uptake of iRNAs at the cellular level can also be added to the pharmaceutical and other compositions of the present invention. For example, cationic lipids, such as lipofectin (Junichi et al, U.S. Pat. No. 5,705,188), cationic glycerol derivatives, and polycationic molecules, such as polylysine (Lollo et al., PCT Application WO 97/30731), are also known to enhance the cellular uptake of dsRNAs. Examples of commercially available transfection reagents include, for example Lipofectamine™ (Invitrogen; Carlsbad, CA), Lipofectamine 2000™ (Invitrogen; Carlsbad, CA), 293fectin™ (Invitrogen; Carlsbad, CA), Cellfectin™ (Invitrogen; Carlsbad, CA), DMRIE-C™ (Invitrogen; Carlsbad, CA), FreeStyle™ MAX (Invitrogen; Carlsbad, CA), Lipofectamine™ 2000 CD (Invitrogen; Carlsbad, CA), Lipofectamine™ (Invitrogen; Carlsbad, CA), RNAiMAX (Invitrogen; Carlsbad, CA), Oligofectamine™ (Invitrogen; Carlsbad, CA), Optifect™ (Invitrogen; Carlsbad, CA), X-tremeGENE Q2 Transfection Reagent (Roche; Grenzacherstrasse, Switzerland), DOTAP Liposomal Transfection Reagent (Grenzacherstrasse, Switzerland), DOSPER Liposomal Transfection Reagent (Grenzacherstrasse, Switzerland), or Fugene (Grenzacherstrasse, Switzerland), Transfectam® Reagent (Promega; Madison, WI), TransFast™ Transfection Reagent (Promega; Madison, WI), Tfx™-20 Reagent (Promega; Madison, WI), Tfx™-50 Reagent (Promega; Madison, WI), DreamFect™ (OZ Biosciences; Marseille, France), EcoTransfect (OZ Biosciences; Marseille, France), TransPass^{a} D1 Transfection Reagent (New England Biolabs; Ipswich, MA, USA), LyoVec™/LipoGen™ (Invitrogen; San Diego, CA, USA), PerFectin Transfection Reagent (Genlantis; San Diego, CA, USA), NeuroPORTER Transfection Reagent (Genlantis; San Diego, CA, USA), GenePORTER Transfection reagent (Genlantis; San Diego, CA, USA), GenePORTER 2 Transfection reagent (Genlantis; San Diego, CA, USA), Cytofectin Transfection Reagent (Genlantis; San Diego, CA, USA), BaculoPORTER Transfection Reagent (Genlantis; San Diego, CA, USA), TroganPORTER™ transfection Reagent (Genlantis; San Diego, CA, USA), RiboFect (Bioline; Taunton, MA, USA), PlasFect (Bioline; Taunton, MA, USA), UniFECTOR (B-Bridge International; Mountain View, CA, USA), SureFECTOR (B-Bridge International; Mountain View, CA, USA), or HiFect™ (B-Bridge International, Mountain View, CA, USA), among others.

[0816] Other agents can be utilized to enhance the penetration of the administered nucleic acids, including glycols such as ethylene glycol and propylene glycol, pyrrols such as 2-pyrrol, azones, and terpenes such as limonene and menthone.

v. Carriers

[0817] Certain compositions of the present invention also incorporate camer compounds in the formulation. As used herein, “carrier compound” or “carrier” can refer to a nucleic acid, or analog thereof, which is inert (i.e., does not possess biological activity per se) but is recognized as a nucleic acid by in vivo processes that reduce the bioavailability of a nucleic acid having biological activity by, for example, degrading the biologically active nucleic acid or promoting its removal from circulation. The coadministration of a nucleic acid and a carrier compound, typically with an excess of the latter substance, can result in a substantial reduction of the amount of nucleic acid recovered in the liver, kidney or other extracirculatory reservoirs, presumably due to competition between the carrier compound and the nucleic acid for a common receptor.

[0818] For example, the recovery of a partially phosphorothioate dsRNA in hepatic tissue can be reduced when it is coadministered with polyinosinic acid, dextran sulfate, polycytidic acid or 4-acetamido-4′isothiocyano-stilbene-2,2′-disulfonic acid (Miyao et al., DsRNA Res. Dev., 1995, 5, 115-121; Takakura et al., DsRNA & Nucl. Acid Drug Dev., 1996, 6, 177-183. vi. Excipients In contrast to a camer compound, a “pharmaceutical carrier” or “excipient” is a pharmaceutically acceptable solvent, suspending agent or any other pharmacologically inert vehicle for delivering one or more nucleic acids to an animal. The excipient can be liquid or solid and is selected, with the planned manner of administration in mind, so as to provide for the desired bulk, consistency, etc., when combined with a nucleic acid and the other components of a given pharmaceutical composition. Typical pharmaceutical carriers include, but are not limited to, binding agents (e.g., pregelatinized maize starch, polyvinylpyrrolidone or hydroxypropyl methylcellulose, etc.); fillers (e.g., lactose and other sugars, microcrystalline cellulose, pectin, gelatin, calcium sulfate, ethyl cellulose, polyacrylates or calcium hydrogen phosphate, etc.); lubricants (e.g., magnesium stearate, talc, silica, colloidal silicon dioxide, stearic acid, metallic stearates, hydrogenated vegetable oils, corn starch, polyethylene glycols, sodium benzoate, sodium acetate, etc.); disintegrants (e.g., starch, sodium starch glycolate, etc.); and wetting agents (e.g., sodium lauryl sulphate, etc).

[0819] Pharmaceutically acceptable organic or inorganic excipients suitable for non-parenteral administration which do not deleteriously react with nucleic acids can also be used to formulate the compositions of the present invention. Suitable pharmaceutically acceptable carriers include, but are not limited to, water, salt solutions, alcohols, polyethylene glycols, gelatin, lactose, amylose, magnesium stearate, talc, silicic acid, viscous paraffin, hydroxymethylcellulose, polyvinylpyrrolidone and the like.

[0820] Formulations for topical administration of nucleic acids can include sterile and non-sterile aqueous solutions, non-aqueous solutions in common solvents such as alcohols, or solutions of the nucleic acids in liquid or solid oil bases. The solutions can also contain buffers, diluents and other suitable additives. Pharmaceutically acceptable organic or inorganic excipients suitable for non-parenteral administration which do not deleteriously react with nucleic acids can be used.

[0821] Suitable pharmaceutically acceptable excipients include, but are not limited to, water, salt solutions, alcohol, polyethylene glycols, gelatin, lactose, amylose, magnesium stearate, talc, silicic acid, viscous paraffin, hydroxymethylcellulose, polyvinylpyrrolidone and the like.

vii. Other Components

[0822] The compositions of the present invention can additionally contain other adjunct components conventionally found in pharmaceutical compositions, at their art-established usage levels. Thus, for example, the compositions can contain additional, compatible, pharmaceutically-active materials such as, for example, antipruritics, astringents, local anesthetics or anti-inflammatory agents, or can contain additional materials useful in physically formulating various dosage forms of the compositions of the present invention, such as dyes, flavoring agents, preservatives, antioxidants, opacifiers, thickening agents and stabilizers. However, such materials, when added, should not unduly interfere with the biological activities of the components of the compositions of the present invention. The formulations can be sterilized and, if desired, mixed with auxiliary agents, e.g., lubricants, preservatives, stabilizers, wetting agents, emulsifiers, salts for influencing osmotic pressure, buffers, colorings, flavorings and/or aromatic substances and the like which do not deleteriously interact with the nucleic acid(s) of the formulation.

[0823] Aqueous suspensions can contain substances which increase the viscosity of the suspension including, for example, sodium carboxymethylcellulose, sorbitol and/or dextran. The suspension can also contain stabilizers.

[0824] In some embodiments, pharmaceutical compositions featured in the invention include (a) one or more iRNA compounds and (b) one or more agents which function by a non-RNAi mechanism and which are useful in treating a PLG-associated disease, disorder, or condition. Examples of such agents include, but are not limited to, tranexamic acid (TXA), oral contraceptive pills (OCP), intrauterine devices (IUDs), such as Mirena IUD and Kyleena IUD, other progestin approaches, endometrial ablation, total or subtotal hysterectomy, myomectomy, uterine artery embolization, human plasma-donor derived Glu-plasminogen, inhibitors of the plasminogen pathway, or a combination of any of the foregoing.

[0825] Toxicity and therapeutic efficacy of such compounds can be determined by standard pharmaceutical procedures in cell cultures or experimental animals, e.g., for determining the LD₅₀ (the dose lethal to 50% of the population) and the ED₅₀ (the dose therapeutically effective in 50% of the population). The dose ratio between toxic and therapeutic effects is the therapeutic index and it can be expressed as the ratio LD₅₀/ED₅₀. Compounds that exhibit high therapeutic indices are preferred.

[0826] The data obtained from cell culture assays and animal studies can be used in formulating a range of dosage for use in humans. The dosage of compositions featured herein in the invention lies generally within a range of circulating concentrations that include the ED₅₀ with little or no toxicity. The dosage can vary within this range depending upon the dosage form employed and the route of administration utilized. For any compound used in the methods featured in the invention, the therapeutically effective dose can be estimated initially from cell culture assays. A dose can be formulated in animal models to achieve a circulating plasma concentration range of the compound or, when appropriate, of the polypeptide product of a target sequence (e.g., achieving a decreased concentration of the polypeptide) that includes the IC₅₀ (i.e., the concentration of the test compound which achieves a half-maximal inhibition of symptoms) as determined in cell culture. Such information can be used to more accurately determine useful doses in humans. Levels in plasma can be measured, for example, by high performance liquid chromatography.

[0827] In addition to their administration, as discussed above, the iRNAs featured in the invention can be administered in combination with other known agents effective in treatment of pathological processes mediated by PLG expression. In any event, the administering physician can adjust the amount and timing of iRNA administration on the basis of results observed using standard measures of efficacy known in the art or described herein.

[0828] Synthesis of Cationic Lipids:

[0829] Any of the compounds, e.g., cationic lipids and the like, used in the nucleic acid-lipid particles featured in the invention may be prepared by known organic synthesis techniques. All substituents are as defined below unless indicated otherwise.

[0830] “Alkyl” means a straight chain or branched, noncyclic or cyclic, saturated aliphatic hydrocarbon containing from 1 to 24 carbon atoms. Representative saturated straight chain alkyls include methyl, ethyl, n-propyl, n-butyl, n-pentyl, n-hexyl, and the like; while saturated branched alkyls include isopropyl, sec-butyl, isobutyl, tert-butyl, isopentyl, and the like. Representative saturated cyclic alkyls include cyclopropyl, cyclobutyl, cyclopentyl, cyclohexyl, and the like; while unsaturated cyclic alkyls include cyclopentenyl and cyclohexenyl, and the like.

[0831] “Alkenyl” means an alkyl, as defined above, containing at least one double bond between adjacent carbon atoms. Alkenyls include both cis and trans isomers. Representative straight chain and branched alkenyls include ethylenyl, propylenyl, 1-butenyl, 2-butenyl, isobutylenyl, 1-pentenyl, 2-pentenyl, 3-methyl-I-butenyl, 2-methyl-2-butenyl, 2,3-dimethyl-2-butenyl, and the like.

[0832] “Alkynyl” means any alkyl or alkenyl, as defined above, which additionally contains at least one triple bond between adjacent carbons. Representative straight chain and branched alkynyls include acetylenyl, propynyl, 1-butynyl, 2-butynyl, 1-pentynyl, 2-pentynyl, 3-methyl-1 butynyl, and the like.

[0833] “Acyl” means any alkyl, alkenyl, or alkynyl wherein the carbon at the point of attachment is substituted with an oxo group, as defined below. For example, —C(═O)alkyl, —C(═O)alkenyl, and —C(═O)alkynyl are acyl groups.

[0834] “Heterocycle” means a 5- to 7-membered monocyclic, or 7- to 10-membered bicyclic, heterocyclic ring which is either saturated, unsaturated, or aromatic, and which contains from 1 or 2 heteroatoms independently selected from nitrogen, oxygen and sulfur, and wherein the nitrogen and sulfur heteroatoms may be optionally oxidized, and the nitrogen heteroatom may be optionally quatemized, including bicyclic rings in which any of the above heterocycles are fused to a benzene ring. The heterocycle may be attached via any heteroatom or carbon atom. Heterocycles include heteroaryls as defined below. Heterocycles include morpholinyl, pyrrolidinonyl, pyrrolidinyl, piperidinyl, piperizynyl, hydantoinyl, valerolactamyl, oxiranyl, oxetanyl, tetrahydrofuranyl, tetrahydropyranyl, tetrahydropyridinyl, tetrahydroprimidinyl, tetrahydrothiophenyl, tetrahydrothiopyranyl, tetrahydropyrimidinyl, tetrahydrothiophenyl, tetrahydrothiopyranyl, and the like.

[0835] The terms “optionally substituted alkyl”, “optionally substituted alkenyl”, “optionally substituted alkynyl”, “optionally substituted acyl”, and “optionally substituted heterocycle” means that, when substituted, at least one hydrogen atom is replaced with a substituent. In the case of an oxo substituent (═O) two hydrogen atoms are replaced. In this regard, substituents include oxo, halogen, heterocycle, -CN, —OR^{X}, —NRR^{Y}, —NRC(═O)R^{y}, —NRSO₂R^{Y}, —C(═O)R, —C(═O)OR^{X}, —C(═O)NR^{X}R^{Y}, —SOₙR^{x} and —SOₙNR^{X}R^{Y}, wherein n is 0, 1 or 2, R and R^{y} are the same or different and independently hydrogen, alkyl or heterocycle, and each of said alkyl and heterocycle substituents may be further substituted with one or more of oxo, halogen, —OH, —CN, alkyl, —OR, heterocycle, —NRR^{Y}, —NRC(═O)R^{y}, —NRSO₂R^{Y}, —C(═O)R^{X}, —C(═O)OR^{X}, —C(═O)NR^{X}R^{Y}, —SOₙR^{X} and —SOₙNR^{X}R^{Y}.

[0836] “Halogen” means fluoro, chloro, bromo and iodo.

[0837] In some embodiments, the methods featured in the invention may require the use of protecting groups. Protecting group methodology is well known to those skilled in the art (see, for example, PROTECTIVE GROUPS IN ORGANIC SYNTHESIS, Green, T. W. et al., Wiley-Interscience, New York City, 1999). Briefly, protecting groups within the context of this invention are any group that reduces or eliminates unwanted reactivity of a functional group. A protecting group can be added to a functional group to mask its reactivity during certain reactions and then removed to reveal the original functional group. In some embodiments an “alcohol protecting group” is used. An “alcohol protecting group” is any group which decreases or eliminates unwanted reactivity of an alcohol functional group. Protecting groups can be added and removed using techniques well known in the art.

### Synthesis of Formula A:

[0838] In certain embodiments, nucleic acid-lipid particles featured in the invention are formulated using a cationic lipid of formula A:

[chemical structure]

where R1 and R2 are independently alkyl, alkenyl or alkynyl, each can be optionally substituted, and R3 and R4 are independently lower alkyl or R3 and R4 can be taken together to form an optionally substituted heterocyclic ring. In some embodiments, the cationic lipid is XTC (2,2-Dilinoleyl-4-dimethylaminoethyl-[1,3]-dioxolane). In general, the lipid of formula A above may be made by the following Reaction Schemes 1 or 2, wherein all substituents are as defined above unless indicated otherwise.

[chemical structure]

[0839] Lipid A, where R₁ and R₂ are independently alkyl, alkenyl or alkynyl, each can be optionally substituted, and R₃ and R₄ are independently lower alkyl or R₃ and R₄ can be taken together to form an optionally substituted heterocyclic ring, can be prepared according to Scheme 1. Ketone 1 and bromide 2 can be purchased or prepared according to methods known to those of ordinary skill in the art. Reaction of 1 and 2 yields ketal 3. Treatment of ketal 3 with amine 4 yields lipids of formula A. The lipids of formula A can be converted to the corresponding ammonium salt with an organic salt of formula 5, where X is anion counter ion selected from halogen, hydroxide, phosphate, sulfate, or the like.

[chemical structure]

[0840] Alternatively, the ketone 1 starting material can be prepared according to Scheme 2. Grignard reagent 6 and cyanide 7 can be purchased or prepared according to methods known to those of ordinary skill in the art. Reaction of 6 and 7 yields ketone 1. Conversion of ketone 1 to the corresponding lipids of formula A is as described in Scheme 1.

### Synthesis of MC3

[0841] Preparation of DLin-M-C3-DMA (i.e., (6Z,9Z,28Z,31Z)-heptatriaconta-6,9,28,31-tetraen-19-yl 4-(dimethylamino)butanoate) was as follows. A solution of (6Z,9Z,28Z,31Z)-heptatriaconta-6,9,28,31-tetraen-19-ol (0.53 g), 4-N,N-dimethylaminobutyric acid hydrochloride (0.51 g), 4-N,N-dimethylaminopyridine (0.61g) and 1-ethyl-3-(3-dimethylaminopropyl)carbodiimide hydrochloride (0.53 g) in dichloromethane (5 mL) was stirred at room temperature overnight. The solution was washed with dilute hydrochloric acid followed by dilute aqueous sodium bicarbonate. The organic fractions were dried over anhydrous magnesium sulphate, filtered and the solvent removed on a rotovap. The residue was passed down a silica gel column (20 g) using a 1-5% methanol/dichloromethane elution gradient. Fractions containing the purified product were combined and the solvent removed, yielding a colorless oil (0.54 g).

### Synthesis of ALNY-100

### Synthesis of ketal 519 [ALNY-100] was performed using the following scheme 3

[chemical structure]

### Synthesis of 515

[0842] To a stirred suspension of LiAlH4 (3.74 g, 0.09852 mol) in 200 ml anhydrous THF in a two neck RBF (1L), was added a solution of 514 (10 g, 0.04926 mol) in 70 mL of THF slowly at 0° C. under nitrogen atmosphere. After complete addition, reaction mixture was warmed to room temperature and then heated to reflux for 4 h. Progress of the reaction was monitored by TLC. After completion of reaction (by TLC) the mixture was cooled to 0° C. and quenched with careful addition of saturated Na2SO4 solution. Reaction mixture was stirred for 4 h at room temperature and filtered off Residue was washed well with THF. The filtrate and washings were mixed and diluted with 400 mL dioxane and 26 mL conc. HCl and stirred for 20 minutes at room temperature. The volatilities were stripped off under vacuum to furnish the hydrochloride salt of 515 as a white solid. Yield: 7.12 g 1H-NMR (DMSO, 400 MHz): δ=9.34 (broad, 2H), 5.68 (s, 2H), 3.74 (m, 1H), 2.66-2.60 (m, 2H), 2.50-2.45 (m, 5H).

### Synthesis of 516

[0843] To a stirred solution of compound 515 in 100 mL dry DCM in a 250 mL two neck RBF, was added NEt3 (37.2 mL, 0.2669 mol) and cooled to 0° C. under nitrogen atmosphere. After a slow addition of N-(benzyloxy-carbonyloxy)-succinimide (20 g, 0.08007 mol) in 50 mL dry DCM, reaction mixture was allowed to warm to room temperature. After completion of the reaction (2-3 h by TLC) mixture was washed successively with 1N HCl solution (1×100 mL) and saturated NaHCO₃ solution (1×50 mL). The organic layer was then dried over anhyd. Na2SO4 and the solvent was evaporated to give crude material which was purified by silica gel column chromatography to get 516 as sticky mass. Yield: 11g (89%). 1H-NMR (CDCl3, 400 MHz): δ=7.36-7.27 (m, 5H), 5.69 (s, 2H), 5.12 (s, 2H), 4.96 (br., 1H) 2.74 (s, 3H), 2.60 (m, 2H), 2.30-2.25 (m, 2H). LC-MS [M+H]−232.3 (96.94%).

### Synthesis of 517A and 517B

[0844] The cyclopentene 516 (5 g, 0.02164 mol) was dissolved in a solution of 220 mL acetone and water (10:1) in a single neck 500 mL RBF and to it was added N-methyl morpholine-N-oxide (7.6 g, 0.06492 mol) followed by 4.2 mL of 7.6% solution of0.0 (0.275 g, 0.00108 mol) in tert-butanol at room temperature. After completion of the reaction (- 3 h), the mixture was quenched with addition of solid Na2SO3 and resulting mixture was stirred for 1.5 h at room temperature. Reaction mixture was diluted with DCM (300 mL) and washed with water (2×100 mL) followed by saturated NaHCO₃ (1×50 mL) solution, water (1×30 mL) and finally with brine (lx 50 mL). Organic phase was dried over Na₂SO₄ and solvent was removed in vacuum. Silica gel column chromatographic purification of the crude material was afforded a mixture of diastereomers, which were separated by prep HPLC. Yield: - 6 g crude 517A - Peak-1 (white solid), 5.13 g (96%). 1H-NMR (DMSO, 400 MHz): δ=7.39-7.31 (m, 5H), 5.04 (s, 2H), 4.78-4.73 (m, 1H), 4.48-4.47 (d, 2H), 3.94-3.93 (m, 2H), 2.71 (s, 3H), 1.72-1.67 (m, 4H). LC-MS - [M+H]−266.3, [M+NH4+]-283.5 present, HPLC-97.86%. Stereochemistry confirmed by X-ray.

### Synthesis of 518

[0845] Using a procedure analogous to that described for the synthesis of compound 505, compound 518 (1.2 g, 41%) was obtained as a colorless oil. 1H-NMR (CDCl3, 400 MHz): δ=7.35-7.33 (m, 4H), 7.30-7.27 (m, 1H), 5.37-5.27 (m, 8H), 5.12 (s, 2H), 4.75 (m, 1H), 4.58-4.57 (m, 2H), 2.78-2.74 (m, 7H), 2.06-2.00 (m, 8H), 1.96-1.91 (m, 2H), 1.62 (m, 4H), 1.48 (m, 2H), 1.37-1.25(br m, 36H), 0.87 (m, 6H). HPLC-98.65%.

[0846] General Procedure for the Synthesis of Compound 519:

[0847] A solution of compound 518 (1 eq) in hexane (15 mL) was added in a drop-wise fashion to an ice-cold solution of LAH in THF (1 M, 2 eq). After complete addition, the mixture was heated at 40° C. over 0.5 h then cooled again on an ice bath. The mixture was carefully hydrolyzed with saturated aqueous Na₂SO₄ then filtered through Celite® and reduced to an oil. Column chromatography provided the pure 519 (1.3 g, 68%) which was obtained as a colorless oil. 13C NMR=130.2, 130.1 (x2), 127.9 (x3), 112.3, 79.3, 64.4, 44.7, 38.3, 35.4, 31.5, 29.9 (x2), 29.7, 29.6 (x2), 29.5 (x3), 29.3 (x2), 27.2 (x3), 25.6, 24.5, 23.3, 226, 14.1; Electrospray MS (+ve): Molecular weight for C44H80NO2 (M+H)+Calc. 654.6, Found 654.6.

[0848] Formulations prepared by either the standard or extrusion-free method can be characterized in similar manners. For example, formulations are typically characterized by visual inspection. They should be whitish translucent solutions free from aggregates or sediment. Particle size and particle size distribution of lipid-nanoparticles can be measured by light scattering using, for example, a Malvern Zetasizer Nano ZS (Malvern, USA). Particles should be about 20-300 nm, such as 40-100 nm in size. The particle size distribution should be unimodal. The total dsRNA concentration in the formulation, as well as the entrapped fraction, is estimated using a dye exclusion assay. A sample of the formulated dsRNA can be incubated with an RNA-binding dye, such as RiboGreen® (Molecular Probes) in the presence or absence of a formulation disrupting surfactant, e.g., 0.5% Triton-X100. The total dsRNA in the formulation can be determined by the signal from the sample containing the surfactant, relative to a standard curve. The entrapped fraction is determined by subtracting the “free” dsRNA content (as measured by the signal in the absence of surfactant) from the total dsRNA content. Percent entrapped dsRNA is typically >85%. For SNALP formulation, the particle size is at least 30 nm, at least 40 nm, at least 50 nm, at least 60 nm, at least 70 nm, at least 80 nm, at least 90 nm, at least 100 nm, at least 110 nm, and at least 120 nm. The suitable range is typically about at least 50 nm to about at least 110 nm, about at least 60 nm to about at least 100 nm, or about at least 80 nm to about at least 90 nm.

### VII. Methods of the Invention

[0849] The present invention also provides methods of using an iRNA of the invention and/or a composition of the invention to reduce and/or inhibit PLG expression in a cell, such as a cell in a subject, e.g., a hepatocyte. The methods include contacting the cell with an RNAi agent or pharmaceutical composition comprising an iRNA agent of the invention. In some embodiments, the cell is maintained for a time sufficient to obtain degradation of the mRNA transcript of a PLG gene.

[0850] Reduction in gene expression can be assessed by any methods known in the art. For example, a reduction in the expression of PLG may be determined by determining the mRNA expression level of PLG using methods routine to one of ordinary skill in the art, e.g., Northern blotting, qRT-PCR; by determining the protein level of PLG using methods routine to one of ordinary skill in the art, such as Western blotting, ELISA, or immunological techniques. A reduction in the expression of PLG may also be assessed indirectly by measuring a decrease in biological activity of PLG, e.g., a decrease in the serine protease activity of PLG.

[0851] In the methods of the invention the cell may be contacted in vitro or in vivo, i.e., the cell may be within a subject.

[0852] A cell suitable for treatment using the methods of the invention may be any cell that expresses a PLG gene. A cell suitable for use in the methods of the invention may be a mammalian cell, e.g., a primate cell (such as a human cell or a non-human primate cell, e.g., a monkey cell or a chimpanzee cell), a non-primate cell (such as a cow cell, a pig cell, a camel cell, a llama cell, a horse cell, a goat cell, a rabbit cell, a sheep cell, a hamster, a guinea pig cell, a cat cell, a dog cell, a rat cell, a mouse cell, a lion cell, a tiger cell, a bear cell, or a buffalo cell), a bird cell (e.g., a duck cell or a goose cell), or a whale cell. In one embodiment, the cell is a human cell, e.g., a human liver cell.

[0853] PLG expression is inhibited in the cell by at least about 5, 6, 7, 8, 9, 10, 11, 12, 13, 14, 15, 16, 17, 18, 19, 20, 21, 22, 23, 24, 25, 26, 27, 28, 29, 30, 31, 32, 33, 34, 35, 36, 37, 38, 39, 40, 41, 42, 43, 45, 46, 47, 48, 49, 50, 51, 52, 53, 54, 55, 56, 57, 58, 59, 60, 61, 62, 63, 64, 65, 66, 67, 68, 69, 70, 71, 72, 73, 74, 75, 76, 77, 78, 79, 80, 81, 82, 83, 84, 85, 86, 87, 88, 89, 90, 91, 92, 93, 94, 95, 96, 97, 98, 99, or about 100%. In a preferred embodiment, PLG expression is inhibited by at least 20%. In another preferred embodiment, PLG expression is inhibited by about 50%.

[0854] In one embodiment, the in vivo methods of the invention may include administering to a subject a composition containing an iRNA, where the iRNA includes a nucleotide sequence that is complementary to at least a part of an RNA transcript of the PLG gene of the mammal to be treated.

[0855] In another embodiment, the in vivo methods of the invention may include administering to a subject a composition containing a first iRNA agent and a second iRNA agent, where the first iRNA includes a nucleotide sequence that is complementary to at least a part of an RNA transcript of the PLG gene of the mammal to be treated and the second iRNA includes a nucleotide sequence that is complementary to at least a part of an RNA transcript of a second gene of the mammal to be treated.

[0856] When the organism to be treated is a mammal such as a human, the composition can be administered by any means known in the art including, but not limited to oral, intraperitoneal, or parenteral routes, including intracranial (e.g., intraventricular, intraparenchymal and intrathecal), intravenous, intramuscular, subcutaneous, transdermal, airway (aerosol), nasal, rectal, and topical (including buccal and sublingual) administration. In certain embodiments, the compositions are administered by intravenous infusion or injection. In certain embodiments, the compositions are administered by subcutaneous injection.

[0857] In some embodiments, the administration is via a depot injection. A depot injection may release the iRNA in a consistent way over a prolonged time period. Thus, a depot injection may reduce the frequency of dosing needed to obtain a desired effect, e.g., a desired inhibition of PLG, or a therapeutic or prophylactic effect. A depot injection may also provide more consistent serum concentrations. Depot injections may include subcutaneous injections or intramuscular injections. In preferred embodiments, the depot injection is a subcutaneous injection.

[0858] In some embodiments, the administration is via a pump. The pump may be an external pump or a surgically implanted pump. In certain embodiments, the pump is a subcutaneously implanted osmotic pump.

[0859] In other embodiments, the pump is an infusion pump. An infusion pump may be used for intravenous, subcutaneous, arterial, or epidural infusions. In preferred embodiments, the infusion pump is a subcutaneous infusion pump. In other embodiments, the pump is a surgically implanted pump that delivers the iRNA to the liver.

[0860] An iRNA of the invention may be present in a pharmaceutical composition, such as in a suitable buffer solution. The buffer solution may comprise acetate, citrate, prolamine, carbonate, or phosphate, or any combination thereof. In one embodiment, the buffer solution is phosphate buffered saline (PBS). The pH and osmolarity of the buffer solution containing the iRNA can be adjusted such that it is suitable for administering to a subject.

[0861] Alternatively, an iRNA of the invention may be administered as a pharmaceutical composition, such as a dsRNA liposomal formulation.

[0862] The mode of administration may be chosen based upon whether local or systemic treatment is desired and based upon the area to be treated. The route and site of administration may be chosen to enhance targeting.

[0863] In one aspect, the present invention also provides methods for inhibiting the expression of a PLG gene in a mammal. The methods include administering to the mammal a composition comprising a dsRNA that targets a PLG gene in a cell of the mammal, thereby inhibiting expression of the PLG gene in the cell.

[0864] In some embodiments, the methods include administering to the mammal a composition comprising a dsRNA that targets a PLG gene in a cell of the mammal, thereby inhibiting expression of the PLG gene in the cell. In another embodiment, the methods include administering to the mammal a pharmaceutical composition comprising a dsRNA agent that targets a PLG gene in a cell of the mammal.

[0865] In another aspect, the present invention provides use of an iRNA agent or a pharmaceutical composition of the invention for inhibiting the expression of a PLG gene in a mammal.

[0866] In yet another aspect, the present invention provides use of an iRNA agent of the invention targeting a PLG gene or a pharmaceutical composition comprising such an agent in the manufacture of a medicament for inhibiting expression of a PLG gene in a mammal.

[0867] The present invention also provides therapeutic and prophylactic methods which include administering to a subject having, or prone to developing a bleeding disorder, the iRNA agents, pharmaceutical compositions comprising an iRNA agent, or vectors comprising an iRNA of the invention.

[0868] In one aspect, the present invention provides methods of treating a subject having a disorder that would benefit from reduction in PLG expression, e.g., a PLG-associated disease. The treatment methods (and uses) of the invention include administering to the subject, e.g., a human, a therapeutically effective amount of a dsRNA agent that inhibits expression of PLG or a pharmaceutical composition comprising a dsRNA that inhibits expression of PLG, thereby treating the subject.

[0869] In one aspect, the invention provides methods of preventing at least one symptom in a subject having a disorder that would benefit from reduction in PLG expression, e.g., a bleeding disorder. The methods include administering to the subject a prophylactically effective amount of dsRNA agent or a pharmaceutical composition comprising a dsRNA, thereby preventing at least one symptom in the subject.

[0870] In one embodiment, a PLG-associated disease, disorder, or condition is a bleeding disorder. Non-limiting examples of bleeding disorders include hereditary hemorrhagic telangiectasia (HHT), heavy menstrual bleeding (HMB), PAI-1 deficiency, von Willebrand disease, low factor XI levels, platelet defects, hemophilia A, hemophilia B, afibrinogenemia, parahemophilia, low factor VIII levels, low factor IX levels, low factor VII levels, low factor XIII levels, low factor X levels, low factor V levels, low factor II levels, nose bleeds, bleeding gums, easy bruising, postpartum bleeding, or excessive bleeding following surgery.

[0871] The present invention also provides use of a therapeutically effective amount of an iRNA agent of the invention or a pharmaceutical composition comprising a dsRNA that inhibits expression of PLG for treating a subject, e.g., a subject that would benefit from a reduction and/or inhibition of PLG expression, e.g., a PLG-associated disease, e.g., a bleeding disorder.

[0872] In another aspect, the present invention provides use of an iRNA agent, e.g., a dsRNA, of the invention targeting a PLG gene or a pharmaceutical composition comprising an iRNA agent targeting a PLG gene in the manufacture of a medicament for treating a subject, e.g., a subject that would benefit from a reduction and/or inhibition of PLG for expression, e.g., a PLG-associated disease.

[0873] The present invention also provides use of a prophylactically effective amount of an iRNA agent of the invention or a pharmaceutical composition comprising a dsRNA that inhibits expression of PLG for preventing at least one symptom in a subject having a disorder that would benefit from reduction in PLG expression, e.g., a bleeding disorder.

[0874] In another aspect, the present invention provides use of an iRNA agent, e.g., a dsRNA, of the invention targeting a PLG gene or a pharmaceutical composition comprising an iRNA agent targeting a PLG gene in the manufacture of a medicament for preventing at least one symptom in a subject having a disorder that would benefit from reduction in PLG expression, e.g., a bleeding disorder.

[0875] Accordingly, in one aspect, the present invention provides methods of treating a subject having a disorder that would benefit from reduction in PLG expression, e.g., a PLG-associated disease, such as a bleeding disorder (e.g., heavy menstrual bleeding). In one embodiment, the bleeding disorder is hereditary hemorrhagic telangiectasia (HHT), heavy menstrual bleeding (HMB), PAI-1 deficiency, von Willebrand disease, low factor XI levels, platelet defects, hemophilia A, hemophilia B, afibrinogenemia, parahemophilia, low factor VIII levels, low factor IX levels, low factor VII levels, low factor XIII levels, low factor X levels, low factor V levels, low factor II levels, nose bleeds, bleeding gums, easy bruising, postpartum bleeding, or excessive bleeding following surgery.

[0876] In the methods (and uses) of the invention which comprise administering to a subject a first dsRNA agent targeting PLG and a second dsRNA agent, the first and second dsRNA agents may be formulated in the same composition or different compositions and may be administered to the subject in the same composition or in separate compositions.

[0877] In one embodiment, an “iRNA” for use in the methods of the invention is a “dual targeting RNAi agent.” The term “dual targeting RNAi agent” refers to a molecule comprising a first dsRNA agent comprising a complex of ribonucleic acid molecules, having a duplex structure comprising two anti-parallel and substantially complementary nucleic acid strands, referred to as having “sense” and “antisense” orientations with respect to a first target RNA, i.e., a PLG gene, covalently attached to a molecule comprising a second dsRNA agent comprising a complex of ribonucleic acid molecules, having a duplex structure comprising two anti-parallel and substantially complementary nucleic acid strands, referred to as having “sense” and “antisense” orientations with respect to a second target RNA. In some embodiments of the invention, a dual targeting RNAi agent triggers the degradation of the first and the second target RNAs, e.g., mRNAs, through a post-transcriptional gene-silencing mechanism referred to herein as RNA interference or RNAi.

[0878] The dsRNA agent may be administered to the subject at a dose of about 0.1 mg/kg to about 50 mg/kg.

[0879] Typically, a suitable dose will be in the range of about 0.1 mg/kg to about 5.0 mg/kg, preferably about 0.3 mg/kg and about 3.0 mg/kg.

[0880] The iRNA can be administered by intravenous infusion over a period of time, on a regular basis. In certain embodiments, after an initial treatment regimen, the treatments can be administered on a less frequent basis.

[0881] Administration of the iRNA can reduce PLG levels, e.g., in a cell, tissue, blood, urine or other compartment of the patient by at least about 5%, 6, 7, 8, 9, 10, 11, 12, 13, 14, 15, 16, 17, 18, 19, 20, 21, 22, 23, 24, 25, 26, 27, 28, 29, 30, 31, 32, 33, 34, 35, 36, 37, 38, 39, 40, 41, 42, 43, 44, 45, 46, 47, 48, 39, 50, 51, 52, 53, 54, 55, 56, 57, 58, 59, 60, 61, 62, 63, 64, 65, 66, 67, 68, 69, 70, 71, 72, 73, 74, 75, 76, 77, 78, 79, 80, 81, 82, 83, 84, 85, 86, 87, 88, 89, 90, 91, 92, 93, 94, 95, 96, 97, 98, or at least about 99% or more. In a preferred embodiment, administration of the iRNA can reduce PLG levels, e.g., in a cell, tissue, blood, urine or other compartment of the patient by at least 20%. In another preferred embodiment, administration of the iRNA can reduce PLG levels, e.g., in a cell, tissue, blood, urine or other compartment of the patient by about 50%.

[0882] Before administration of a full dose of the iRNA, patients can be administered a smaller dose, such as a 5% infusion reaction, and monitored for adverse effects, such as an allergic reaction. In another example, the patient can be monitored for unwanted immunostimulatory effects, such as increased cytokine (e.g., TNF-alpha or INF-alpha) levels.

[0883] Alternatively, the iRNA can be administered subcutaneously, i.e., by subcutaneous injection. One or more injections may be used to deliver the desired daily dose of iRNA to a subject. The injections may be repeated over a period of time. The administration may be repeated on a regular basis. In certain embodiments, after an initial treatment regimen, the treatments can be administered on a less frequent basis.

[0884] A repeat-dose regimen may include administration of a therapeutic amount of iRNA on a regular basis, such as every other day or to once a year. In certain embodiments, the iRNA is administered about once per week, once every 7-10 days, once every 2 weeks, once every 3 weeks, once every 4 weeks, once every 5 weeks, once every 6 weeks, once every 7 weeks, once every 8 weeks, once every 9 weeks, once every 10 weeks, once every 11 weeks, once every 12 weeks, once per month, once every 2 months, once every 3 months, once per quarter), once every 4 months, once every 5 months, or once every 6 months.

[0885] In one embodiment, the method includes administering a composition featured herein such that expression of the target PLG gene is decreased, such as for about 1, 2, 3, 4, 5, 6, 7, 8, 12, 16, 18, 24 hours, 28, 32, or about 36 hours. In one embodiment, expression of the target PLG gene is decreased for an extended duration, e.g., at least about two, three, four days or more, e.g., about one week, two weeks, three weeks, or four weeks or longer.

[0886] Preferably, the iRNAs useful for the methods and compositions featured herein specifically target RNAs (primary or processed) of the target PLG gene. Compositions and methods for inhibiting the expression of these genes using iRNAs can be prepared and performed as described herein.

[0887] Administration of the dsRNA according to the methods of the invention may result in a reduction of the severity, signs, symptoms, and/or markers of such diseases or disorders in a patient with a PLG-associated disease, disorder, or condition (e.g., a bleeding disorder). By “reduction” in this context is meant a statistically significant decrease in such level. The reduction can be, for example, at least about 5%, 10%, 15%, 20%, 25%, 30%, 35%, 40%, 45%, 50%, 55%, 60%, 65%, 70%, 75%, 80%, 85%, 90%, 95%, or about 100%.

[0888] Efficacy of treatment or prevention of disease can be assessed, for example by measuring disease progression, disease remission, symptom severity, reduction in pain, quality of life, dose of a medication required to sustain a treatment effect, level of a disease marker or any other measurable parameter appropriate for a given disease being treated or targeted for prevention. It is well within the ability of one skilled in the art to monitor efficacy of treatment or prevention by measuring any one of such parameters, or any combination of parameters. For example, efficacy of treatment of a bleeding disorder may be assessed, for example, by periodic monitoring of the amount and/or duration of bleeding. Comparisons of the later readings with the initial readings provide a physician an indication of whether the treatment is effective. It is well within the ability of one skilled in the art to monitor efficacy of treatment or prevention by measuring any one of such parameters, or any combination of parameters. In connection with the administration of an iRNA or pharmaceutical composition thereof, “effective against” a bleeding disorder indicates that administration in a clinically appropriate manner results in a beneficial effect for at least a statistically significant fraction of patients, such as an improvement of symptoms, a cure, a reduction in disease, extension of life, improvement in quality of life, or other effect generally recognized as positive by medical doctors familiar with treating bleeding disorders and the related causes.

[0889] A treatment or preventive effect is evident when there is a statistically significant improvement in one or more parameters of disease status, or by a failure to worsen or to develop symptoms where they would otherwise be anticipated. As an example, a favorable change of at least 10% in a measurable parameter of disease, and preferably at least 20%, 30%, 40%, 50% or more can be indicative of effective treatment.

[0890] Efficacy for a given iRNA drug or formulation of that drug can also be judged using an experimental animal model for the given disease as known in the art.

[0891] The invention further provides methods for the use of a iRNA agent or a pharmaceutical composition of the invention, e.g., for treating a subject that would benefit from reduction and/or inhibition of PLG expression or PLG, e.g., a subject having a PLG-associated disease disorder, or condition, in combination with other pharmaceuticals and/or other therapeutic methods, e.g., with known pharmaceuticals and/or known therapeutic methods, such as, for example, those which are currently employed for treating these disorders. In some embodiments, the invention provides methods for the use of a iRNA agent or a pharmaceutical composition of the invention and an iRNA agent targeting a second target, e.g., for treating a subject that would benefit from reduction and/or inhibition of PLG expression and expression of a second target, e.g., a subject having a PLG-associated disease disorder, or condition (e.g., bleeding disorder), in combination with other pharmaceuticals and/or other therapeutic methods, e.g., with known pharmaceuticals and/or known therapeutic methods, such as, for example, those which are currently employed for treating these disorders.

[0892] For example, in certain embodiments, an iRNA agent or pharmaceutical composition of the invention is administered in combination with, e.g., tranexamic acid (TXA), anti-angiogenic drugs, such as drugs that target the VEGF pathway, oral contraceptive pills (OCP), intrauterine devices (IUDs), such as Mirena IUD and Kyleena IUD, other progestin approaches, endometrial ablation, total or subtotal hysterectomy, myomectomy, uterine artery embolization, human plasma-donor derived Glu-plasminogen, inhibitors of the plasminogen pathway, or a combination of any of the foregoing.

[0893] The iRNA agent and an additional therapeutic agent and/or treatment may be administered at the same time and/or in the same combination, e.g., subcutaneously, or the additional therapeutic agent can be administered as part of a separate composition or at separate times and/or by another method known in the art or described herein.

### VIII. Kits

[0894] The present invention also provides kits for performing any of the methods of the invention. Such kits include one or more RNAi agent(s) and instructions for use, e.g., instructions for inhibiting expression of a PLG in a cell by contacting the cell with an RNAi agent or pharmaceutical composition of the invention in an amount effective to inhibit expression of the PLG. The kits may optionally further comprise means for contacting the cell with the RNAi agent (e.g., an injection device), or means for measuring the inhibition of PLG (e.g., means for measuring the inhibition of PLG mRNA and/or PLG protein). Such means for measuring the inhibition of PLG may comprise a means for obtaining a sample from a subject, such as, e.g., a blood sample. The kits of the invention may optionally further comprise means for administering the RNAi agent(s) to a subject or means for determining the therapeutically effective or prophylactically effective amount.

[0895] Unless otherwise defined, all technical and scientific terms used herein have the same meaning as commonly understood by one of ordinary skill in the art to which this invention belongs. Although methods and materials similar or equivalent to those described herein can be used in the practice or testing of the iRNAs and methods featured in the invention, suitable methods and materials are described below. All publications, patent applications, patents, and other references mentioned herein are incorporated by reference in their entirety. In case of conflict, the present specification, including definitions, will control. In addition, the materials, methods, and examples are illustrative only and not intended to be limiting.

### EXAMPLES

### Example 1

PLG iRNA Design, Synthesis, and Selection

[0896] Nucleic acid sequences provided herein are represented using standard nomenclature. See the abbreviations of Table 2. It will be understood that these monomers, when present in an oligonucleotide, are mutually linked by 5′-3′-phosphodiester bonds. The abbreviations are understood to omit the 3′-phosphate (i.e., they are 3′-OH) when placed at the 3′-terminal position of an oligonucleotide.

TABLE 2
Abbreviations of nucleotide monomers used in nucleic acid sequence representation.

| Abbreviation | Nucleotide(s) |
|---|---|
| A | Adenosine-3′-phosphate |
| Ab | beta-L-adenosine-3′-phosphate |
| Abs | beta-L-adenosine-3′-phosphorothioate |
| Af | 2′-fluoroadenosine-3′-phosphate |
| Afs | 2′-fluoroadenosine-3′-phosphorothioate |
| As | adenosine-3′-phosphorothioate |
| (A2p) | adenosine-2′-phosphate |
| (A2ps) | adenosine-2′-phosphorothioate |
| C | cytidine-3′-phosphate |
| Cb | beta-L-cytidine-3′-phosphate |
| Cbs | beta-L-cytidine-3′-phosphorothioate |
| Cf | 2′-fluorocytidine-3′-phosphate |
| Cfs | 2′-fluorocytidine-3′-phosphorothioate |
| Cs | cytidine-3′-phosphorothioate |
| (C2p) | cytidine-2′-phosphate |
| (C2ps) | cytidine-2′-phosphorothioate |
| G | guanosine-3′-phosphate |
| Gb | beta-L-guanosine-3′-phosphate |
| Gbs | beta-L-guanosine-3′-phosphorothioate |
| Gf | 2′-fluoroguanosine-3′-phosphate |
| Gfs | 2′-fluoroguanosine-3′-phosphorothioate |
| Gs | guanosine-3′-phosphorothioate |
| (G2p) | guanosine-2′-phosphate |
| (G2ps) | guanosine-2′-phosphorothioate |
| T | 5′-methyluridine-3′-phosphate |
| Tf | 2′-fluoro-5-methyluridine-3′-phosphate |
| Tfs | 2′-fluoro-5-methyluridine-3′-phosphorothioate |
| Ts | 5-methyluridine-3′-phosphorothioate |
| U | Uridine-3′-phosphate |
| Uf | 2′-fluorouridine-3′-phosphate |
| Ufs | 2′-fluorouridine-3′-phosphorothioate |
| Us | uridine-3′-phosphorothioate |
| (U2p) | uridine-2′-phosphate |
| (U2ps) | uridine-2′-phosphorothioate |
| N | any nucleotide (G, A, C, T or U) |
| a | 2′-O-methyladenosine-3′-phosphate |
| as | 2′-O-methyladenosine-3′-phosphorothioate |
| c | 2′-O-methylcytidine-3′-phosphate |
| cs | 2′-O-methylcytidine-3′-phosphorothioate |
| g | 2′-O-methylguanosine-3′-phosphate |
| gs | 2′-O-methylguanosine-3′-phosphorothioate |
| t | 2′-O-methyl-5-methyluridine-3′-phosphate |
| ts | 2′-O-methyl-5-methyluridine-3′-phosphorothioate |
| u | 2′-O-methyluridine-3′-phosphate |
| us | 2′-O-methyluridine-3′-phosphorothioate |
| s | phosphorothioate linkage |
| L96¹ | N-[tris(GalNAc-alkyl)-amidodecanoyl)]-4-hydroxyprolinol; or (2S,4R)-1-[29-[[2- |
| | (acetylamino)-2-deoxy-β-D-galactopyranosyl]oxy]-14,14-bis[[3-[3-[5-[2- |
| | (acetylamino)-2-deoxy-β-D-galactopyranosyl]oxy]-1-oxopentyl] amino]propyl]amin |
| | 3-oxopropoxy]methyl]-1,12,19,25-tetraoxo-16-oxa-13,20,24-triazanonacos-1-yl]-4- |
| | hydroxy-2-hydroxymethylpyrrolidine |
| uL96² | 2′-O-methyluridine-3′-phosphate ((2S,4R)-1-[29-[[2-(acetylamino)-2-deoxy-β-D- |
| | galactopyranosyl]oxy]-14,14-bis[[3-[[3-[[5-[[2-(acetylamino)-2-deoxy-β-D- |
| | galactopyranosyl]oxy]-1-oxopentyl]amino]propyl]amino]-3-oxopropoxy]methyl]- |
| | 1,12,19,25-tetraoxo-16-oxa-13,20,24-triazanonacos-1-yl]-4-hydroxy-2- |
| | pyrrolidinyl)methyl ester |
| P | Phosphate |
| VP | Vinyl-phosphate |
| dA | 2′-deoxyadenosine-3′-phosphate |
| dAs | 2′-deoxyadenosine-3′-phosphorothioate |
| dC | 2′-deoxycytidine-3′-phosphate |
| dCs | 2′-deoxycytidine-3′-phosphorothioate |
| dG | 2′-deoxyguanosine-3′-phosphate |
| dGs | 2′-deoxyguanosine-3-phosphorothioate |
| dT | 2′-deoxythymidine-3′-phosphate |
| dTs | 2′-deoxythymidine-3′-phosphorothioate |
| dU | 2′-deoxyuridine |
| dUs | 2′-deoxyuridine-3′-phosphorothioate |
| Y34 | 2-hydroxymethyl-tetrahydrofurane-4-methoxy-3-phosphate (abasic 2′-OMe |
| | furanose) |
| Y44 | inverted abasic DNA (2-hydroxymethyl-tetrahydrofurane-5-phosphate) |
| (Agn) | Adenosine-glycol nucleic acid (GNA) |
| (Cgn) | Cytidine-glycol nucleic acid (GNA) |
| (Ggn) | Guanosine-glycol nucleic acid (GNA) |
| (Tgn) | Thymidine-glycol nucleic acid (GNA) S-Isomer |
| (Aam) | 2′-O-(N-methylacetamide)adenosine-3′-phosphate |
| (Aams) | 2′-O-(N-methylacetamide)adenosine-3′-phosphorothioate |
| (Gam) | 2′-O-(N-methylacetamide)guanosine-3′-phosphate |
| (Gams) | 2′-O-(N-methylacetamide)guanosine-3′-phosphorothioate |
| (Tam) | 2′-O-(N-methylacetamide)thymidine-3′-phosphate |
| (Tams) | 2′-O-(N-methylacetamide)thymidine-3′-phosphorothioate |
| (Aeo) | 2′-O-methoxyethyladenosine-3′-phosphate |
| (Aeos) | 2′-O-methoxyethyladenosine-3′-phosphorothioate |
| (Geo) | 2′-O-methoxyethylguanosine-3′-phosphate |
| (Geos) | 2′-O-methoxyethylguanosine-3′-phosphorothioate |
| (Teo) | 2′-O-methoxyethyl-5-methyluridine-3′-phosphate |
| (Teos) | 2′-O-methoxyethyl-5-methyluridine-3′-phosphorothioate |
| (m5Ceo) | 2′-O-methoxyethyl-5-methylcytidine-3′-phosphate |
| (m5Ceos) | 2′-O-methoxyethyl-5-methylcytidine-3′-phosphorothioate |
| (A3m) | 3′-O-methyladenosine-2′-phosphate |
| (A3mx) | 3′-O-methyl-xylofuranosyladenosine-2′-phosphate |
| (G3m) | 3′-O-methylguanosine-2′-phosphate |
| (G3mx) | 3′-O-methyl-xylofuranosylguanosine-2′-phosphate |
| (C3m) | 3′-O-methylcytidine-2′-phosphate |
| (C3mx) | 3′-O-methyl-xylofuranosylcytidine-2′-phosphate |
| (U3m) | 3′-O-methyluridine-2′-phosphate |
| U3mx) | 3′-O-methyl-xylofuranosyluridine-2′-phosphate |
| (m5Cam) | 2′-O-(N-methylacetamide)-5-methylcytidine-3′-phosphate |
| (m5Cams) | 2′-O-(N-methylacetamide)-5-methylcytidine-3′-phosphorothioate |
| (Chd) | 2′-O-hexadecyl-cytidine-3′-phosphate |
| (Chds) | 2′-O-hexadecyl-cytidine-3′-phosphorothioate |
| (Uhd) | 2′-O-hexadecyl-uridine-3′-phosphate |
| (Uhds) | 2′-O-hexadecyl-uridine-3′-phosphorothioate |
| (pshe) | Hydroxyethylphosphorothioate |

¹The chemical structure of L96 is as follows: [chemical structure]
²The chemical structure of uL96 is as follows:

[chemical structure]

### Experimental Methods

[0897] This Example describes methods for the design, synthesis, and selection of PLG iRNA agents.

### Bioinformatics

[0898] Source of reagents Where the source of a reagent is not specifically given herein, such reagent can be obtained from any supplier of reagents for molecular biology at a quality/purity standard for application in molecular biology.

### Transcripts

[0899] A set of siRNAs targeting the human plasminogen gene (PLG; human NCBI refseqID NM_000301.5; NCBI GeneID: 5340; and human NCBI refseqID NM_001168338.1) were designed using custom R and Python scripts. The human NM_000301.5 REFSEQ mRNA has a length of 3530 bases and the human NM_001168338.1 refseq mRNA has a length of 1200 bases.

### siRNA Synthesis

[0900] siRNAs were synthesized and annealed using routine methods known in the art.

[0901] Briefly, siRNA sequences were synthesized at 1 μmol scale on a Mermade 192 synthesizer (BioAutomation) using the solid support mediated phosphoramidite chemistry. The solid support was controlled pore glass (500 A) loaded with custom GalNAc ligand or universal solid support (AM biochemical). Ancillary synthesis reagents, 2′-F and 2′-O-Methyl RNA and deoxy phosphoramidites were obtained from Thermo-Fisher (Milwaukee, WI) and Hongene (China). 2′F 2′-O-Methyl, GNA (glycol nucleic acids), 5′phosphate and other modifications were introduced using the corresponding phosphoramidites. Synthesis of 3′ GalNAc conjugated single strands was performed on a GalNAc modified CPG support. Custom CPG universal solid support was used for the synthesis of antisense single strands. Coupling time for all phosphoramidites (100 mM in acetonitrile) was 5 min employing 5-Ethylthio-1H-tetrazole (ETT) as activator (0.6 M in acetonitrile). Phosphorothioate linkages were generated using a 50 mM solution of 3-((Dimethylamino-methylidene) amino)-3H-1,2,4-dithiazole-3-thione (DDTT, obtained from Chemgenes (Wilmington, MA, USA)) in anhydrous acetonitrile/pyridine (1:1 v/v). Oxidation time was 3 minutes. All sequences were synthesized with final removal of the DMT group (“DMT off”).

[0902] Upon completion of the solid phase synthesis, oligoribonucleotides were cleaved from the solid support and deprotected in sealed 96 deep well plates using 200 μL Aqueous Methylamine reagents at 60° C. for 20 minutes. For sequences containing 2′ ribo residues (2′-OH) that are protected with a tert-butyl dimethyl silyl (TBDMS) group, a second step deprotection was performed using TEA.3HF (triethylamine trihydro fluoride) reagent. To the methylamine deprotection solution, 200 μL of dimethyl sulfoxide (DMSO) and 300ul TEA.3HF reagent was added and the solution was incubated for additional 20 min at 60° C. At the end of cleavage and deprotection step, the synthesis plate was allowed to come to room temperature and was precipitated by addition of 1 mL of acetontile: ethanol mixture (9:1). The plates were cooled at −80° C. for 2 hours, supernatant decanted carefully with the aid of a multi-channel pipette. The oligonucleotide pellet was re-suspended in 20 mM NaOAc buffer and were desalted using a 5 mL HiTrap size exclusion column (GE Healthcare) on an AKTA Purifier System equipped with an A905 autosampler and a Frac 950 fraction collector. Desalted samples were collected in 96-well plates. Samples from each sequence were analyzed by LC-MS to confirm the identity, UV (260 nm) for quantification and a selected set of samples by IEX chromatography to determine purity.

[0903] Annealing of single strands was performed on a Tecan liquid handling robot. Equimolar mixture of sense and antisense single strands were combined and annealed in 96 well plates. After combining the complementary single strands, the 96-well plate was sealed tightly and heated in an oven at 100° C. for 10 minutes and allowed to come slowly to room temperature over a period 2-3 hours. The concentration of each duplex was normalized to 10 M in 1X PBS and then submitted for in vitro screening assays.

[0904] A detailed list of the unmodified nucleotide sequences of the sense strand and antisense strand sequences is shown in Tables 3, 4, 7, and 8A.

[0905] A detailed list of the modified nucleotide sequences of the sense strand and antisense strand sequences is shown in Tables 5, 6, and 81B.

TABLE 3
Unmodified Sense and Antisense Strand Sequences of Human PLG dsRNA Agents

| | Sense | | | Antisense | | |
|---|---|---|---|---|---|---|
| Duplex | Sequence | SEQ ID | Range in | Sequence | SEQ ID | Range in |
| Name | 5′ to 3′ | NO: | NM_000301.5 | 5′ to 3′ | NO: | NM_000301.5 |
| AD-2042815 | GUCAACAACAUC | 9 | 5-25 | AAAUCCCAGGAU | 118 | 3-25 |
| | CUGGGAUUU | | | GUUGUUGACUU | | |
| AD-2042896 | CUUUUAUUUCUG | 10 | 92-112 | ACCUGAUUUCAG | 119 | 90-112 |
| | AAAUCAGGU | | | AAAUAAAAGAA | | |
| AD-2042932 | GAUGACUAUGU | 11 | 128-148 | AUGGGUAUUCAC | 120 | 126-148 |
| | GAAUACCCAU | | | AUAGUCAUCCA | | |
| AD-2042938 | UCACUGUUCAGU | 12 | 155-175 | AUUAGUGACACU | 121 | 153-175 |
| | GUCACUAAU | | | GAACAGUGAAG | | |
| AD-2042970 | AGCAGGAAGUA | 13 | 187-207 | AAUUCUUCUAUA | 122 | 185-207 |
| | UAGAAGAAUU | | | CUUCCUGCUCC | | |
| AD-2042987 | AAUGUGCAGCAA | 14 | 204-224 | ACUCACAUUUUG | 123 | 202-224 |
| | AAUGUGAGU | | | CUGCACAUUCU | | |
| AD-2043006 | GGAGGACGAAG | 15 | 223-243 | AAGGUGAAUUCU | 124 | 221-243 |
| | AAUUCACCUU | | | UCGUCCUCCUC | | |
| AD-2043032 | CAUUCCAAUAUC | 16 | 249-269 | AUUUACUGUGAU | 125 | 247-269 |
| | ACAGUAAAU | | | AUUGGAAUGCC | | |
| AD-2043052 | GAGCAACAAUGU | 17 | 269-289 | AAUUAUCACACA | 126 | 267-289 |
| | GUGAUAAUU | | | UUGUUGCUCUU | | |
| AD-2043072 | GGCUGAAAACAG | 18 | 289-309 | AAGGACUUCCUG | 127 | 287-309 |
| | GAAGUCCUU | | | UUUUCAGCCAU | | |
| AD-2043088 | UCCUCCAUAAUC | 19 | 305-325 | AAUCCUAAUGAU | 128 | 303-325 |
| | AUUAGGAUU | | | UAUGGAGGACU | | |
| AD-2043108 | GAGAGAUGUAG | 20 | 325-345 | ACAAAUAAAACU | 129 | 323-345 |
| | UUUUAUUUGU | | | ACAUCUCUCAU | | |
| AD-2043131 | GUAUCUCUCAGA | 21 | 355-375 | AUCUUGCACUCU | 130 | 353-375 |
| | GUGCAAGAU | | | GAGAGAUACAC | | |
| AD-2043150 | ACUGGGAAUGG | 22 | 374-394 | AUAGUUCUUUCC | 131 | 372-394 |
| | AAAGAACUAU | | | AUUCCCAGUCU | | |
| AD-2043174 | GGGACGAUGUCC | 23 | 398-418 | AUUUGUUUUGGA | 132 | 396-418 |
| | AAAACAAAU | | | CAUCGUCCCUC | | |
| AD-2043218 | GACCUAGAUUCU | 24 | 462-482 | AAGCAGGUGAGA | 133 | 460-482 |
| | CACCUGCUU | | | AUCUAGGUCUG | | |
| AD-2043249 | UGCAGGAAUCCA | 25 | 515-535 | AUCGUUGUCUGG | 134 | 513-535 |
| | GACAACGAU | | | AUUCCUGCAGU | | |
| AD-2043266 | GCUAUACUACUG | 26 | 552-572 | AUUCUGGAUCAG | 135 | 550-572 |
| | AUCCAGAAU | | | UAGUAUAGCAC | | |
| AD-2043291 | AUAUGACUACUG | 27 | 577-597 | AGAAUGUCGCAG | 136 | 575-597 |
| | CGACAUUCU | | | UAGUCAUAUCU | | |
| AD-2043308 | UUCUUGAGUGU | 28 | 594-614 | AUUCCUCUUCAC | 137 | 592-614 |
| | GAAGAGGAAU | | | ACUCAAGAAUG | | |
| AD-2043323 | AGGAAUGUAUG | 29 | 609-629 | AACUGCAAUGCA | 138 | 607-629 |
| | CAUUGCAGUU | | | UACAUUCCUCU | | |
| AD-2043339 | CAGUGGAGAAA | 30 | 625-645 | ACGUCAUAGUUU | 139 | 623-645 |
| | ACUAUGACGU | | | UCUCCACUGCA | | |
| AD-2043358 | GGCAAAAUUUCC | 31 | 644-664 | AAUGGUCUUGGA | 140 | 642-664 |
| | AAGACCAUU | | | AAUUUUGCCGU | | |
| AD-2043419 | ACGCUCAUGGAU | 32 | 705-725 | AAGGAAUGUAUC | 141 | 703-725 |
| | ACAUUCCUU | | | CAUGAGCGUGU | | |
| AD-2043434 | UUCCUUCCAAAU | 33 | 720-740 | AGUUUGGAAAUU | 142 | 718-740 |
| | UUCCAAACU | | | UGGAAGGAAUG | | |
| AD-2043456 | GAACCUGAAGAA | 34 | 742-762 | AAGUAAUUCUUC | 143 | 740-762 |
| | GAAUUACUU | | | UUCAGGUUCUU | | |
| AD-2043483 | CUUGGUGUUUCA | 35 | 789-809 | AGUCGGUGGUGA | 144 | 787-809 |
| | CCACCGACU | | | AACACCAAGGC | | |
| AD-2043494 | CUGGGAACUUUG | 36 | 820-840 | AGGAUGUCACAA | 145 | 818-840 |
| | UGACAUCCU | | | AGUUCCCAGCG | | |
| AD-2043505 | CACCUCCACCAU | 37 | 852-872 | AACCAGAAGAUG | 146 | 850-872 |
| | CUUCUGGUU | | | GUGGAGGUGUU | | |
| AD-2043525 | CCCACCUACCAG | 38 | 872-892 | AUUCAGACACUG | 147 | 870-892 |
| | UGUCUGAAU | | | GUAGGUGGGAC | | |
| AD-2043540 | CUGAAGGGAACA | 39 | 887-907 | AUUUUCACCUGU | 148 | 885-907 |
| | GGUGAAAAU | | | UCCCUUCAGAC | | |
| AD-2043565 | GCGGGAAUGUG | 40 | 912-932 | AGGUAACAGCCA | 149 | 910-932 |
| | GCUGUUACCU | | | CAUUCCCGCGA | | |
| AD-2043617 | ACAGGACACCAG | 41 | 984-1004 | AGAAGUUUUCUG | 150 | 982-1004 |
| | AAAACUUCU | | | GUGUCCUGUUA | | |
| AD-2043627 | AUUUGGAUGAA | 42 | 1014-1034 | AGCAGUAGUUUU | 151 | 1012-1034 |
| | AACUACUGCU | | | CAUCCAAAUUU | | |
| AD-2043644 | UGCCGCAAUCCU | 43 | 1031-1051 | AUUUCCGUCAGG | 152 | 1029-1051 |
| | GACGGAAAU | | | AUUGCGGCAGU | | |
| AD-2043656 | GUGCCAUACAAC | 44 | 1063-1083 | AGGCUGUUGGUU | 153 | 1061-1083 |
| | CAACAGCCU | | | GUAUGGCACCA | | |
| AD-2043689 | GUACUGUAAGA | 45 | 1096-1116 | AAGGACGGUAUC | 154 | 1094-1116 |
| | UACCGUCCUU | | | UUACAGUACUC | | |
| AD-2043789 | ACAGGAAAGAA | 46 | 1241-1261 | AGACUGACACUU | 155 | 1239-1261 |
| | GUGUCAGUCU | | | CUUUCCUGUGG | | |
| AD-2043804 | CAGUCUUGGUCA | 47 | 1256-1276 | AGUCAUAGAUGA | 156 | 1254-1276 |
| | UCUAUGACU | | | CCAAGACUGAC | | |
| AD-2043843 | UGCUGGCCUGAC | 48 | 1315-1335 | AAGUUCAUUGUC | 157 | 1313-1335 |
| | AAUGAACUU | | | AGGCCAGCAUU | | |
| AD-2043869 | GGAAUCCAGAUG | 49 | 1341-1361 | AUUUAUCGGCAU | 158 | 1339-1361 |
| | CCGAUAAAU | | | CUGGAUUCCUG | | |
| AD-2043874 | CUGGUGUUUUAC | 50 | 1366-1386 | AGGUCUGUGGUA | 159 | 1364-1386 |
| | CACAGACCU | | | AAACACCAGGG | | |
| AD-2043886 | GGGAGUACUGCA | 51 | 1398-1418 | AUUUCAGGUUGC | 160 | 1396-1418 |
| | ACCUGAAAU | | | AGUACUCCCAC | | |
| AD-2043916 | GAACAGAAGCGA | 52 | 1428-1448 | AUACAACACUCG | 161 | 1426-1448 |
| | GUGUUGUAU | | | CUUCUGUUCCU | | |
| AD-2043942 | CCGCCUGUUGUC | 53 | 1454-1474 | AGGAAGCAGGAC | 162 | 1452-1474 |
| | CUGCUUCCU | | | AACAGGCGGAG | | |
| AD-2043959 | UCCAGAUGUAGA | 54 | 1471-1491 | AAAGGAGUCUCU | 163 | 1469-1491 |
| | GACUCCUUU | | | ACAUCUGGAAG | | |
| AD-2043979 | CCGAAGAAGACU | 55 | 1491-1511 | AAAACAUACAGU | 164 | 1489-1511 |
| | GUAUGUUUU | | | CUUCUUCGGAA | | |
| AD-2044060 | UAGACACAGCAU | 56 | 1594-1614 | AGAGUGAAAAUG | 165 | 1592-1614 |
| | UUUCACUCU | | | CUGUGUCUAUG | | |
| AD-2044075 | CACUCCAGAGAC | 57 | 1609-1629 | AGUGGAUUUGUC | 166 | 1607-1629 |
| | AAAUCCACU | | | UCUGGAGUGAA | | |
| AD-2044119 | GCCGUAACCCUG | 58 | 1653-1673 | AAUCACCAUCAG | 167 | 1651-1673 |
| | AUGGUGAUU | | | GGUUACGGCAG | | |
| AD-2044153 | GUGCUACACGAC | 59 | 1687-1707 | AUUGGAUUUGUC | 168 | 1685-1707 |
| | AAAUCCAAU | | | GUGUAGCACCA | | |
| AD-2044168 | UCCAAGAAAACU | 60 | 1702-1722 | AAGUCGUAAAGU | 169 | 1700-1722 |
| | UUACGACUU | | | UUUCUUGGAUU | | |
| AD-2044184 | GACUACUGUGAU | 61 | 1718-1738 | AUGAGGGACAUC | 170 | 1716-1738 |
| | GUCCCUCAU | | | ACAGUAGUCGU | | |
| AD-2044267 | GCAAGUCAGUCU | 62 | 1843-1863 | AUUGUUCUAAGA | 171 | 1841-1863 |
| | UAGAACAAU | | | CUGACUUGCCA | | |
| AD-2044282 | AACAAGGUUUG | 63 | 1858-1878 | AAGUGCAUUCCA | 172 | 1856-1878 |
| | GAAUGCACUU | | | AACCUUGUUCU | | |
| AD-2044325 | UGCCCACUGCUU | 64 | 1921-1941 | AACUUCUCCAAG | 173 | 1919-1941 |
| | GGAGAAGUU | | | CAGUGGGCAGC | | |
| AD-2044364 | ACCAAGAAGUGA | 65 | 1980-2000 | AUUCGAGAUUCA | 174 | 1978-2000 |
| | AUCUCGAAU | | | CUUCUUGGUGU | | |
| AD-2044384 | CCGCAUGUUCAG | 66 | 2000-2020 | AUCUAUUUCCUG | 175 | 1998-2020 |
| | GAAAUAGAU | | | AACAUGCGGUU | | |
| AD-2044433 | GAAAAGAUAUU | 67 | 2049-2069 | AUAGCAAGGCAA | 176 | 2047-2069 |
| | GCCUUGCUAU | | | UAUCUUUUCGU | | |
| AD-2044448 | UGCUAAAGCUAA | 68 | 2064-2084 | AAGGACUGCUUA | 177 | 2062-2084 |
| | GCAGUCCUU | | | GCUUUAGCAAG | | |
| AD-2044472 | UCAUCACUGACA | 69 | 2088-2108 | AGAUUACUUUGU | 178 | 2086-2108 |
| | AAGUAAUCU | | | CAGUGAUGACG | | |
| AD-2044516 | CGAAUGUUUCAU | 70 | 2152-2172 | AAGCCAGUGAUG | 179 | 2150-2172 |
| | CACUGGCUU | | | AAACAUUCGGU | | |
| AD-2044519 | GAGAAACCCAAG | 71 | 2175-2195 | AAAAAGUACCUU | 180 | 2173-2195 |
| | GUACUUUUU | | | GGGUUUCUCCC | | |
| AD-2044569 | CCUGUGAUUGAG | 72 | 2225-2245 | AACUUUAUUCUC | 181 | 2223-2245 |
| | AAUAAAGUU | | | AAUCACAGGGA | | |
| AD-2044594 | AUCGCUAUGAGU | 73 | 2250-2270 | AAUUCAGAAACU | 182 | 2248-2270 |
| | UUCUGAAUU | | | CAUAGCGAUUG | | |
| AD-2044609 | UGAAUGGAAGA | 74 | 2265-2285 | AGGAUUGGACUC | 183 | 2263-2285 |
| | GUCCAAUCCU | | | UUCCAUUCAGA | | |
| AD-2044689 | GGUCCUCUGGUU | 75 | 2345-2365 | AUCGAAGCAAAC | 184 | 2343-2365 |
| | UGCUUCGAU | | | CAGAGGACCUC | | |
| AD-2044740 | GUCUAUGUUCGU | 76 | 2435-2455 | ACUUGAAACACG | 185 | 2433-2455 |
| | GUUUCAAGU | | | AACAUAGACAC | | |
| AD-2044780 | GAGUGAUGAGA | 77 | 2475-2495 | AUUAAUUAUUUC | 186 | 2473-2495 |
| | AAUAAUUAAU | | | UCAUCACUCCC | | |
| AD-2044815 | GACGCACUGACU | 78 | 2513-2533 | AUCUAGGUGAGU | 187 | 2511-2533 |
| | CACCUAGAU | | | CAGUGCGUCAC | | |
| AD-2044857 | UAGCAUGCUGGA | 79 | 2555-2575 | ACAGUUAUUUCC | 188 | 2553-2575 |
| | AAUAACUGU | | | AGCAUGCUAAA | | |
| AD-2044882 | AAUCAAACGAAG | 80 | 2580-2600 | AGACAGUGUCUU | 189 | 2578-2600 |
| | ACACUGUCU | | | CGUUUGAUUAC | | |
| AD-2044889 | ACCAGCUACGCC | 81 | 2607-2627 | ACGAGGUUUGGC | 190 | 2605-2627 |
| | AAACCUCGU | | | GUAGCUGGUAG | | |
| AD-2044905 | CUCGGCAUUUUU | 82 | 2623-2643 | AAUAACACAAAA | 191 | 2621-2643 |
| | UGUGUUAUU | | | AAUGCCGAGGU | | |
| AD-2044926 | GACUGCUGGAUU | 83 | 2648-2668 | AUACUACAGAAU | 192 | 2646-2668 |
| | CUGUAGUAU | | | CCAGCAGUCAG | | |
| AD-2044941 | UAGUAAGGUGA | 84 | 2663-2683 | AAUAGCUAUGUC | 193 | 2661-2683 |
| | CAUAGCUAUU | | | ACCUUACUACA | | |
| AD-2044971 | UCUGUACUUAAC | 85 | 2703-2723 | AAAAUCAAAGUU | 194 | 2701-2723 |
| | UUUGAUUUU | | | AAGUACAGAGU | | |
| AD-2044995 | AUUUUGGUUUU | 86 | 2729-2749 | AUUGAAGACCAA | 195 | 2727-2749 |
| | GGUCUUCAAU | | | AACCAAAAUUU | | |
| AD-2045010 | UUCAACAUUUUC | 87 | 2744-2764 | AAAGAGCAUGAA | 196 | 2742-2764 |
| | AUGCUCUUU | | | AAUGUUGAAGA | | |
| AD-2045019 | CACCAAUUUUUA | 88 | 2773-2793 | AUGCCCAUUUAA | 197 | 2771-2793 |
| | AAUGGGCAU | | | AAAUUGGUGGG | | |
| AD-2045030 | AGCUGCUUUUGA | 89 | 2806-2826 | AGUUCCUUAUCA | 198 | 2804-2826 |
| | UAAGGAACU | | | AAAGCAGCUAA | | |
| AD-2045052 | CUGCACAAAGGA | 90 | 2828-2848 | ACUGCUCAGUCC | 199 | 2826-2848 |
| | CUGAGCAGU | | | UUUGUGCAGCU | | |
| AD-2045080 | GAAGUUGUCCAC | 91 | 2876-2896 | AGUAAAUGCGUG | 200 | 2874-2896 |
| | GCAUUUACU | | | GACAACUUCUU | | |
| AD-2045096 | UUACCUCAUCAG | 92 | 2892-2912 | ACUCGUUAGCUG | 201 | 2890-2912 |
| | CUAACGAGU | | | AUGAGGUAAAU | | |
| AD-2045120 | UGACAUGCAUUU | 93 | 2916-2936 | AGACAGUAAAAA | 202 | 2914-2936 |
| | UUACUGUCU | | | UGCAUGUCAAG | | |
| AD-2045134 | CUGUCUUUAUUC | 94 | 2931-2951 | AAGUGUCAGGAA | 203 | 2929-2951 |
| | CUGACACUU | | | UAAAGACAGUA | | |
| AD-2045152 | CUGAGAUGAAU | 95 | 2949-2969 | AUUUGAAAACAU | 204 | 2947-2969 |
| | GUUUUCAAAU | | | UCAUCUCAGUG | | |
| AD-2045167 | UCAAAGCUGCAA | 96 | 2964-2984 | ACAUACAUGUUG | 205 | 2962-2984 |
| | CAUGUAUGU | | | CAGCUUUGAAA | | |
| AD-2045172 | UCAUGCAAACCG | 97 | 2989-3009 | AAACAGAAUCGG | 206 | 2987-3009 |
| | AUUCUGUUU | | | UUUGCAUGACU | | |
| AD-2045191 | UAUUGGGAAUG | 98 | 3008-3028 | AGACAGAUUUCA | 207 | 3006-3028 |
| | AAAUCUGUCU | | | UUCCCAAUAAC | | |
| AD-2045210 | CACCGACUGCUU | 99 | 3027-3047 | ACUCAAGUCAAG | 208 | 3025-3047 |
| | GACUUGAGU | | | CAGUCGGUGAC | | |
| AD-2045233 | CUGUAUAUGAU | 100 | 3070-3090 | AGUUCACUCCAU | 209 | 3068-3090 |
| | GGAGUGAACU | | | CAUAUACAGCU | | |
| AD-2045262 | GAUGUGUAACAC | 101 | 3099-3119 | AUUGGUCUUGUG | 210 | 3097-3119 |
| | AAGACCAAU | | | UUACACAUCCA | | |
| AD-2045281 | ACUGAGAGUCUG | 102 | 3118-3138 | AAUAACAUUCAG | 211 | 3116-3138 |
| | AAUGUUAUU | | | ACUCUCAGUUG | | |
| AD-2045288 | CACACGUGAGUC | 103 | 3145-3165 | ACAAUCCUAGAC | 212 | 3143-3165 |
| | UAGGAUUGU | | | UCACGUGUGCC | | |
| AD-2045313 | AAGAGCAUGUA | 104 | 3170-3190 | AUUGUUCAUUUA | 213 | 3168-3190 |
| | AAUGAACAAU | | | CAUGCUCUUGG | | |
| AD-2045328 | AACAACAAGCAA | 105 | 3185-3205 | AUUCAAUAUUUG | 214 | 3183-3205 |
| | AUAUUGAAU | | | CUUGUUGUUCA | | |
| AD-2045354 | CCACUUAUUUCC | 106 | 3211-3231 | AUAGCAAUGGGA | 215 | 3209-3231 |
| | CAUUGCUAU | | | AAUAAGUGGUC | | |
| AD-2045381 | GCCCGGUUUUGA | 107 | 3238-3258 | AAGACUGUUUCA | 216 | 3236-3258 |
| | AACAGUCUU | | | AAACCGGGCAG | | |
| AD-2045414 | UCACAGGAGAAU | 108 | 3271-3291 | ACACAGGUCAUU | 217 | 3269-3291 |
| | GACCUGUGU | | | CUCCUGUGACC | | |
| AD-2045434 | GGAGAGAUACA | 109 | 3291-3311 | AUUCUAAACAUG | 218 | 3289-3311 |
| | UGUUUAGAAU | | | UAUCUCUCCCA | | |
| AD-2045448 | GAAGAGAAAGG | 110 | 3312-3332 | AUGCCUUUGUCC | 219 | 3310-3332 |
| | ACAAAGGCAU | | | UUUCUCUUCCU | | |
| AD-2045468 | CACGUUUUACCA | 111 | 3332-3352 | AAUUUUAAAUGG | 220 | 3330-3352 |
| | UUUAAAAUU | | | UAAAACGUGUG | | |
| AD-2045506 | CAAUGCAACAGU | 112 | 3393-3413 | AGUAAGAUGACU | 221 | 3391-3413 |
| | CAUCUUACU | | | GUUGCAUUGUU | | |
| AD-2045522 | UUACAGCAGAGA | 113 | 3409-3429 | AUCUGCAUUUCU | 222 | 3407-3429 |
| | AAUGCAGAU | | | CUGCUGUAAGA | | |
| AD-2045537 | GCAGAGAAAAGC | 114 | 3424-3444 | AGCAGUUUUGCU | 223 | 3422-3444 |
| | AAAACUGCU | | | UUUCUCUGCAU | | |
| AD-2045562 | ACUGUGAAUAA | 115 | 3449-3469 | AAUUCACCCUUU | 224 | 3447-3469 |
| | AGGGUGAAUU | | | AUUCACAGUCA | | |
| AD-2045583 | UAGUCUCAAAUC | 116 | 3470-3490 | AUCUUUGAGGAU | 225 | 3468-3490 |
| | CUCAAAGAU | | | UUGAGACUACA | | |
| AD-2045600 | AGAGCUGUGUU | 117 | 3487-3507 | AAAUGAAAUAAA | 226 | 3485-3507 |
| | UAUUUCAUUU | | | CACAGCUCUUU | | |

TABLE 4
Unmodified Sense and Antisense Strand Sequences of Human PLG dsRNA Agents

| | Sense | | Range in | Antisense | | Range in |
|---|---|---|---|---|---|---|
| Duplex | Sequence | SEQ ID | NM_ | Sequence | SEQ ID | NM_ |
| Name | 5′ to 3′ | NO: | 001168338.1 | 5′ to 3′ | NO: | 001168338.1 |
| AD-2055723 | ACUUAAUUUGAC | 227 | 10-30 | AACCAGAUAGUC | 253 | 8-30 |
| | UAUCUGGUU | | | AAAUUAAGUUA | | |
| AD-2055760 | CUCAUGUAAGUC | 228 | 47-67 | AAUGUUGUUGAC | 254 | 45-67 |
| | AACAACAUU | | | UUACAUGAGAG | | |
| AD-2055779 | UAAGACAUUCCC | 229 | 521-541 | AAGAUGAAAGGG | 255 | 519-541 |
| | UUUCAUCUU | | | AAUGUCUUACC | | |
| AD-2055794 | CAUCUUUGUGUU | 230 | 536-556 | AAGUAGAUGAAC | 256 | 534-556 |
| | CAUCUACUU | | | ACAAAGAUGAA | | |
| AD-2055857 | AUGCUUCUCAAG | 231 | 619-639 | AAUAAGGGACUU | 257 | 617-639 |
| | UCCCUUAUU | | | GAGAAGCAUGG | | |
| AD-2055893 | UUUGCAUAUAAC | 232 | 655-675 | AGUAUGUAGGUU | 258 | 653-675 |
| | CUACAUACU | | | AUAUGCAAAUA | | |
| AD-2055909 | AUACCUUCUCUU | 233 | 671-691 | AGAUUAUACAAG | 259 | 669-691 |
| | GUAUAAUCU | | | AGAAGGUAUGU | | |
| AD-2055933 | AAAUGCUAUUU | 234 | 704-724 | AACAACGAUUAA | 260 | 702-724 |
| | AAUCGUUGUU | | | AUAGCAUUUAC | | |
| AD-2055947 | GUUGUUAUACU | 235 | 719-739 | AAAACAAUACAG | 261 | 717-739 |
| | GUAUUGUUUU | | | UAUAACAACGA | | |
| AD-2055958 | CAUAUUGUUAU | 236 | 762-782 | AUGACAGAAAAU | 262 | 760-782 |
| | UUUCUGUCAU | | | AACAAUAUGAC | | |
| AD-2055973 | GUCAUCUUUUUC | 237 | 778-798 | AAAAGACUUGAA | 263 | 776-798 |
| | AAGUCUUUU | | | AAAGAUGACAG | | |
| AD-2055995 | CAUCCACAGUUG | 238 | 800-820 | AAAUUCAACCAA | 264 | 798-820 |
| | GUUGAAUUU | | | CUGUGGAUGGA | | |
| AD-2056048 | ACUGUAUUUAG | 239 | 853-873 | AGAAAUUAUCCU | 265 | 851-873 |
| | GAUAAUUUCU | | | AAAUACAGUUG | | |
| AD-2056062 | CAUCACUUUUAA | 240 | 872-892 | AGGUUUGAAUUA | 266 | 870-892 |
| | UUCAAACCU | | | AAAGUGAUGAA | | |
| AD-2056077 | AAACCACAAUAU | 241 | 887-907 | AUUAUUCACAUA | 267 | 885-907 |
| | GUGAAUAAU | | | UUGUGGUUUGA | | |
| AD-2056096 | AGCAGAUAGAA | 242 | 906-926 | AAAAGAUUCUUU | 268 | 904-926 |
| | AGAAUCUUUU | | | CUAUCUGCUUA | | |
| AD-2056121 | GUCGAUGUUCAA | 243 | 931-951 | AAAAAAUAGUUG | 269 | 929-951 |
| | CUAUUUUUU | | | AACAUCGACAU | | |
| AD-2056154 | AACAUGGUUGCU | 244 | 964-984 | AAAAUAGAAAGC | 270 | 962-984 |
| | UUCUAUUUU | | | AACCAUGUUCU | | |
| AD-2056174 | UCUUGGAUAUG | 245 | 986-1006 | AAGAAACCUCCA | 271 | 984-1006 |
| | GAGGUUUCUU | | | UAUCCAAGAAA | | |
| AD-2056190 | UUCUUGAAGACC | 246 | 1002-1022 | AAUGUUCUAGGU | 272 | 1000-1022 |
| | UAGAACAUU | | | CUUCAAGAAAC | | |
| AD-2056206 | ACAUAGAAGAA | 247 | 1018-1038 | AAACUAGGCAUU | 273 | 1016-1038 |
| | UGCCUAGUUU | | | CUUCUAUGUUC | | |
| AD-2056234 | UAUGAGUUUUA | 248 | 1057-1077 | AGAUUUGGCCUA | 274 | 1055-1077 |
| | GGCCAAAUCU | | | AAACUCAUAGU | | |
| AD-2056249 | AAAUCUGAGAA | 249 | 1072-1092 | AUUUGAUCUUUU | 275 | 1070-1092 |
| | AAGAUCAAAU | | | CUCAGAUUUGG | | |
| AD-2056292 | UAAGCAUAUCAG | 250 | 1115-1135 | AGUUCUAACCUG | 276 | 1113-1135 |
| | GUUAGAACU | | | AUAUGCUUACU | | |
| AD-2056307 | AGAACUCUCAUC | 251 | 1130-1150 | AGAACAUGUGAU | 277 | 1128-1150 |
| | ACAUGUUCU | | | GAGAGUUCUAA | | |
| AD-2056338 | UGGAGCAAAAG | 252 | 1161-1181 | AUUAUUUACUCU | 278 | 1159-1181 |
| | AGUAAAUAAU | | | UUUGCUCCACA | | |

TABLE 5
Modified Sense and Antisense Strand Sequences of Human PLG dsRNA Agents

| | | | | | mRNA Target | |
|---|---|---|---|---|---|---|
| Duplex | Sense Sequence | SEQ ID | Antisense Sequence | SEQ ID | Sequence | SEQ ID |
| ID | 5′ to 3′ | NO: | 5′ to 3′ | NO: | 5′ to 3′ | NO: |
| AD- | gsuscaacAfaCfAfUf | 279 | asAfsaucCfcAfGfgaug | 414 | AAGUCAACAACAUC | 549 |
| 2042815 | ccugggauuuL96 | | UfuGfuugacsusu | | CUGGGAUUG | |
| AD- | csusuuuaUfuUfCfUf | 280 | asCfscugAfuUfUfcaga | 415 | UUCUUUUAUUUCUG | 550 |
| 2042896 | gaaaucagguL96 | | AfaUfaaaagsasa | | AAAUCAGGU | |
| AD- | gsasugacUfaUfGfUf | 281 | asUfsgggUfaUfUfcaca | 416 | UGGAUGACUAUGUG | 551 |
| 2042932 | gaauacccauL96 | | UfaGfucaucscsa | | AAUACCCAG | |
| AD- | uscsacugUfuCfAfGf | 282 | asUfsuagUfgAfCfacug | 417 | CUUCACUGUUCAGU | 552 |
| 2042938 | ugucacuaauL96 | | AfaCfagugasasg | | GUCACUAAG | |
| AD- | asgscaggAfaGfUfAf | 283 | asAfsuucUfuCfUfauac | 418 | GGAGCAGGAAGUAU | 553 |
| 2042970 | uagaagaauuL96 | | UfuCfcugcuscsc | | AGAAGAAUG | |
| AD- | asasugugCfaGfCfAf | 284 | asCfsucaCfaUfUfuugc | 419 | AGAAUGUGCAGCAA | 554 |
| 2042987 | aaaugugaguL96 | | UfgCfacauuscsu | | AAUGUGAGG | |
| AD- | gsgsaggaCfgAfAfGf | 285 | asAfsgguGfaAfUfucuu | 420 | GAGGAGGACGAAGA | 555 |
| 2043006 | aauucaccuuL96 | | CfgUfccuccsusc | | AUUCACCUG | |
| AD- | csasuuccAfaUfAfUf | 286 | asUfsuuaCfuGfUfgaua | 421 | GGCAUUCCAAUAUC | 556 |
| 2043032 | cacaguaaauL96 | | UfuGfgaaugscsc | | ACAGUAAAG | |
| AD- | gsasgcaaCfaAfUfGf | 287 | asAfsuuaUfcAfCfacau | 422 | AAGAGCAACAAUGU | 557 |
| 2043052 | ugugauaauuL96 | | UfgUfugcucsusu | | GUGAUAAUG | |
| AD- | gsgscugaAfaAfCfAf | 288 | asAfsggaCfuUfCfcugu | 423 | AUGGCUGAAAACAG | 558 |
| 2043072 | ggaaguccuuL96 | | UfuUfcagccsasu | | GAAGUCCUC | |
| AD- | uscscuccAfuAfAfUf | 289 | asAfsuccUfaAfUfgauu | 424 | AGUCCUCCAUAAUC | 559 |
| 2043088 | cauuaggauuL96 | | AfuGfgaggascsu | | AUUAGGAUG | |
| AD- | gsasgagaUfgUfAfGf | 290 | asCfsaaaUfaAfAfacuaC | 425 | AUGAGAGAUGUAGU | 560 |
| 2043108 | uuuuauuuguL96 | | faUfcucucsasu | | UUUAUUUGA | |
| AD- | gsusaucuCfuCfAfGf | 291 | asUfscuuGfcAfCfucug | 426 | GUGUAUCUCUCAGA | 561 |
| 2043131 | agugcaagauL96 | | AfgAfgauacsasc | | GUGCAAGAC | |
| AD- | ascsugggAfaUfGfGf | 292 | asUfsaguUfcUfUfucca | 427 | AGACUGGGAAUGGA | 562 |
| 2043150 | aaagaacuauL96 | | UfuCfccaguscsu | | AAGAACUAC | |
| AD- | gsgsgacgAfuGfUfCf | 293 | asUfsuugUfuUfUfggac | 428 | GAGGGACGAUGUCC | 563 |
| 2043174 | caaaacaaauL96 | | AfuCfgucccsusc | | AAAACAAAA | |
| AD- | gsasccuaGfaUfUfCf | 294 | asAfsgcaGfgUfGfagaa | 429 | CAGACCUAGAUUCU | 564 |
| 2043218 | ucaccugcuuL96 | | UfcUfaggucsusg | | CACCUGCUA | |
| AD- | usgscaggAfaUfCfCf | 295 | asUfscguUfgUfCfugga | 430 | ACUGCAGGAAUCCA | 565 |
| 2043249 | agacaacgauL96 | | UfuCfcugcasgsu | | GACAACGAU | |
| AD- | gscsuauaCfuAfCfUf | 296 | asUfsucuGfgAfUfcagu | 431 | GUGCUAUACUACUG | 566 |
| 2043266 | gauccagaauL96 | | AfgUfauagcsasc | | AUCCAGAAA | |
| AD- | asusaugaCfuAfCfUf | 297 | asGfsaauGfuCfGfcagu | 432 | AGAUAUGACUACUG | 567 |
| 2043291 | gcgacauucuL96 | | AfgUfcauauscsu | | CGACAUUCU | |
| AD- | ususcuugAfgUfGfUf | 298 | asUfsuccUfcUfUfcacaC | 433 | CAUUCUUGAGUGUG | 568 |
| 2043308 | gaagaggaauL96 | | fuCfaagaasusg | | AAGAGGAAU | |
| AD- | asgsgaauGfuAfUfGf | 299 | asAfscugCfaAfUfgcau | 434 | AGAGGAAUGUAUGC | 569 |
| 2043323 | cauugcaguuL96 | | AfcAfuuccuscsu | | AUUGCAGUG | |
| AD- | csasguggAfgAfAfAf | 300 | asCfsgucAfuAfGfuuuu | 435 | UGCAGUGGAGAAAA | 570 |
| 2043339 | acuaugacguL96 | | CfuCfcacugscsa | | CUAUGACGG | |
| AD- | gsgscaaaAfuUfUfCf | 301 | asAfsuggUfcUfUfggaa | 436 | ACGGCAAAAUUUCC | 571 |
| 2043358 | caagaccauuL96 | | AfuUfuugccsgsu | | AAGACCAUG | |
| AD- | ascsgcucAfuGfGfAf | 302 | asAfsggaAfuGfUfaucc | 437 | ACACGCUCAUGGAU | 572 |
| 2043419 | uacauuccuuL96 | | AfuGfagcgusgsu | | ACAUUCCUU | |
| AD- | ususccuuCfcAfAfAf | 303 | asGfsuuuGfgAfAfauuu | 438 | CAUUCCUUCCAAAU | 573 |
| 2043434 | uuuccaaacuL96 | | GfgAfaggaasusg | | UUCCAAACA | |
| AD- | gsasaccuGfaAfGfAf | 304 | asAfsguaAfuUfCfuucu | 439 | AAGAACCUGAAGAA | 574 |
| 2043456 | agaauuacuuL96 | | UfcAfgguucsusu | | GAAUUACUG | |
| AD- | csusugguGfuUfUfCf | 305 | asGfsucgGfuGfGfugaa | 440 | GCCUUGGUGUUUCA | 575 |
| 2043483 | accaccgacuL96 | | AfcAfccaagsgsc | | CCACCGACC | |
| AD- | csusgggaAfcUfUfUf | 306 | asGfsgauGfuCfAfcaaa | 441 | CGCUGGGAACUUUG | 576 |
| 2043494 | gugacauccuL96 | | GfuUfcccagscsg | | UGACAUCCC | |
| AD- | csasccucCfaCfCfAfu | 307 | asAfsccaGfaAfGfaugg | 442 | AACACCUCCACCAU | 577 |
| 2043505 | cuucugguuL96 | | UfgGfaggugsusu | | CUUCUGGUC | |
| AD- | cscscaccUfaCfCfAfg | 308 | asUfsucaGfaCfAfcugg | 443 | GUCCCACCUACCAG | 578 |
| 2043525 | ugucugaauL96 | | UfaGfgugggsasc | | UGUCUGAAG | |
| AD- | csusgaagGfgAfAfCf | 309 | asUfsuuuCfaCfCfuguu | 444 | GUCUGAAGGGAACA | 579 |
| 2043540 | aggugaaaauL96 | | CfcCfuucagsasc | | GGUGAAAAC | |
| AD- | gscsgggaAfuGfUfGf | 310 | asGfsguaAfcAfGfccac | 445 | UCGCGGGAAUGUGG | 580 |
| 2043565 | gcuguuaccuL96 | | AfuUfcccgcsgsa | | CUGUUACCG | |
| AD- | ascsaggaCfaCfCfAf | 311 | asGfsaagUfuUfUfcugg | 446 | UAACAGGACACCAG | 581 |
| 2043617 | gaaaacuucuL96 | | UfgUfccugususa | | AAAACUUCC | |
| AD- | asusuuggAfuGfAfAf | 312 | asGfscagUfaGfUfuuuc | 447 | AAAUUUGGAUGAAA | 582 |
| 2043627 | aacuacugcuL96 | | AfuCfcaaaususu | | ACUACUGCC | |
| AD- | usgsccgcAfaUfCfCf | 313 | asUfsuucCfgUfCfagga | 448 | ACUGCCGCAAUCCU | 583 |
| 2043644 | ugacggaaauL96 | | UfuGfcggcasgsu | | GACGGAAAA | |
| AD- | gsusgccaUfaCfAfAf | 314 | asGfsgcuGfuUfGfguug | 449 | UGGUGCCAUACAAC | 584 |
| 2043656 | ccaacagccuL96 | | UfaUfggcacscsa | | CAACAGCCA | |
| AD- | gsusacugUfaAfGfAf | 315 | asAfsggaCfgGfUfaucu | 450 | GAGUACUGUAAGAU | 585 |
| 2043689 | uaccguccuuL96 | | UfaCfaguacsusc | | ACCGUCCUG | |
| AD- | ascsaggaAfaGfAfAf | 316 | asGfsacuGfaCfAfcuuc | 451 | CCACAGGAAAGAAG | 586 |
| 2043789 | gugucagucuL96 | | UfuUfccugusgsg | | UGUCAGUCU | |
| AD- | csasgucuUfgGfUfCf | 317 | asGfsucaUfaGfAfugac | 452 | GUCAGUCUUGGUCA | 587 |
| 2043804 | aucuaugacuL96 | | CfaAfgacugsasc | | UCUAUGACA | |
| AD- | usgscuggCfcUfGfAf | 318 | asAfsguuCfaUfUfguca | 453 | AAUGCUGGCCUGAC | 588 |
| 2043843 | caaugaacuuL96 | | GfgCfcagcasusu | | AAUGAACUA | |
| AD- | gsgsaaucCfaGfAfUf | 319 | asUfsuuaUfcGfGfcauc | 454 | CAGGAAUCCAGAUG | 589 |
| 2043869 | gccgauaaauL96 | | UfgGfauuccsusg | | CCGAUAAAG | |
| AD- | csusggugUfuUfUfAf | 320 | asGfsgucUfgUfGfguaa | 455 | CCCUGGUGUUUUAC | 590 |
| 2043874 | ccacagaccuL96 | | AfaCfaccagsgsg | | CACAGACCC | |
| AD- | gsgsgaguAfcUfGfCf | 321 | asUfsuucAfgGfUfugca | 456 | GUGGGAGUACUGCA | 591 |
| 2043886 | aaccugaaauL96 | | GfuAfcucccsasc | | ACCUGAAAA | |
| AD- | gsasacagAfaGfCfGf | 322 | asUfsacaAfcAfCfucgc | 457 | AGGAACAGAAGCGA | 592 |
| 2043916 | aguguuguauL96 | | UfuCfuguucscsu | | GUGUUGUAG | |
| AD- | cscsgccuGfuUfGfUf | 323 | asGfsgaaGfcAfGfgaca | 458 | CUCCGCCUGUUGUC | 593 |
| 2043942 | ccugcuuccuL96 | | AfcAfggcggsasg | | CUGCUUCCA | |
| AD- | uscscagaUfgUfAfGf | 324 | asAfsaggAfgUfCfucua | 459 | CUUCCAGAUGUAGA | 594 |
| 2043959 | agacuccuuuL96 | | CfaUfcuggasasg | | GACUCCUUC | |
| AD- | cscsgaagAfaGfAfCf | 325 | asAfsaacAfuAfCfaguc | 460 | UUCCGAAGAAGACU | 595 |
| 2043979 | uguauguuuuL96 | | UfuCfuucggsasa | | GUAUGUUUG | |
| AD- | usasgacaCfaGfCfAf | 326 | asGfsaguGfaAfAfaugc | 461 | CAUAGACACAGCAU | 596 |
| 2044060 | uuuucacucuL96 | | UfgUfgucuasusg | | UUUCACUCC | |
| AD- | csascuccAfgAfGfAf | 327 | asGfsuggAfuUfUfgucu | \|462 | UUCACUCCAGAGAC | 597 |
| 2044075 | caaauccacuL96 | | CfuGfgagugsasa | | AAAUCCACG | |
| AD- | gscscguaAfcCfCfUf | 328 | asAfsucaCfcAfUfcagg | 463 | CUGCCGUAACCCUG | 598 |
| 2044119 | gauggugauuL96 | | GfuUfacggcsasg | | AUGGUGAUG | |
| AD- | gsusgcuaCfaCfGfAf | 329 | asUfsuggAfuUfUfgucg | 464 | UGGUGCUACACGAC | 599 |
| 2044153 | caaauccaauL96 | | UfgUfagcacscsa | | AAAUCCAAG | |
| AD- | uscscaagAfaAfAfCf | 330 | asAfsgucGfuAfAfaguu | 465 | AAUCCAAGAAAACU | 600 |
| 2044168 | uuuacgacuuL96 | | UfuCfuuggasusu | | UUACGACUA | |
| AD- | gsascuacUfgUfGfAf | 331 | asUfsgagGfgAfCfauca | 466 | ACGACUACUGUGAU | 601 |
| 2044184 | ugucccucauL96 | | CfaGfuagucsgsu | | GUCCCUCAG | |
| AD- | gscsaaguCfaGfUfCf | 332 | asUfsuguUfcUfAfagac | 467 | UGGCAAGUCAGUCU | 602 |
| 2044267 | uuagaacaauL96 | | UfgAfcuugcscsa | | UAGAACAAG | |
| AD- | asascaagGfuUfUfGf | 333 | asAfsgugCfaUfUfccaa | 468 | AGAACAAGGUUUGG | 603 |
| 2044282 | gaaugcacuuL96 | | AfcCfuuguuscsu | | AAUGCACUU | |
| AD- | usgscccaCfuGfCfUf | 334 | asAfscuuCfuCfCfaagc | 469 | GCUGCCCACUGCUU | 604 |
| 2044325 | uggagaaguuL96 | | AfgUfgggcasgsc | | GGAGAAGUC | |
| AD- | ascscaagAfaGfUfGf | 335 | asUfsucgAfgAfUfucac | 470 | ACACCAAGAAGUGA | 605 |
| 2044364 | aaucucgaauL96 | | UfuCfuuggusgsu | | AUCUCGAAC | |
| AD- | cscsgcauGfuUfCfAf | 336 | asUfscuaUfuUfCfcuga | 471 | AACCGCAUGUUCAG | 606 |
| 2044384 | ggaaauagauL96 | | AfcAfugcggsusu | | GAAAUAGAA | |
| AD- | gsasaaagAfuAfUfUf | 337 | asUfsagcAfaGfGfcaau | 472 | ACGAAAAGAUAUUG | 607 |
| 2044433 | gccuugcuauL96 | | AfuCfuuuucsgsu | | CCUUGCUAA | |
| AD- | usgscuaaAfgCfUfAf | 338 | asAfsggaCfuGfCfuuag | 473 | CUUGCUAAAGCUAA | 608 |
| 2044448 | agcaguccuuL96 | | CfuUfuagcasasg | | GCAGUCCUG | |
| AD- | uscsaucaCfuGfAfCf | 339 | asGfsauuAfcUfUfuguc | 474 | CGUCAUCACUGACA | 609 |
| 2044472 | aaaguaaucuL96 | | AfgUfgaugascsg | | AAGUAAUCC | |
| AD- | csgsaaugUfuUfCfAf | 340 | asAfsgccAfgUfGfauga | 475 | ACCGAAUGUUUCAU | 610 |
| 2044516 | ucacuggcuuL96 | | AfaCfauucgsgsu | | CACUGGCUG | |
| AD- | gsasgaaaCfcCfAfAf | 341 | asAfsaaaGfuAfCfcuug | 476 | GGGAGAAACCCAAG | 611 |
| 2044519 | gguacuuuuuL96 | | GfgUfuucucscsc | | GUACUUUUG | |
| AD- | cscsugugAfuUfGfAf | 342 | asAfscuuUfaUfUfcuca | 477 | UCCCUGUGAUUGAG | 612 |
| 2044569 | gaauaaaguuL96 | | AfuCfacaggsgsa | | AAUAAAGUG | |
| AD- | asuscgcuAfuGfAfGf | 343 | asAfsuucAfgAfAfacuc | 478 | CAAUCGCUAUGAGU | 613 |
| 2044594 | uuucugaauuL96 | | AfuAfgcgaususg | | UUCUGAAUG | |
| AD- | usgsaaugGfaAfGfAf | 344 | asGfsgauUfgGfAfcucu | 479 | UCUGAAUGGAAGAG | 614 |
| 2044609 | guccaauccuL96 | | UfcCfauucasgsa | | UCCAAUCCA | |
| AD- | gsgsuccuCfuGfGfUf | 345 | asUfscgaAfgCfAfaacc | 480 | GAGGUCCUCUGGUU | 615 |
| 2044689 | uugcuucgauL96 | | AfgAfggaccsusc | | UGCUUCGAG | |
| AD- | gsuscuauGfuUfCfGf | 346 | asCfsuugAfaAfCfacga | 481 | GUGUCUAUGUUCGU | 616 |
| 2044740 | uguuucaaguL96 | | AfcAfuagacsasc | | GUUUCAAGG | |
| AD- | gsasgugaUfgAfGfAf | 347 | asUfsuaaUfuAfUfuucu | 482 | GGGAGUGAUGAGAA | 617 |
| 2044780 | aauaauuaauL96 | | CfaUfcacucscsc | | AUAAUUAAU | |
| AD- | gsascgcaCfuGfAfCf | 348 | asUfscuaGfgUfGfaguc | 483 | GUGACGCACUGACU | 618 |
| 2044815 | ucaccuagauL96 | | AfgUfgcgucsasc | | CACCUAGAG | |
| AD- | usasgcauGfcUfGfGf | 349 | asCfsaguUfaUfUfucca | 484 | UUUAGCAUGCUGGA | 619 |
| 2044857 | aaauaacuguL96 | | GfcAfugcuasasa | | AAUAACUGG | |
| AD- | asasucaaAfcGfAfAf | 350 | asGfsacaGfuGfUfcuuc | 485 | GUAAUCAAACGAAG | 620 |
| 2044882 | gacacugucuL96 | | GfuUfugauusasc | | ACACUGUCC | |
| AD- | ascscagcUfaCfGfCfc | 351 | asCfsgagGfuUfUfggcg | 486 | CUACCAGCUACGCC | 621 |
| 2044889 | aaaccucguL96 | | UfaGfcuggusasg | | AAACCUCGG | |
| AD- | csuscggcAfuUfUfUf | 352 | asAfsuaaCfaCfAfaaaaA | 487 | ACCUCGGCAUUUUU | 622 |
| 2044905 | uuguguuauuL96 | | fuGfccgagsgsu | | UGUGUUAUU | |
| AD- | gsascugcUfgGfAfUf | 353 | asUfsacuAfcAfGfaauc | 488 | CUGACUGCUGGAUU | 623 |
| 2044926 | ucuguaguauL96 | | CfaGfcagucsasg | | CUGUAGUAA | |
| AD- | usasguaaGfgUfGfAf | 354 | asAfsuagCfuAfUfguca | 489 | UGUAGUAAGGUGAC | 624 |
| 2044941 | cauagcuauuL96 | | CfcUfuacuascsa | | AUAGCUAUG | |
| AD- | uscsuguaCfuUfAfAf | 355 | asAfsaauCfaAfAfguua | 490 | ACUCUGUACUUAAC | 625 |
| 2044971 | cuuugauuuuL96 | | AfgUfacagasgsu | | UUUGAUUUG | |
| AD- | asusuuugGfuUfUfUf | 356 | asUfsugaAfgAfCfcaaa | 491 | AAAUUUUGGUUUUG | 626 |
| 2044995 | ggucuucaauL96 | | AfcCfaaaaususu | | GUCUUCAAC | |
| AD- | ususcaacAfuUfUfUf | 357 | asAfsagaGfcAfUfgaaa | 492 | UCUUCAACAUUUUC | 627 |
| 2045010 | caugcucuuuL96 | | AfuGfuugaasgsa | | AUGCUCUUU | |
| AD- | csasccaaUfuUfUfUf | 358 | asUfsgccCfaUfUfuaaa | 493 | CCCACCAAUUUUUA | 628 |
| 2045019 | aaaugggcauL96 | | AfaUfuggugsgsg | | AAUGGGCAG | |
| AD- | asgscugcUfuUfUfGf | 359 | asGfsuucCfuUfAfucaa | 494 | UUAGCUGCUUUUGA | 629 |
| 2045030 | auaaggaacuL96 | | AfaGfcagcusasa | | UAAGGAACA | |
| AD- | csusgcacAfaAfGfGf | 360 | asCfsugcUfcAfGfuccu | 495 | AGCUGCACAAAGGA | 630 |
| 2045052 | acugagcaguL96 | | UfuGfugcagscsu | | CUGAGCAGG | |
| AD- | gsasaguuGfuCfCfAf | 361 | asGfsuaaAfuGfCfgugg | 496 | AAGAAGUUGUCCAC | 631 |
| 2045080 | cgcauuuacuL96 | | AfcAfacuucsusu | | GCAUUUACC | |
| AD- | ususaccuCfaUfCfAf | 362 | asCfsucgUfuAfGfcuga | 497 | AUUUACCUCAUCAG | 632 |
| 2045096 | gcuaacgaguL96 | | UfgAfgguaasasu | | CUAACGAGG | |
| AD- | usgsacauGfcAfUfUf | 363 | asGfsacaGfuAfAfaaau | 498 | CUUGACAUGCAUUU | 633 |
| 2045120 | uuuacugucuL96 | | GfcAfugucasasg | | UUACUGUCU | |
| AD- | csusgucuUfuAfUfUf | 364 | asAfsgugUfcAfGfgaau | 499 | UACUGUCUUUAUUC | 634 |
| 2045134 | ccugacacuuL96 | | AfaAfgacagsusa | | CUGACACUG | |
| AD- | csusgagaUfgAfAfUf | 365 | asUfsuugAfaAfAfcauu | 500 | CACUGAGAUGAAUG | 635 |
| 2045152 | guuuucaaauL96 | | CfaUfcucagsusg | | UUUUCAAAG | |
| AD- | uscsaaagCfuGfCfAf | 366 | asCfsauaCfaUfGfuugc | 501 | UUUCAAAGCUGCAA | 636 |
| 2045167 | acauguauguL96 | | AfgCfuuugasasa | | CAUGUAUGG | |
| AD- | uscsaugcAfaAfCfCf | 367 | asAfsacaGfaAfUfcggu | 502 | AGUCAUGCAAACCG | 637 |
| 2045172 | gauucuguuuL96 | | UfuGfcaugascsu | | AUUCUGUUA | |
| AD- | usasuuggGfaAfUfGf | 368 | asGfsacaGfaUfUfucau | 503 | GUUAUUGGGAAUGA | 638 |
| 2045191 | aaaucugucuL96 | | UfcCfcaauasasc | | AAUCUGUCA | |
| AD- | csasccgaCfuGfCfUf | 369 | asCfsucaAfgUfCfaagc | 504 | GUCACCGACUGCUU | 639 |
| 2045210 | ugacuugaguL96 | | AfgUfcggugsasc | | GACUUGAGC | |
| AD- | csusguauAfuGfAfUf | 370 | asGfsuucAfcUfCfcauc | 505 | AGCUGUAUAUGAUG | 640 |
| 2045233 | ggagugaacuL96 | | AfuAfuacagscsu | | GAGUGAACC | |
| AD- | gsasugugUfaAfCfAf | 371 | asUfsuggUfcUfUfgugu | 506 | UGGAUGUGUAACAC | 641 |
| 2045262 | caagaccaauL96 | | UfaCfacaucscsa | | AAGACCAAC | |
| AD- | ascsugagAfgUfCfUf | 372 | asAfsuaaCfaUfUfcagaC | 507 | CAACUGAGAGUCUG | 642 |
| 2045281 | gaauguuauuL96 | | fuCfucagususg | | AAUGUUAUU | |
| AD- | csascacgUfgAfGfUf | 373 | asCfsaauCfcUfAfgacuC | 508 | GGCACACGUGAGUC | 643 |
| 2045288 | cuaggauuguL96 | | faCfgugugscsc | | UAGGAUUGG | |
| AD- | asasgagcAfuGfUfAf | 374 | asUfsuguUfcAfUfuuac | 509 | CCAAGAGCAUGUAA | 644 |
| 2045313 | aaugaacaauL96 | | AfuGfcucuusgsg | | AUGAACAAC | |
| AD- | asascaacAfaGfCfAfa | 375 | asUfsucaAfuAfUfuugc | 510 | UGAACAACAAGCAA | 645 |
| 2045328 | auauugaauL96 | | UfuGfuuguuscsa | | AUAUUGAAG | |
| AD- | cscsacuuAfuUfUfCf | 376 | asUfsagcAfaUfGfggaa | 511 | GACCACUUAUUUCC | 646 |
| 2045354 | ccauugcuauL96 | | AfuAfaguggsusc | | CAUUGCUAA | |
| AD- | gscsccggUfuUfUfGf | 377 | asAfsgacUfgUfUfucaa | 512 | CUGCCCGGUUUUGA | 647 |
| 2045381 | aaacagucuuL96 | | AfaCfcgggcsasg | | AACAGUCUG | |
| AD- | uscsacagGfaGfAfAf | 378 | asCfsacaGfgUfCfauuc | 513 | GGUCACAGGAGAAU | 648 |
| 2045414 | ugaccuguguL96 | | UfcCfugugascsc | | GACCUGUGG | |
| AD- | gsgsagagAfuAfCfAf | 379 | asUfsucuAfaAfCfaugu | 514 | UGGGAGAGAUACAU | 649 |
| 2045434 | uguuuagaauL96 | | AfuCfucuccscsa | | GUUUAGAAG | |
| AD- | gsasagagAfaAfGfGf | 380 | asUfsgccUfuUfGfuccu | 515 | AGGAAGAGAAAGGA | 650 |
| 2045448 | acaaaggcauL96 | | UfuCfucuucscsu | | CAAAGGCAC | |
| AD- | csascguuUfuAfCfCf | 381 | asAfsuuuUfaAfAfuggu | 516 | CACACGUUUUACCA | 651 |
| 2045468 | auuuaaaauuL96 | | AfaAfacgugsusg | | UUUAAAAUA | |
| AD- | csasaugcAfaCfAfGf | 382 | asGfsuaaGfaUfGfacug | 517 | AACAAUGCAACAGU | 652 |
| 2045506 | ucaucuuacuL96 | | UfuGfcauugsusu | | CAUCUUACA | |
| AD- | ususacagCfaGfAfGf | 383 | asUfscugCfaUfUfucuc | 518 | UCUUACAGCAGAGA | 653 |
| 2045522 | aaaugcagauL96 | | UfgCfuguaasgsa | | AAUGCAGAG | |
| AD- | gscsagagAfaAfAfGf | 384 | asGfscagUfuUfUfgcuu | 519 | AUGCAGAGAAAAGC | 654 |
| 2045537 | caaaacugcuL96 | | UfuCfucugcsasu | | AAAACUGCA | |
| AD- | ascsugugAfaUfAfAf | 385 | asAfsuucAfcCfCfuuua | 520 | UGACUGUGAAUAAA | 655 |
| 2045562 | agggugaauuL96 | | UfuCfacaguscsa | | GGGUGAAUG | |
| AD- | usasgucuCfaAfAfUf | 386 | asUfscuuUfgAfGfgauu | 521 | UGUAGUCUCAAAUC | 656 |
| 2045583 | ccucaaagauL96 | | UfgAfgacuascsa | | CUCAAAGAG | |
| AD- | asgsagcuGfuGfUfUf | 387 | asAfsaugAfaAfUfaaac | 522 | AAAGAGCUGUGUUU | 657 |
| 2045600 | uauuucauuuL96 | | AfcAfgcucususu | | AUUUCAUUG | |
| AD- | ascsuuaaUfuUfGfAf | 388 | asAfsccaGfaUfAfguca | 523 | UAACUUAAUUUGAC | 658 |
| 2055723 | cuaucugguuL96 | | AfaUfuaagususa | | UAUCUGGUU | |
| AD- | csuscaugUfaAfGfUf | 389 | asAfsuguUfgUfUfgacu | 524 | CUCUCAUGUAAGUC | 659 |
| 2055760 | caacaacauuL96 | | UfaCfaugagsasg | | AACAACAUC | |
| AD- | usasagacAfuUfCfCf | 390 | asAfsgauGfaAfAfggga | 525 | GGUAAGACAUUCCC | 660 |
| 2055779 | cuuucaucuuL96 | | AfuGfucuuascsc | | UUUCAUCUU | |
| AD- | csasucuuUfgUfGfUf | 391 | asAfsguaGfaUfGfaaca | 526 | UUCAUCUUUGUGUU | 661 |
| 2055794 | ucaucuacuuL96 | | CfaAfagaugsasa | | CAUCUACUG | |
| AD- | asusgcuuCfuCfAfAf | 392 | asAfsuaaGfgGfAfcuug | 527 | CCAUGCUUCUCAAG | 662 |
| 2055857 | gucccuuauuL96 | | AfgAfagcausgsg | | UCCCUUAUA | |
| AD- | ususugcaUfaUfAfAf | 393 | asGfsuauGfuAfGfguua | 528 | UAUUUGCAUAUAAC | 663 |
| 2055893 | ccuacauacuL96 | | UfaUfgcaaasusa | | CUACAUACC | |
| AD- | asusaccuUfcUfCfUf | 394 | asGfsauuAfuAfCfaaga | 529 | ACAUACCUUCUCUU | 664 |
| 2055909 | uguauaaucuL96 | | GfaAfgguausgsu | | GUAUAAUCC | |
| AD- | asasaugcUfaUfUfUf | 395 | asAfscaaCfgAfUfuaaa | 530 | GUAAAUGCUAUUUA | 665 |
| 2055933 | aaucguuguuL96 | | UfaGfcauuusasc | | AUCGUUGUU | |
| AD- | gsusuguuAfuAfCfUf | 396 | asAfsaacAfaUfAfcagu | 531 | UCGUUGUUAUACUG | 666 |
| 2055947 | guauuguuuuL96 | | AfuAfacaacsgsa | | UAUUGUUUU | |
| AD- | csasuauuGfuUfAfUf | 397 | asUfsgacAfgAfAfaaua | 532 | GUCAUAUUGUUAUU | 667 |
| 2055958 | uuucugucauL96 | | AfcAfauaugsasc | | UUCUGUCAU | |
| AD- | gsuscaucUfuUfUfUf | 398 | asAfsaagAfcUfUfgaaa | 533 | CUGUCAUCUUUUUC | 668 |
| 2055973 | caagucuuuuL96 | | AfaGfaugacsasg | | AAGUCUUUU | |
| AD- | csasuccaCfaGfUfUf | 399 | asAfsauuCfaAfCfcaacU | 534 | UCCAUCCACAGUUG | 669 |
| 2055995 | gguugaauuuL96 | | fgUfggaugsgsa | | GUUGAAUUU | |
| AD- | ascsuguaUfuUfAfGf | 400 | asGfsaaaUfuAfUfccua | 535 | CAACUGUAUUUAGG | 670 |
| 2056048 | gauaauuucuL96 | | AfaUfacagususg | | AUAAUUUCA | |
| AD- | csasucacUfuUfUfAf | 401 | asGfsguuUfgAfAfuuaa | 536 | UUCAUCACUUUUAA | 671 |
| 2056062 | auucaaaccuL96 | | AfaGfugaugsasa | | UUCAAACCA | |
| AD- | asasaccaCfaAfUfAf | 402 | asUfsuauUfcAfCfauau | 537 | UCAAACCACAAUAU | 672 |
| 2056077 | ugugaauaauL96 | | UfgUfgguuusgsa | | GUGAAUAAG | |
| AD- | asgscagaUfaGfAfAf | 403 | asAfsaagAfuUfCfuuuc | 538 | UAAGCAGAUAGAAA | 673 |
| 2056096 | agaaucuuuuL96 | | UfaUfcugcususa | | GAAUCUUUU | |
| AD- | gsuscgauGfuUfCfAf | 404 | asAfsaaaAfuAfGfuuga | 539 | AUGUCGAUGUUCAA | 674 |
| 2056121 | acuauuuuuuL96 | | AfcAfucgacsasu | | CUAUUUUUG | |
| AD- | asascaugGfuUfGfCf | 405 | asAfsaauAfgAfAfagca | 540 | AGAACAUGGUUGCU | 675 |
| 2056154 | uuucuauuuuL96 | | AfcCfauguuscsu | | UUCUAUUUU | |
| AD- | uscsuuggAfuAfUfGf | 406 | asAfsgaaAfcCfUfccau | 541 | UUUCUUGGAUAUGG | 676 |
| 2056174 | gagguuucuuL96 | | AfuCfcaagasasa | | AGGUUUCUU | |
| AD- | ususcuugAfaGfAfCf | 407 | asAfsuguUfcUfAfgguc | 542 | GUUUCUUGAAGACC | 677 |
| 2056190 | cuagaacauuL96 | | UfuCfaagaasasc | | UAGAACAUA | |
| AD- | ascsauagAfaGfAfAf | 408 | asAfsacuAfgGfCfauuc | 543 | GAACAUAGAAGAAU | 678 |
| 2056206 | ugccuaguuuL96 | | UfuCfuaugususc | | GCCUAGUUU | |
| AD- | usasugagUfuUfUfAf | 409 | asGfsauuUfgGfCfcuaa | 544 | ACUAUGAGUUUUAG | 679 |
| 2056234 | ggccaaaucuL96 | | AfaCfucauasgsu | | GCCAAAUCU | |
| AD- | asasaucuGfaGfAfAf | 410 | asUfsuugAfuCfUfuuuc | 545 | CCAAAUCUGAGAAA | 680 |
| 2056249 | aagaucaaauL96 | | UfcAfgauuusgsg | | AGAUCAAAG | |
| AD- | usasagcaUfaUfCfAf | 411 | asGfsuucUfaAfCfcuga | 546 | AGUAAGCAUAUCAG | 681 |
| 2056292 | gguuagaacuL96 | | UfaUfgcuuascsu | | GUUAGAACU | |
| AD- | asgsaacuCfuCfAfUf | 412 | asGfsaacAfuGfUfgaug | 547 | UUAGAACUCUCAUC | 682 |
| 2056307 | cacauguucuL96 | | AfgAfguucusasa | | ACAUGUUCG | |
| AD- | usgsgagcAfaAfAfGf | 413 | asUfsuauUfuAfCfucuu | 548 | UGUGGAGCAAAAGA | 683 |
| 2056338 | aguaaauaauL96 | | UfuGfcuccascsa | | GUAAAUAAG | |

TABLE 6
Modified Sense and Antisense Strand Sequences of Human PLG dsRNA Agents

| | | SEQ | | SEQ |
|---|---|---|---|---|
| Duplex | | ID | | ID |
| ID | Sense Sequence 5′ to 3′ | NO: | Antisense Sequence 5′ to 3′ | NO: |
| AD- | csasguccCfaAfAfAfuggaacauaaL96 | 691 | VPusUfsaugUfuccauuuUfgGfgacugsgsc | 971 |
| 2134523.1 | | | | |
| AD- | csasguccCfaAfAfAfugguacauaaL96 | 692 | VPusUfsaugUfaccauuuUfgGfgacugsgsc | 972 |
| 2222854.1 | | | | |
| AD- | asgsucccAfaAfAfUfggaacauaaaL96 | 693 | VPusUfsuauGfuuccauuUfuGfggacusgsg | 973 |
| 2134574.1 | | | | |
| AD- | asgsucccAfaAfAfUfggaucauaaaL96 | 694 | VPusUfsuauGfauccauuUfuGfggacusgsg | 974 |
| 2222855.1 | | | | |
| AD- | cscscaaaAfuGfGfAfacauaaggaaL96 | 695 | VPusUfsccuUfauguuccAfuUfuugggsasc | 975 |
| 2134577.1 | | | | |
| AD- | cscsucugGfaUfGfAfcuaugugaaaL96 | 696 | VPusUfsucaCfauagucaUfcCfagaggscsu | 976 |
| 2134687.1 | | | | |
| AD- | cscsucugGfaUfGfAfcuauuugaaaL96 | 697 | VPusUfsucaAfauagucaUfcCfagaggscsu | 977 |
| 2222856.1 | | | | |
| AD- | csasauauCfaCfAfGfuaaagagcaaL96 | 698 | VPusUfsgcuCfuuuacugUfgAfuauugsgsa | 978 |
| 2134898.1 | | | | |
| AD- | csasauauCfaCfAfGfuaaugagcaaL96 | 699 | VPusUfsgcuCfauuacugUfgAfuauugsgsa | 979 |
| 2222857.1 | | | | |
| AD- | asusaucaCfaGfUfAfaagagcaacaL96 | 700 | VPusGfsuugCfucuuuacUfgUfgauaususg | 980 |
| 2134900.1 | | | | |
| AD- | asusaucaCfaGfUfAfaagugcaacaL96 | 701 | VPusGfsuugCfacuuuacUfgUfgauaususg | 981 |
| 2222858.1 | | | | |
| AD- | csasguaaAfgAfGfCfaacaaugugaL96 | 702 | VPusCfsacaUfuguugcuCfuUfuacugsusg | 982 |
| 2134906.1 | | | | |
| AD- | asgsuaaaGfaGfCfAfacaauguguaL96 | 703 | VPusAfscacAfuuguugcUfcUfuuacusgsu | 983 |
| 2134907.1 | | | | |
| AD- | asasuguaUfgCfAfUfugcaguggaaL96 | 704 | VPusUfsccaCfugcaaugCfaUfacauuscsc | 984 |
| 2135487.1 | | | | |
| AD- | asasuguaUfgCfAfUfugcuguggaaL96 | 705 | VPusUfsccaCfagcaaugCfaUfacauuscsc | 985 |
| 2222859.1 | | | | |
| AD- | csgsgcaaAfaUfUfUfccaagaccaaL96 | 706 | VPusUfsgguCfuuggaaaUfuUfugccgsusc | 986 |
| 2135518.1 | | | | |
| AD- | csgsgcaaAfaUfUfUfccaugaccaaL96 | 707 | VPusUfsgguCfauggaaaUfuUfugccgsusc | 987 |
| 2222860.1 | | | | |
| AD- | gsgscaaaAfuUfUfCfcaagaccauaL96 | 708 | VPusAfsuggUfcuuggaaAfuUfuugccsgsu | 988 |
| 2135519.1 | | | | |
| AD- | gsgscaaaAfuUfUfCfcaauaccauaL96 | 709 | VPusAfsuggUfauuggaaAfuUfuugccsgsu | 989 |
| 2222861.1 | | | | |
| AD- | gscsaaaaUfuUfCfCfaagaccaugaL96 | 710 | VPusCfsaugGfucuuggaAfaUfuuugcscsg | 990 |
| 2135520.1 | | | | |
| AD- | gscsaaaaUfuUfCfCfaaguccaugaL96 | 711 | VPusCfsaugGfacuuggaAfaUfuuugcscsg | 991 |
| 2222862.1 | | | | |
| AD- | gsgsauacAfuUfCfCfuuccaaauuaL96 | 712 | VPusAfsauuUfggaaggaAfuGfuauccsasu | 992 |
| 2135708.1 | | | | |
| AD- | gsgsauacAfuUfCfCfuucuaaauuaL96 | 713 | VPusAfsauuUfagaaggaAfuGfuauccsasu | 993 |
| 2222863.1 | | | | |
| AD- | ascsauucCfuUfCfCfaaauuuccaaL96 | 714 | VPusUfsggaAfauuuggaAfgGfaaugusasu | 994 |
| 2135712.1 | | | | |
| AD- | csasuuccUfuCfCfAfaauuuccaaaL96 | 715 | VPusUfsuggAfaauuuggAfaGfgaaugsusa | 995 |
| 2135713.1 | | | | |
| AD- | uscscuucCfaAfAfUfuuccaaacaaL96 | 716 | VPusUfsguuUfggaaauuUfgGfaaggasasu | 996 |
| 2135716.1 | | | | |
| AD- | uscscuucCfaAfAfUfuucuaaacaaL96 | 717 | VPusUfsguuUfagaaauuUfgGfaaggasasu | 997 |
| 2222864.1 | | | | |
| AD- | cscsuuccAfaAfUfUfuccaaacaaaL96 | 718 | VPusUfsuguUfuggaaauUfuGfgaaggsasa | 998 |
| 2135717.1 | | | | |
| AD- | cscsuuccAfaAfUfUfuccuaacaaaL96 | 719 | VPusUfsuguUfaggaaauUfuGfgaaggsasa | 999 |
| 2222865.1 | | | | |
| AD- | csusuccaAfaUfUfUfccaaacaagaL96 | 720 | VPusCfsuugUfuuggaaaUfuUfggaagsgsa | 1000 |
| 2135718.1 | | | | |
| AD- | ususccaaAfuUfUfCfcaaacaagaaL96 | 721 | VPusUfscuuGfuuuggaaAfuUfuggaasgsg | 1001 |
| 2135719.1 | | | | |
| AD- | ususccaaAfuUfUfCfcaaucaagaaL96 | 722 | VPusUfscuuGfauuggaaAfuUfuggaasgsg | 1002 |
| 2222866.1 | | | | |
| AD- | cscsaaauUfuCfCfAfaacaagaacaL96 | 723 | VPusGfsuucUfuguuuggAfaAfuuuggsas | 1003 |
| 2135721.1 | | | a | |
| AD- | cscsaaauUfuCfCfAfaacuagaacaL96 | 724 | VPusGfsuucUfaguuuggAfaAfuuuggsasa | 1004 |
| 2222867.1 | | | | |
| AD- | csasaacaAfgAfAfCfcugaagaagaL96 | 725 | VPusCfsuucUfucagguuCfuUfguuugsgsa | 1005 |
| 2135730.1 | | | | |
| AD- | asasacaaGfaAfCfCfugaagaagaaL96 | 726 | VPusUfscuuCfuucagguUfcUfuguuusgsg | 1006 |
| 2135731.1 | | | | |
| AD- | asasacaaGfaAfCfCfugaugaagaaL96 | 727 | VPusUfscuuCfaucagguUfcUfuguuusgsg | 1007 |
| 2222868.1 | | | | |
| AD- | asascaagAfaCfCfUfgaagaagaaaL96 | 728 | VPusUfsucuUfcuucaggUfuCfuuguususg | 1008 |
| 2135732.1 | | | | |
| AD- | asascaagAfaCfCfUfgaauaagaaaL96 | 729 | VPusUfsucuUfauucaggUfuCfuuguususg | 1009 |
| 2222869.1 | | | | |
| AD- | csasagaaCfcUfGfAfagaagaauuaL96 | 730 | VPusAfsauuCfuucuucaGfgUfucuugsusu | 1010 |
| 2135734.1 | | | | |
| AD- | csasagaaCfcUfGfAfagaugaauuaL96 | 731 | VPusAfsauuCfaucuucaGfgUfucuugsusu | 1011 |
| 2222870.1 | | | | |
| AD- | asgsaaccUfgAfAfGfaagaauuacaL96 | 732 | VPusGfsuaaUfucuucuuCfaGfguucususg | 1012 |
| 2135736.1 | | | | |
| AD- | gsasaccuGfaAfGfAfagaauuacuaL96 | 733 | VPusAfsguaAfuucuucuUfcAfgguucsusu | 1013 |
| 2135737.1 | | | | |
| AD- | asasccugAfaGfAfAfgaauuacugaL96 | 734 | VPusCfsaguAfauucuucUfuCfagguuscsu | 1014 |
| 2135738.1 | | | | |
| AD- | csasccucCfaCfCfAfucuucugguaL96 | 735 | VPusAfsccaGfaagauggUfgGfaggugsusu | 1015 |
| 2135786.1 | | | | |
| AD- | cscsuccaCfcAfUfCfuucugguccaL96 | 736 | VPusGfsgacCfagaagauGfgUfggaggsusg | 1016 |
| 2135788.1 | | | | |
| AD- | cscsuccaCfcAfUfCfuucuuguccaL96 | 737 | VPusGfsgacAfagaagauGfgUfggaggsusg | 1017 |
| 2222871.1 | | | | |
| AD- | csusccacCfaUfCfUfucuggucccaL96 | 738 | VPusGfsggaCfcagaagaUfgGfuggagsgsu | 1018 |
| 2135789.1 | | | | |
| AD- | csusccacCfaUfCfUfucuugucccaL96 | 739 | VPusGfsggaCfaagaagaUfgGfuggagsgsu | 1019 |
| 2222872.1 | | | | |
| AD- | csusgaagGfgAfAfCfaggugaaaaaL96 | 740 | VPusUfsuuuCfaccuguuCfcCfuucagsasc | 1020 |
| 2135821.1 | | | | |
| AD- | csusgaagGfgAfAfCfagguuaaaaaL96 | 741 | VPusUfsuuuAfaccuguuCfcCfuucagsasc | 1021 |
| 2222873.1 | | | | |
| AD- | usasacagGfaCfAfCfcagaaaacuaL96 | 742 | VPusAfsguuUfucuggugUfcCfuguuasus | 1022 |
| 2135896.1 | | | g | |
| AD- | asascaggAfcAfCfCfagaaaacuuaL96 | 743 | VPusAfsaguUfuucugguGfuCfcuguusasu | 1023 |
| 2135897.1 | | | | |
| AD- | cscsugcaAfaAfAfUfuuguaugaaaL96 | 744 | VPusUfsucaUfacaaauuUfuUfgcaggsgsg | 1024 |
| 2222874.1 | | | | |
| AD- | cscsugcaAfaAfAfUfuuggaugaaaL96 | 745 | VPusUfsucaUfccaaauuUfuUfgcaggsgsg | 1025 |
| 2222875.1 | | | | |
| AD- | csusgcaaAfaAfUfUfuggaugaaaaL96 | 746 | VPusUfsuucAfuccaaauUfuUfugcagsgsg | 1026 |
| 2135900.1 | | | | |
| AD- | csusgcaaAfaAfUfUfugguugaaaaL96 | 747 | VPusUfsuucAfaccaaauUfuUfugcagsgsg | 1027 |
| 2222876.1 | | | | |
| AD- | usgscaaaAfaUfUfUfggaugaaaaaL96 | 748 | VPusUfsuuuCfauccaaaUfuUfuugcasgsg | 1028 |
| 2135901.1 | | | | |
| AD- | usgscaaaAfaUfUfUfggauuaaaaaL96 | 749 | VPusUfsuuuAfauccaaaUfuUfuugcasgsg | 1029 |
| 2222877.1 | | | | |
| AD- | asasaaauUfuGfGfAfugaaaacuaaL96 | 750 | VPusUfsaguUfuucauccAfaAfuuuuusgsc | 1030 |
| 2135904.1 | | | | |
| AD- | asasuuugGfaUfGfAfaaacuacugaL96 | 751 | VPusCfsaguAfguuuucaUfcCfaaauususu | 1031 |
| 2135907.1 | | | | |
| AD- | csgsguggGfaGfUfAfcuguaagauaL96 | 752 | VPusAfsucuUfacaguacUfcCfcaccgscsa | 1032 |
| 2135962.1 | | | | |
| AD- | gsusgggaGfuAfCfUfguaagauacaL96 | 753 | VPusGfsuauCfuuacaguAfcUfcccacscsg | 1033 |
| 2135964.1 | | | | |
| AD- | gsusgggaGfuAfCfUfguaugauacaL96 | 754 | VPusGfsuauCfauacaguAfcUfcccacscsg | 1034 |
| 2222878.1 | | | | |
| AD- | usgsggagUfaCfUfGfuaagauaccaL96 | 755 | VPusGfsguaUfcuuacagUfaCfucccascsc | 1035 |
| 2135965.1 | | | | |
| AD- | usgsggagUfaCfUfGfuaauauaccaL96 | 756 | VPusGfsguaUfauuacagUfaCfucccascsc | 1036 |
| 2222879.1 | | | | |
| AD- | gsgsaguaCfuGfUfAfagauaccguaL96 | 757 | VPusAfscggUfaucuuacAfgUfacuccscsa | 1037 |
| 2135967.1 | | | | |
| AD- | csusguaaGfaUfAfCfcguccugugaL96 | 758 | VPusCfsacaGfgacgguaUfcUfuacagsusa | 1038 |
| 2135973.1 | | | | |
| AD- | csasccacCfaCfCfAfcaggaaagaaL96 | 759 | VPusUfscuuUfccuguggUfgGfuggugsgs | 1039 |
| 2136060.1 | | | a | |
| AD- | csasccacCfaCfCfAfcaguaaagaaL96 | 760 | VPusUfscuuUfacuguggUfgGfuggugsgs | 1040 |
| 2222880.1 | | | a | |
| AD- | csasccacAfgGfAfAfagaagugucaL96 | 761 | VPusGfsacaCfuucuuucCfuGfuggugsgsu | 1041 |
| 2136066.1 | | | | |
| AD- | csasccacAfgGfAfAfagaugugucaL96 | 762 | VPusGfsacaCfaucuuucCfuGfuggugsgsu | 1042 |
| 2222881.1 | | | | |
| AD- | cscsacagGfaAfAfGfaagugucagaL96 | 763 | VPusCfsugaCfacuucuuUfcCfuguggsusg | 1043 |
| 2136068.1 | | | | |
| AD- | csascaggAfaAfGfAfagugucaguaL96 | 764 | VPusAfscugAfcacuucuUfuCfcugugsgsu | 1044 |
| 2136069.1 | | | | |
| AD- | csascaggAfaAfGfAfaguuucaguaL96 | 765 | VPusAfscugAfaacuucuUfuCfcugugsgsu | 1045 |
| 2222882.1 | | | | |
| AD- | asgsgaaaGfaAfGfUfgucagucuuaL96 | 766 | VPusAfsagaCfugacacuUfcUfuuccusgsu | 1046 |
| 2136072.1 | | | | |
| AD- | asgsgaaaGfaAfGfUfgucugucuuaL96 | 767 | VPusAfsagaCfagacacuUfcUfuuccusgsu | 1047 |
| 2222883.1 | | | | |
| AD- | gsgsaaagAfaGfUfGfucagucuugaL96 | 768 | VPusCfsaagAfcugacacUfuCfuuuccsusg | 1048 |
| 2136073.1 | | | | |
| AD- | gsasaagaAfgUfGfUfcagucuuggaL96 | 769 | VPusCfscaaGfacugacaCfuUfcuuucscsu | 1049 |
| 2136074.1 | | | | |
| AD- | asasagaaGfuGfUfCfagucuugguaL96 | 770 | VPusAfsccaAfgacugacAfcUfucuuuscsc | 1050 |
| 2136075.1 | | | | |
| AD- | asgsaaguGfuCfAfGfucuuggucaaL96 | 771 | VPusUfsgacCfaagacugAfcAfcuucususu | 1051 |
| 2136077.1 | | | | |
| AD- | asasguguCfaGfUfCfuuggucaucaL96 | 772 | VPusGfsaugAfccaagacUfgAfcacuuscsu | 1052 |
| 2136079.1 | | | | |
| AD- | asasguguCfaGfUfCfuuguucaucaL96 | 773 | VPusGfsaugAfacaagacUfgAfcacuuscsu | 1053 |
| 2222884.1 | | | | |
| AD- | asgsugucAfgUfCfUfuggucaucuaL96 | 774 | VPusAfsgauGfaccaagaCfuGfacacususc | 1054 |
| 2136080.1 | | | | |
| AD- | asgsugucAfgUfCfUfugguuaucuaL96 | 775 | VPusAfsgauAfaccaagaCfuGfacacususc | 1055 |
| 2222885.1 | | | | |
| AD- | gsuscaguCfuUfGfGfucaucuaugaL96 | 776 | VPusCfsauaGfaugaccaAfgAfcugacsasc | 1056 |
| 2136083.1 | | | | |
| AD- | gsgsugggAfgUfAfCfugcaaccugaL96 | 777 | VPusCfsaggUfugcaguaCfuCfccaccsusg | 1057 |
| 2136164.1 | | | | |
| AD- | usgsggagUfaCfUfGfcaaccugaaaL96 | 778 | VPusUfsucaGfguugcagUfaCfucccascsc | 1058 |
| 2136166.1 | | | | |
| AD- | usgsggagUfaCfUfGfcaaucugaaaL96 | 779 | VPusUfsucaGfauugcagUfaCfucccascsc | 1059 |
| 2222886.1 | | | | |
| AD- | gsgsaguaCfuGfCfAfaccugaaaaaL96 | 780 | VPusUfsuuuCfagguugcAfgUfacuccscsa | 1060 |
| 2136168.1 | | | | |
| AD- | gsgsaguaCfuGfCfAfaccuuaaaaaL96 | 781 | VPusUfsuuuAfagguugcAfgUfacuccscsa | 1061 |
| 2222887.1 | | | | |
| AD- | gsusacugCfaAfCfCfugaaaaaauaL96 | 782 | VPusAfsuuuUfuucagguUfgCfaguacsusc | 1062 |
| 2136171.1 | | | | |
| AD- | usascugcAfaCfCfUfgaaaaaaugaL96 | 783 | VPusCfsauuUfuuucaggUfuGfcaguascsu | 1063 |
| 2136172.1 | | | | |
| AD- | ascscugaAfaAfAfAfugcucaggaaL96 | 784 | VPusUfsccuGfagcauuuUfuUfcaggususg | 1064 |
| 2136179.1 | | | | |
| AD- | ascscugaAfaAfAfAfugcuuaggaaL96 | 785 | VPusUfsccuAfagcauuuUfuUfcaggususg | 1065 |
| 2222888.1 | | | | |
| AD- | gsasaaaaAfuGfCfUfcaggaacagaL96 | 786 | VPusCfsuguUfccugagcAfuUfuuuucsasg | 1066 |
| 2136183.1 | | | | |
| AD- | asasgaagAfcUfGfUfauguuugggaL96 | 787 | VPusCfsccaAfacauacaGfuCfuucuuscsg | 1067 |
| 2136263.1 | | | | |
| AD- | csasgcauUfuUfCfAfcuccagagaaL96 | 788 | VPusUfscucUfggagugaAfaAfugcugsusg | 1068 |
| 2136347.1 | | | | |
| AD- | csasgcauUfuUfCfAfcucuagagaaL96 | 789 | VPusUfscucUfagagugaAfaAfugcugsusg | 1069 |
| 2222889.1 | | | | |
| AD- | asgscauuUfuCfAfCfuccagagacaL96 | 790 | VPusGfsucuCfuggagugAfaAfaugcusgsu | 1070 |
| 2136348.1 | | | | |
| AD- | asgscauuUfuCfAfCfuccugagacaL96 | 791 | VPusGfsucuCfaggagugAfaAfaugcusgsu | 1071 |
| 2222890.1 | | | | |
| AD- | gscsauuuUfcAfCfUfccagagacaaL96 | 792 | VPusUfsgucUfcuggaguGfaAfaaugcsusg | 1072 |
| 2136349.1 | | | | |
| AD- | gscsauuuUfcAfCfUfccauagacaaL96 | 793 | VPusUfsgucUfauggaguGfaAfaaugcsusg | 1073 |
| 2222891.1 | | | | |
| AD- | uscsacucCfaGfAfGfacaaauccaaL96 | 794 | VPusUfsggaUfuugucucUfgGfagugasasa | 1074 |
| 2136355.1 | | | | |
| AD- | usasggugGfuCfCfCfuggugcuacaL96 | 795 | VPusGfsuagCfaccagggAfcCfaccuascsa | 1075 |
| 2136421.1 | | | | |
| AD- | usasggugGfuCfCfCfugguucuacaL96 | 796 | VPusGfsuagAfaccagggAfcCfaccuascsa | 1076 |
| 2222892.1 | | | | |
| AD- | csusggugCfuAfCfAfcgacaaaucaL96 | 797 | VPusGfsauuUfgucguguAfgCfaccagsgsg | 1077 |
| 2136431.1 | | | | |
| AD- | csusggugCfuAfCfAfcgauaaaucaL96 | 798 | VPusGfsauuUfaucguguAfgCfaccagsgsg | 1078 |
| 2222893.1 | | | | |
| AD- | gsgsugcuAfcAfCfGfacaaauccaaL96 | 799 | VPusUfsggaUfuugucguGfuAfgcaccsasg | 1079 |
| 2136433.1 | | | | |
| AD- | gsusgcuaCfaCfGfAfcaaauccaaaL96 | 800 | VPusUfsuggAfuuugucgUfgUfagcacscsa | 1080 |
| 2136434.1 | | | | |
| AD- | gsusgcuaCfaCfGfAfcaauuccaaaL96 | 801 | VPusUfsuggAfauugucgUfgUfagcacscsa | 1081 |
| 2222894.1 | | | | |
| AD- | csusacacGfaCfAfAfauccaagaaaL96 | 802 | VPusUfsucuUfggauuugUfcGfuguagscsa | 1082 |
| 2136437.1 | | | | |
| AD- | csusacacGfaCfAfAfaucuaagaaaL96 | 803 | VPusUfsucuUfagauuugUfcGfuguagscsa | 1083 |
| 2222895.1 | | | | |
| AD- | usascacgAfcAfAfAfuccaagaaaaL96 | 804 | VPusUfsuucUfuggauuuGfuCfguguasgsc | 1084 |
| 2136438.1 | | | | |
| AD- | usascacgAfcAfAfAfuccuagaaaaL96 | 805 | VPusUfsuucUfaggauuuGfuCfguguasgsc | 1085 |
| 2222896.1 | | | | |
| AD- | ascsacgaCfaAfAfUfccaagaaaaaL96 | 806 | VPusUfsuuuCfuuggauuUfgUfcgugusas | 1086 |
| 2136439.1 | | | g | |
| AD- | ascsacgaCfaAfAfUfccaugaaaaaL96 | \|807 | VPusUfsuuuCfauggauuUfgUfcgugusasg | 1087 |
| 2222897.1 | | | | |
| AD- | csascgacAfaAfUfCfcaagaaaacaL96 | 808 | VPusGfsuuuUfcuuggauUfuGfucgugsus | 1088 |
| 2136440.1 | | | a | |
| AD- | csascgacAfaAfUfCfcaauaaaacaL96 | 809 | VPusGfsuuuUfauuggauUfuGfucgugsus | 1089 |
| 2222898.1 | | | a | |
| AD- | csgsacaaAfuCfCfAfagaaaacuuaL96 | 810 | VPusAfsaguUfuucuuggAfuUfugucgsus | 1090 |
| 2136442.1 | | | g | |
| AD- | gsascaaaUfcCfAfAfgaaaacuuuaL96 | 811 | VPusAfsaagUfuuucuugGfaUfuugucsgsu | 1091 |
| 2136443.1 | | | | |
| AD- | gsascaaaUfcCfAfAfgaauacuuuaL96 | 812 | VPusAfsaagUfauucuugGfaUfuugucsgsu | 1092 |
| 2222899.1 | | | | |
| AD- | gsascuacUfgUfGfAfugucccucaaL96 | 813 | VPusUfsgagGfgacaucaCfaGfuagucsgsu | 1093 |
| 2136465.1 | | | | |
| AD- | gsascuacUfgUfGfAfuguuccucaaL96 | 814 | VPusUfsgagGfaacaucaCfaGfuagucsgsu | 1094 |
| 2222900.1 | | | | |
| AD- | csusgugaUfgUfCfCfcucagugugaL96 | 815 | VPusCfsacaCfugagggaCfaUfcacagsusa | 1095 |
| 2136470.1 | | | | |
| AD- | ususggaaUfgCfAfCfuucuguggaaL96 | 816 | VPusUfsccaCfagaagugCfaUfuccaasasc | 1096 |
| 2136571.1 | | | | |
| AD- | ususggaaUfgCfAfCfuucuuuggaaL96 | 817 | VPusUfsccaAfagaagugCfaUfuccaasasc | 1097 |
| 2222901.1 | | | | |
| AD- | usgscccaCfuGfCfUfuggagaaguaL96 | 818 | VPusAfscuuCfuccaagcAfgUfgggcasgsc | 1098 |
| 2136606.1 | | | | |
| AD- | usgscccaCfuGfCfUfuggugaaguaL96 | 819 | VPusAfscuuCfaccaagcAfgUfgggcasgsc | 1099 |
| 2222902.1 | | | | |
| AD- | asasagauAfuUfGfCfcuugcuaaaaL96 | 820 | VPusUfsuuaGfcaaggcaAfuAfucuuususc | 1100 |
| 2136716.1 | | | | |
| AD- | asasagauAfuUfGfCfcuuucuaaaaL96 | 821 | VPusUfsuuaGfaaaggcaAfuAfucuuususc | 1101 |
| 2222903.1 | | | | |
| AD- | asasgauaUfuGfCfCfuugcuaaagaL96 | 822 | VPusCfsuuuAfgcaaggcAfaUfaucuususu | 1102 |
| 2136717.1 | | | | |
| AD- | asgsauauUfgCfCfUfugcuaaagcaL96 | 823 | VPusGfscuuUfagcaaggCfaAfuaucususu | 1103 |
| 2136718.3 | | | | |
| AD- | usasuugcCfuUfGfCfuaaagcuaaaL96 | 824 | VPusUfsuagCfuuuagcaAfgGfcaauasusc | 1104 |
| 2136721.1 | | | | |
| AD- | cscsuugcUfaAfAfGfcuaagcaguaL96 | 825 | VPusAfscugCfuuagcuuUfaGfcaaggscsa | 1105 |
| 2136726.1 | | | | |
| AD- | cscsuugcUfaAfAfGfcuaugcaguaL96 | 826 | VPusAfscugCfauagcuuUfaGfcaaggscsa | 1106 |
| 2222905.1 | | | | |
| AD- | usgscuaaAfgCfUfAfagcaguccuaL96 | 827 | VPusAfsggaCfugcuuagCfuUfuagcasasg | 1107 |
| 2136729.1 | | | | |
| AD- | usgscuaaAfgCfUfAfagcuguccuaL96 | 828 | VPusAfsggaCfagcuuagCfuUfuagcasasg | 1108 |
| 2222906.1 | | | | |
| AD- | uscsaucaCfuGfAfCfaaaguaaucaL96 | 829 | VPusGfsauuAfcuuugucAfgUfgaugascsg | 1109 |
| 2136753.1 | | | | |
| AD- | csasucacUfgAfCfAfaaguaauccaL96 | 830 | VPusGfsgauUfacuuuguCfaGfugaugsasc | 1110 |
| 2136754.1 | | | | |
| AD- | asuscacuGfaCfAfAfaguaaucccaL96 | 831 | VPusGfsggaUfuacuuugUfcAfgugausgsa | 1111 |
| 2136755.1 | | | | |
| AD- | uscsacugAfcAfAfAfguaaucccaaL96 | 832 | VPusUfsgggAfuuacuuuGfuCfagugasusg | 1112 |
| 2136756.1 | | | | |
| AD- | uscsacugAfcAfAfAfguauucccaaL96 | 833 | VPusUfsgggAfauacuuuGfuCfagugasusg | 1113 |
| 2222907.1 | | | | |
| AD- | csascugaCfaAfAfGfuaaucccagaL96 | 834 | VPusCfsuggGfauuacuuUfgUfcagugsasu | 1114 |
| 2136757.1 | | | | |
| AD- | csascugaCfaAfAfGfuaauuccagaL96 | 835 | VPusCfsuggAfauuacuuUfgUfcagugsasu | 1115 |
| 2222908.1 | | | | |
| AD- | ascsugacAfaAfGfUfaaucccagcaL96 | 836 | VPusGfscugGfgauuacuUfuGfucagusgsa | 1116 |
| 2136758.1 | | | | |
| AD- | ascsugacAfaAfGfUfaauuccagcaL96 | 837 | VPusGfscugGfaauuacuUfuGfucagusgsa | 1117 |
| 2222909.1 | | | | |
| AD- | usgsacaaAfgUfAfAfucccagcuuaL96 | 838 | VPusAfsagcUfgggauuaCfuUfugucasgsu | 1118 |
| 2136760.1 | | | | |
| AD- | usgsacaaAfgUfAfAfuccuagcuuaL96 | 839 | VPusAfsagcUfaggauuaCfuUfugucasgsu | 1119 |
| 2222910.1 | | | | |
| AD- | gsascaaaGfuAfAfUfcccagcuugaL96 | 840 | VPusCfsaagCfugggauuAfcUfuugucsasg | 1120 |
| 2136761.1 | | | | |
| AD- | ascsaaagUfaAfUfCfccagcuuguaL96 | 841 | VPusAfscaaGfcugggauUfaCfuuuguscsa | 1121 |
| 2136762.1 | | | | |
| AD- | ascsaaagUfaAfUfCfccaucuuguaL96 | 842 | VPusAfscaaGfaugggauUfaCfuuuguscsa | 1122 |
| 2222911.1 | | | | |
| AD- | csasaaguAfaUfCfCfcagcuugucaL96 | 843 | VPusGfsacaAfgcugggaUfuAfcuuugsusc | 1123 |
| 2136763.1 | | | | |
| AD- | asasaguaAfuCfCfCfagcuugucuaL96 | 844 | VPusAfsgacAfagcugggAfuUfacuuusgsu | 1124 |
| 2136764.1 | | | | |
| AD- | csusgaccGfgAfCfCfgaauguuucaL96 | 845 | VPusGfsaaaCfauucgguCfcGfgucagscsg | 1125 |
| 2136787.1 | | | | |
| AD- | csusgaccGfgAfCfCfgaauuuuucaL96 | 846 | VPusGfsaaaAfauucgguCfcGfgucagscsg | 1126 |
| 2222912.1 | | | | |
| AD- | ascscggaCfcGfAfAfuguuucaucaL96 | 847 | VPusGfsaugAfaacauucGfgUfccgguscsa | 1127 |
| 2136790.1 | | | | |
| AD- | cscsggacCfgAfAfUfguuucaucaaL96 | 848 | VPusUfsgauGfaaacauuCfgGfuccggsusc | 1128 |
| 2136791.1 | | | | |
| AD- | cscsggacCfgAfAfUfguuuuaucaaL96 | 849 | VPusUfsgauAfaaacauuCfgGfuccggsusc | 1129 |
| 2222913.1 | | | | |
| AD- | csgsgaccGfaAfUfGfuuucaucacaL96 | 850 | VPusGfsugaUfgaaacauUfcGfguccgsgsu | 1130 |
| 2136792.1 | | | | |
| AD- | csgsgaccGfaAfUfGfuuuuaucacaL96 | 851 | VPusGfsugaUfaaaacauUfcGfguccgsgsu | 1131 |
| 2222914.1 | | | | |
| AD- | gsgsaccgAfaUfGfUfuucaucacuaL96 | 852 | VPusAfsgugAfugaaacaUfuCfgguccsgsg | 1132 |
| 2136793.1 | | | | |
| AD- | gsgsaccgAfaUfGfUfuucuucacuaL96 | 853 | VPusAfsgugAfagaaacaUfuCfgguccsgsg | 1133 |
| 2222915.1 | | | | |
| AD- | gsasccgaAfuGfUfUfucaucacugaL96 | 854 | VPusCfsaguGfaugaaacAfuUfcggucscsg | 1134 |
| 2136794.1 | | | | |
| AD- | gsasccgaAfuGfUfUfucauuacugaL96 | 855 | VPusCfsaguAfaugaaacAfuUfcggucscsg | 1135 |
| 2222916.1 | | | | |
| AD- | csgsaaugUfuUfCfAfucacuggcuaL96 | 856 | VPusAfsgccAfgugaugaAfaCfauucgsgsu | 1136 |
| 2136797.1 | | | | |
| AD- | csgsaaugUfuUfCfAfucauuggcuaL96 | 857 | VPusAfsgccAfaugaugaAfaCfauucgsgsu | 1137 |
| 2222917.1 | | | | |
| AD- | csusgugaUfuGfAfGfaauaaagugaL96 | 858 | VPusCfsacuUfuauucucAfaUfcacagsgsg | 1138 |
| 2136851.1 | | | | |
| AD- | usgsugauUfgAfGfAfauaaaguguaL96 | 859 | VPusAfscacUfuuauucuCfaAfucacasgsg | 1139 |
| 2136852.1 | | | | |
| AD- | gsusgauuGfaGfAfAfuaaagugugaL96 | 860 | VPusCfsacaCfuuuauucUfcAfaucacsasg | 1140 |
| 2136853.1 | | | | |
| AD- | usgsauugAfgAfAfUfaaagugugcaL96 | 861 | VPusGfscacAfcuuuauuCfuCfaaucascsa | 1141 |
| 2136854.1 | | | | |
| AD- | gsasuugaGfaAfUfAfaagugugcaaL96 | 862 | VPusUfsgcaCfacuuuauUfcUfcaaucsasc | 1142 |
| 2136855.1 | | | | |
| AD- | gsasuugaGfaAfUfAfaaguuugcaaL96 | 863 | VPusUfsgcaAfacuuuauUfcUfcaaucsasc | 1143 |
| 2222918.1 | | | | |
| AD- | ususgagaAfuAfAfAfgugugcaauaL96 | 864 | VPusAfsuugCfacacuuuAfuUfcucaasusc | 1144 |
| 2136857.1 | | | | |
| AD- | ususgagaAfuAfAfAfguguucaauaL96 | 865 | VPusAfsuugAfacacuuuAfuUfcucaasusc | 1145 |
| 2222919.1 | | | | |
| AD- | gsasgaauAfaAfGfUfgugcaaucgaL96 | 866 | VPusCfsgauUfgcacacuUfuAfuucucsasa | 1146 |
| 2136859.1 | | | | |
| AD- | gsasgaauAfaAfGfUfguguaaucgaL96 | 867 | VPusCfsgauUfacacacuUfuAfuucucsasa | 1147 |
| 2222920.1 | | | | |
| AD- | gsasauaaAfgUfGfUfgcaaucgcuaL96 | 868 | VPusAfsgcgAfuugcacaCfuUfuauucsusc | 1148 |
| 2136861.1 | | | | |
| AD- | asasuaaaGfuGfUfGfcaaucgcuaaL96 | 869 | VPusUfsagcGfauugcacAfcUfuuauuscsu | 1149 |
| 2136862.1 | | | | |
| AD- | usasaaguGfuGfCfAfaucgcuaugaL96 | 870 | VPusCfsauaGfcgauugcAfcAfcuuuasusu | 1150 |
| 2136864.1 | | | | |
| AD- | asasagugUfgCfAfAfucgcuaugaaL96 | 871 | VPusUfscauAfgcgauugCfaCfacuuusasu | 1151 |
| 2136865.1 | | | | |
| AD- | asasagugUfgCfAfAfucguuaugaaL96 | 872 | VPusUfscauAfacgauugCfaCfacuuusasu | 1152 |
| 2222921.1 | | | | |
| AD- | asasguguGfcAfAfUfcgcuaugagaL96 | 873 | VPusCfsucaUfagcgauuGfcAfcacuususa | 1153 |
| 2136866.1 | | | | |
| AD- | asgsugugCfaAfUfCfgcuaugaguaL96 | 874 | VPusAfscucAfuagcgauUfgCfacacususu | 1154 |
| 2136867.1 | | | | |
| AD- | gsusgugcAfaUfCfGfcuaugaguuaL96 | 875 | VPusAfsacuCfauagcgaUfuGfcacacsusu | 1155 |
| 2136868.1 | | | | |
| AD- | gsusgugcAfaUfCfGfcuauuaguuaL96 | 876 | VPusAfsacuAfauagcgaUfuGfcacacsusu | 1156 |
| 2222922.1 | | | | |
| AD- | usgsugcaAfuCfGfCfuaugaguuuaL96 | 877 | VPusAfsaacUfcauagcgAfuUfgcacascsu | 1157 |
| 2136869.1 | | | | |
| AD- | usgsugcaAfuCfGfCfuauuaguuuaL96 | 878 | VPusAfsaacUfaauagcgAfuUfgcacascsu | 1158 |
| 2222923.1 | | | | |
| AD- | gsusgcaaUfcGfCfUfaugaguuucaL96 | 879 | VPusGfsaaaCfucauagcGfaUfugcacsasc | 1159 |
| 2136870.1 | | | | |
| AD- | gsusgcaaUfcGfCfUfauguguuucaL96 | 880 | VPusGfsaaaCfacauagcGfaUfugcacsasc | 1160 |
| 2222924.1 | | | | |
| AD- | usgscaauCfgCfUfAfugaguuucuaL96 | 881 | VPusAfsgaaAfcucauagCfgAfuugcascsa | 1161 |
| 2136871.1 | | | | |
| AD- | csasaucgCfuAfUfGfaguuucugaaL96 | 882 | VPusUfscagAfaacucauAfgCfgauugscsa | 1162 |
| 2136873.1 | | | | |
| AD- | asasucgcUfaUfGfAfguuucugaaaL96 | 883 | VPusUfsucaGfaaacucaUfaGfcgauusgsc | 1163 |
| 2136874.1 | | | | |
| AD- | asasucgcUfaUfGfAfguuuuugaaaL96 | 884 | VPusUfsucaAfaaacucaUfaGfcgauusgsc | 1164 |
| 2222925.1 | | | | |
| AD- | asuscgcuAfuGfAfGfuuucugaauaL96 | 885 | VPusAfsuucAfgaaacucAfuAfgcgaususg | 1165 |
| 2136875.1 | | | | |
| AD- | asuscgcuAfuGfAfGfuuuuugaauaL96 | 886 | VPusAfsuucAfaaaacucAfuAfgcgaususg | 1166 |
| 2222926.1 | | | | |
| AD- | uscsgcuaUfgAfGfUfuucugaaugaL96 | 887 | VPusCfsauuCfagaaacuCfaUfagcgasusu | 1167 |
| 2136876.1 | | | | |
| AD- | uscsgcuaUfgAfGfUfuucuuaaugaL96 | 888 | VPusCfsauuAfagaaacuCfaUfagcgasusu | 1168 |
| 2222927.1 | | | | |
| AD- | csgscuauGfaGfUfUfucugaauggaL96 | 889 | VPusCfscauUfcagaaacUfcAfuagcgsasu | 1169 |
| 2136877.1 | | | | |
| AD- | gscsuaugAfgUfUfUfcugaauggaaL96 | 890 | VPusUfsccaUfucagaaaCfuCfauagcsgsa | 1170 |
| 2136878.1 | | | | |
| AD- | csusaugaGfuUfUfCfugaauggaaaL96 | 891 | VPusUfsuccAfuucagaaAfcUfcauagscsg | 1171 |
| 2136879.1 | | | | |
| AD- | csusaugaGfuUfUfCfugauuggaaaL96 | 892 | VPusUfsuccAfaucagaaAfcUfcauagscsg | 1172 |
| 2222928.1 | | | | |
| AD- | usasugagUfuUfCfUfgaauggaagaL96 | 893 | VPusCfsuucCfauucagaAfaCfucauasgsc | 1173 |
| 2136880.1 | | | | |
| AD- | usasugagUfuUfCfUfgaauugaagaL96 | 894 | VPusCfsuucAfauucagaAfaCfucauasgsc | 1174 |
| 2222929.1 | | | | |
| AD- | usgsaguuUfcUfGfAfauggaagagaL96 | 895 | VPusCfsucuUfccauucaGfaAfacucasusa | 1175 |
| 2136882.1 | | | | |
| AD- | gsasguuuCfuGfAfAfuggaagaguaL96 | 896 | VPusAfscucUfuccauucAfgAfaacucsasu | 1176 |
| 2136883.1 | | | | |
| AD- | gsasguuuCfuGfAfAfugguagaguaL96 | 897 | VPusAfscucUfaccauucAfgAfaacucsasu | 1177 |
| 2222930.1 | | | | |
| AD- | csusucgaGfaAfGfGfacaaauacaaL96 | 898 | VPusUfsguaUfuuguccuUfcUfcgaagscsa | 1178 |
| 2136992.1 | | | | |
| AD- | ususcgagAfaGfGfAfcaaauacauaL96 | 899 | VPusAfsuguAfuuuguccUfuCfucgaasgsc | 1179 |
| 2136993.1 | | | | |
| AD- | uscsgagaAfgGfAfCfaaauacauuaL96 | 900 | VPusAfsaugUfauuugucCfuUfcucgasasg | 1180 |
| 2136994.1 | | | | |
| AD- | uscsgagaAfgGfAfCfaaauucauuaL96 | 901 | VPusAfsaugAfauuugucCfuUfcucgasasg | 1181 |
| 2222931.1 | | | | |
| AD- | csgsagaaGfgAfCfAfaauacauuuaL96 | 902 | VPusAfsaauGfuauuuguCfcUfucucgsasa | 1182 |
| 2136995.1 | | | | |
| AD- | csgsagaaGfgAfCfAfaauucauuuaL96 | 903 | VPusAfsaauGfaauuuguCfcUfucucgsasa | 1183 |
| 2222932.1 | | | | |
| AD- | gsasgaagGfaCfAfAfauacauuuuaL96 | 904 | VPusAfsaaaUfguauuugUfcCfuucucsgsa | 1184 |
| 2136996.1 | | | | |
| AD- | asgsaaggAfcAfAfAfuacauuuuaaL96 | 905 | VPusUfsaaaAfuguauuuGfuCfcuucuscsg | 1185 |
| 2136997.1 | | | | |
| AD- | gsasaggaCfaAfAfUfacauuuuacaL96 | 906 | VPusGfsuaaAfauguauuUfgUfccuucsusc | 1186 |
| 2136998.1 | | | | |
| AD- | asasggacAfaAfUfAfcauuuuacaaL96 | 907 | VPusUfsguaAfaauguauUfuGfuccuuscsu | 1187 |
| 2136999.1 | | | | |
| AD- | asgsgacaAfaUfAfCfauuuuacaaaL96 | 908 | VPusUfsuguAfaaauguaUfuUfguccususc | 1188 |
| 2137000.1 | | | | |
| AD- | gsgsacaaAfuAfCfAfuuuuacaagaL96 | 909 | VPusCfsuugUfaaaauguAfuUfuguccsusu | 1189 |
| 2137001.1 | | | | |
| AD- | gsascaaaUfaCfAfUfuuuacaaggaL96 | 910 | VPusCfscuuGfuaaaaugUfaUfuugucscsu | 1190 |
| 2137002.1 | | | | |
| AD- | gsascaaaUfaCfAfUfuuuucaaggaL96 | 911 | VPusCfscuuGfaaaaaugUfaUfuugucscsu | 1191 |
| 2222933.1 | | | | |
| AD- | csusggugUfcUfAfUfguucguguuaL96 | 912 | VPusAfsacaCfgaacauaGfaCfaccagsgsc | 1192 |
| 2137016.3 | | | | |
| AD- | usgsguguCfuAfUfGfuucguguuuaL96 | 913 | VPusAfsaacAfcgaacauAfgAfcaccasgsg | 1193 |
| 2137017.3 | | | | |
| AD- | gsgsugucUfaUfGfUfucguguuucaL96 | 914 | VPusGfsaaaCfacgaacaUfaGfacaccsasg | 1194 |
| 2137018.5 | | | | |
| AD- | gsgsugucUfaUfGfUfucguuuuucaL96 | 915 | VPusGfsaaaAfacgaacaUfaGfacaccsasg | 1195 |
| 2222934.1 | | | | |
| AD- | gsusgucuAfuGfUfUfcguguuucaaL96 | 916 | VPusUfsgaaAfcacgaacAfuAfgacacscsa | 1196 |
| 2137019.1 | | | | |
| AD- | usgsucuaUfgUfUfCfguguuucaaaL96 | 917 | VPusUfsugaAfacacgaaCfaUfagacascsc | 1197 |
| 2137020.1 | | | | |
| AD- | gsuscuauGfuUfCfGfuguuucaagaL96 | 918 | VPusCfsuugAfaacacgaAfcAfuagacsasc | 1198 |
| 2137021.1 | | | | |
| AD- | uscsuaugUfuCfGfUfguuucaaggaL96 | 919 | VPusCfscuuGfaaacacgAfaCfauagascsa | 1199 |
| 2137022.1 | | | | |
| AD- | csusauguUfcGfUfGfuuucaagguaL96 | 920 | VPusAfsccuUfgaaacacGfaAfcauagsasc | 1200 |
| 2137023.1 | | | | |
| AD- | usasuguuCfgUfGfUfuucaagguuaL96 | 921 | VPusAfsaccUfugaaacaCfgAfacauasgsa | 1201 |
| 2137024.1 | | | | |
| AD- | asusguucGfuGfUfUfucaagguuuaL96 | 922 | VPusAfsaacCfuugaaacAfcGfaacausasg | 1202 |
| 2137025.1 | | | | |
| AD- | usgsuucgUfgUfUfUfcaagguuugaL96 | 923 | VPusCfsaaaCfcuugaaaCfaCfgaacasusa | 1203 |
| 2137026.1 | | | | |
| AD- | gsusucguGfuUfUfCfaagguuuguaL96 | 924 | VPusAfscaaAfccuugaaAfcAfcgaacsasu | 1204 |
| 2137027.1 | | | | |
| AD- | ususgaggGfaGfUfGfaugagaaauaL96 | 925 | VPusAfsuuuCfucaucacUfcCfcucaasusc | 1205 |
| 2137055.1 | | | | |
| AD- | ususgaggGfaGfUfGfaugugaaauaL96 | 926 | VPusAfsuuuCfacaucacUfcCfcucaasusc | 1206 |
| 2222935.1 | | | | |
| AD- | usgsagggAfgUfGfAfugagaaauaaL96 | 927 | VPusUfsauuUfcucaucaCfuCfccucasasu | 1207 |
| 2137056.1 | | | | |
| AD- | usgsagggAfgUfGfAfugauaaauaaL96 | 928 | VPusUfsauuUfaucaucaCfuCfccucasasu | 1208 |
| 2222936.1 | | | | |
| AD- | lgsasgggaGfuGfAfUfgagaaauaaaL96 | 929 | VPusUfsuauUfucucaucAfcUfcccucsasa | 1209 |
| 2137057.1 | | | | |
| AD- | gsasgggaGfuGfAfUfgaguaauaaaL96 | 930 | VPusUfsuauUfacucaucAfcUfcccucsasa | 1210 |
| 2222937.1 | | | | |
| AD- | gsgsgaguGfaUfGfAfgaaauaauuaL96 | 931 | VPusAfsauuAfuuucucaUfcAfcucccsusc | 1211 |
| 2137059.1 | | | | |
| AD- | gsasgugaUfgAfGfAfaauaauuaaaL96 | 932 | VPusUfsuaaUfuauuucuCfaUfcacucscsc | 1212 |
| 2137061.1 | | | | |
| AD- | gsusgaugAfgAfAfAfuaauuaauuaL96 | 933 | VPusAfsauuAfauuauuuCfuCfaucacsusc | 1213 |
| 2222939.1 | | | | |
| AD- | usgsaugaGfaAfAfUfaauuaauugaL96 | 934 | VPusCfsaauUfaauuauuUfcUfcaucascsu | 1214 |
| 2222940.1 | | | | |
| AD- | gsasugagAfaAfUfAfauuaauuggaL96 | 935 | VPusCfscaaUfuaauuauUfuCfucaucsasc | 1215 |
| 2137062.1 | | | | |
| AD- | asusgagaAfaUfAfAfuuaauuggaaL96 | 936 | VPusUfsccaAfuuaauuaUfuUfcucauscsa | 1216 |
| 2137063.1 | | | | |
| AD- | ascsugacUfcAfCfCfuagaggcugaL96 | 937 | VPusCfsagcCfucuagguGfaGfucagusgsc | 1217 |
| 2137101.1 | | | | |
| AD- | gsgsuaggGfaUfUfUfagcaugcugaL96 | 938 | VPusCfsagcAfugcuaaaUfcCfcuaccscsa | 1218 |
| 2137128.1 | | | | |
| AD- | usasgggaUfuUfAfGfcaugcuggaaL96 | 939 | VPusUfsccaGfcaugcuaAfaUfcccuascsc | 1219 |
| 2137130.1 | | | | |
| AD- | usasgcauGfcUfGfGfaaauaacugaL96 | 940 | VPusCfsaguUfauuuccaGfcAfugcuasasa | 1220 |
| 2137138.1 | | | | |
| AD- | usgsuuauUfuUfCfUfgacugcuggaL96 | 941 | VPusCfscagCfagucagaAfaAfuaacascsa | 1221 |
| 2137196.1 | | | | |
| AD- | usgsuuauUfuUfCfUfgacuucuggaL96 | 942 | VPusCfscagAfagucagaAfaAfuaacascsa | 1222 |
| 2222942.1 | | | | |
| AD- | gsusuauuUfuCfUfGfacugcuggaaL96 | 943 | VPusUfsccaGfcagucagAfaAfauaacsasc | 1223 |
| 2137197.1 | | | | |
| AD- | gsusuauuUfuCfUfGfacuucuggaaL96 | 944 | VPusUfsccaGfaagucagAfaAfauaacsasc | 1224 |
| 2222943.1 | | | | |
| AD- | ususauuuUfcUfGfAfcugcuggauaL96 | 945 | VPusAfsuccAfgcagucaGfaAfaauaascsa | 1225 |
| 2137198.1 | | | | |
| AD- | ususauuuUfcUfGfAfcuguuggauaL96 | 946 | VPusAfsuccAfacagucaGfaAfaauaascsa | 1226 |
| 2222944.1 | | | | |
| AD- | usasuuuuCfuGfAfCfugcuggauuaL96 | 947 | VPusAfsaucCfagcagucAfgAfaaauasasc | 1227 |
| 2137199.1 | | | | |
| AD- | usasuuuuCfuGfAfCfugcuugauuaL96 | 948 | VPusAfsaucAfagcagucAfgAfaaauasasc | 1228 |
| 2222945.1 | | | | |
| AD- | asusuuucUfgAfCfUfgcuggauucaL96 | 949 | VPusGfsaauCfcagcaguCfaGfaaaausasa | 1229 |
| 2137200.1 | | | | |
| AD- | asusuuucUfgAfCfUfgcuugauucaL96 | 950 | VPusGfsaauCfaagcaguCfaGfaaaausasa | 1230 |
| 2222946.1 | | | | |
| AD- | uscsugacUfgCfUfGfgauucuguaaL96 | 951 | VPusUfsacaGfaauccagCfaGfucagasasa | 1231 |
| 2137204.1 | | | | |
| AD- | asgsuaagGfuGfAfCfauagcuaugaL96 | 952 | VPusCfsauaGfcuaugucAfcCfuuacusasc | 1232 |
| 2137223.1 | | | | |
| AD- | gsusaaggUfgAfCfAfuagcuaugaaL96 | 953 | VPusUfscauAfgcuauguCfaCfcuuacsusa | 1233 |
| 2137224.1 | | | | |
| AD- | gsusaaggUfgAfCfAfuaguuaugaaL96 | 954 | VPusUfscauAfacuauguCfaCfcuuacsusa | 1234 |
| 2222947.1 | | | | |
| AD- | usasagguGfaCfAfUfagcuaugacaL96 | 955 | VPusGfsucaUfagcuaugUfcAfccuuascsu | 1235 |
| 2137225.1 | | | | |
| AD- | ascsauuuGfuUfAfAfaaauaaacuaL96 | 956 | VPusAfsguuUfauuuuuaAfcAfaauguscsa | 1236 |
| 2222949.1 | | | | |
| AD- | ccucugGfaUfGfAfcuaugugaaa | 957 | PuUfucaCfauagucaUfcCfagaggcu | 1237 |
| 2138055 | | | | |
| AD- | acauucCfuUfCfCfaaauuuccaa | 958 | PuUfggaAfauuuggaAfgGfaauguau | 1238 |
| 2138237 | | | | |
| AD- | gaaccuGfaAfGfAfagaauuacua | 959 | PuAfguaAfuucuucuUfcAfgguucuu | 1239 |
| 2138262 | | | | |
| AD- | ccugcaAfaAfAfUfuuggaugaaa | 960 | PuUfucaUfccaaauuUfuUfgcagggg | 1240 |
| 2138349 | | | | |
| AD- | JaggaaaGfaAfGfUfgucagucuua | 961 | PuAfagaCfugacacuUfcUfuuccugu | 1241 |
| 2138441 | | | | |
| AD- | cugaccGfgAfCfCfgaauguuuca | 962 | PuGfaaaCfauucgguCfcGfgucagcg | 1242 |
| 2138656 | | | | |
| AD- | ugcaauCfgCfUfAfugaguuucua | 963 | PuAfgaaAfcucauagCfgAfuugcaca | 1243 |
| 2138710 | | | | |
| AD- | ggugucUfaUfGfUfucguguuuca | 964 | PuGfaaaCfacgaacaUfaGfacaccag | 1244 |
| 2138754 | | | | |
| AD- | gugucuAfuGfUfUfcguguuucaa | 965 | PuUfgaaAfcacgaacAfuAfgacacca | 1245 |
| 2138755 | | | | |
| AD- | ugucuaUfgUfUfCfguguuucaaa | 966 | PuUfugaAfacacgaaCfaUfagacacc | 1246 |
| 2138756 | | | | |
| AD- | gagugaUfgAfGfAfaauaauuaaa | 967 | PuUfuaaUfuauuucuCfaUfcacuccc | 1247 |
| 2138789 | | | | |
| AD- | ugaugaGfaAfAfUfaauuaauuga | 968 | PuCfaauUfaauuauuUfcUfcaucacu | 1248 |
| 2138792 | | | | |
| AD- | augagaAfaUfAfAfuuaauuggaa | 969 | PuUfccaAfuuaauuaUfuUfcucauca | 1249 |
| 2138794 | | | | |
| AD- | aaggacAfaAfUfAfcauuuuacaa | 970 | PuUfguaAfaauguauUfuGfuccuucu | 1250 |
| 2138742 | | | | |
| AD- | cscsucugGfaUfGfAfcuaugugaaaL96 | 696 | usUfsucaCfauagucaUfcCfagaggscsu | 1251 |
| 2315876 | | | | |
| AD- | ascsauucCfuUfCfCfaaauuuccaaL96 | 714 | usUfsggaAfauuuggaAfgGfaaugusasu | 1252 |
| 2315885 | | | | |
| AD- | gsasaccuGfaAfGfAfagaauuacuaL96 | 733 | usAfsguaAfuucuucuUfcAfgguucsusu | 1253 |
| 2315882 | | | | |
| AD- | cscsugcaAfaAfAfUfuuguaugaaaL96 | 744 | usUfsucaUfacaaauuUfuUfgcaggsgsg | 1254 |
| 2315883 | | | | |
| AD- | asgsgaaaGfaAfGfUfgucagucuuaL96 | 766 | usAfsagaCfugacacuUfcUfuuccusgsu | 1255 |
| 2315887 | | | | |
| AD- | csusgaccGfgAfCfCfgaauguuucaL96 | 845 | usGfsaaaCfauucgguCfcGfgucagscsg | 1256 |
| 2315880 | | | | |
| AD- | usgscaauCfgCfUfAfugaguuucuaL96 | 881 | usAfsgaaAfcucauagCfgAfuugcascsa | 1257 |
| 2315878 | | | | |
| AD- | gsgsugucUfaUfGfUfucguguuucaL96 | 914 | usGfsaaaCfacgaacaUfaGfacaccsasg | 1258 |
| 2315874 | | | | |
| AD- | gsusgucuAfuGfUfUfcguguuucaaL96 | 916 | usUfsgaaAfcacgaacAfuAfgacacscsa | 1259 |
| 2315884 | | | | |
| AD- | usgsucuaUfgUfUfCfguguuucaaaL96 | 917 | usUfsugaAfacacgaaCfaUfagacascsc | 1260 |
| 2315886 | | | | |
| AD- | gsasgugaUfgAfGfAfaauaauuaaaL96 | 932 | usUfsuaaUfuauuucuCfaUfcacucscsc | 1261 |
| 2315877 | | | | |
| AD- | usgsaugaGfaAfAfUfaauuaauugaL96 | 934 | usCfsaauUfaauuauuUfcUfcaucascsu | 1262 |
| 2315881 | | | | |
| AD- | asusgagaAfaUfAfAfuuaauuggaaL96 | 936 | usUfsccaAfuuaauuaUfuUfcucauscsa | 1263 |
| 2315879 | | | | |
| AD- | asasggacAfaAfUfAfcauuuuacaaL96 | 907 | usUfsguaAfaauguauUfuGfuccuuscsu | 1264 |
| 2315875 | | | | |

TABLE 7
Unmodified Sense and Antisense Strand Sequences of Selected Human PLG dsRNA Agents

| | Sense Sequence | SEQ | Antisense Sequence | SEQ |
|---|---|---|---|---|
| Duplex ID | 5′ to 3′ | ID NO: | 5′ to 3′ | ID NO: |
| AD-2137018.5/ | GGUGUCUAUGU | 1273 | UGAAACACGAAC | 1287 |
| AD-2315874 | UCGUGUUUCA | | AUAGACACCAG | |
| AD-2136999.1/ | AAGGACAAAUA | 1274 | UUGUAAAAUGUA | 1288 |
| AD-2315875 | CAUUUUACAA | | UUUGUCCUUCU | |
| AD-2134687.1/ | CCUCUGGAUGAC | 1275 | UUUCACAUAGUC | 1289 |
| AD-2315876 | UAUGUGAAA | | AUCCAGAGGCU | |
| AD-2137061.1/ | GAGUGAUGAGA | 1276 | UUUAAUUAUUUC | 1290 |
| AD-2315877 | AAUAAUUAAA | | UCAUCACUCCC | |
| AD-2136871.1/ | UGCAAUCGCUAU | 1277 | UAGAAACUCAUA | 1291 |
| AD-2315878 | GAGUUUCUA | | GCGAUUGCACA | |
| AD-2137063.1/ | AUGAGAAAUAA | 1278 | UUCCAAUUAAUU | 1292 |
| AD-2315879 | UUAAUUGGAA | | AUUUCUCAUCA | |
| AD-2136787.1/ | CUGACCGGACCG | 1279 | UGAAACAUUCGG | 1293 |
| AD-2315880 | AAUGUUUCA | | UCCGGUCAGCG | |
| AD-2222940.1/ | UGAUGAGAAAU | 1280 | UCAAUUAAUUAU | 1294 |
| AD-2315881 | AAUUAAUUGA | | UUCUCAUCACU | |
| AD-2135737.1/ | GAACCUGAAGA | 1281 | UAGUAAUUCUUC | 1295 |
| AD-2315882 | AGAAUUACUA | | UUCAGGUUCUU | |
| AD-2222874.1/ | CCUGCAAAAAUU | 1282 | UUUCAUACAAAU | 1296 |
| AD-2315883 | UGUAUGAAA | | UUUUGCAGGGG | |
| AD-2137019.1/ | GUGUCUAUGUU | 1283 | UUGAAACACGAA | 1297 |
| AD-2315884 | CGUGUUUCAA | | CAUAGACACCA | |
| AD-2135712.1/ | ACAUUCCUUCCA | 1284 | UUGGAAAUUUGG | 1298 |
| AD-2315885 | AAUUUCCAA | | AAGGAAUGUAU | |
| AD-2137020.1/ | UGUCUAUGUUC | 1285 | UUUGAAACACGA | 1299 |
| AD-2315886 | GUGUUUCAAA | | ACAUAGACACC | |
| AD-2136072.1/ | AGGAAAGAAGU | 1286 | UAAGACUGACAC | 1300 |
| AD-2315887 | GUCAGUCUUA | | UUCUUUCCUGU | |

TABLE 8A
Additional Unmodified Sense and Antisense Strands of Human PLG dsRNA Agents

| | | SEQ ID | | SEQ ID |
|---|---|---|---|---|
| Duplex ID | Sense Sequence | NO | Antisense Sequence | NO |
| AD-2138040.1 | GGACCCACUUUCUGGGCACUA | 1265 | UAGUGCCCAGAAAGUGGGUCCCA | 1815 |
| AD-2138041.1 | GACCCACUUUCUGGGCACUGA | 1266 | UCAGUGCCCAGAAAGUGGGUCCC | 1816 |
| AD-2138042.1 | ACCCACUUUCUGGGCACUGCA | 1267 | UGCAGUGCCCAGAAAGUGGGUCC | 1817 |
| AD-2138043.1 | CAGUCCCAAAAUGGAACAUAA | 1268 | UUAUGUUCCAUUUUGGGACUGGC | 1818 |
| AD-2138044.1 | AGUCCCAAAAUGGAACAUAAA | 1269 | UUUAUGUUCCAUUUUGGGACUGG | 1819 |
| AD-2138045.1 | GUCCCAAAAUGGAACAUAAGA | 1270 | UCUUAUGUUCCAUUUUGGGACUG | 1820 |
| AD-2138046.1 | UCCCAAAAUGGAACAUAAGGA | 1271 | UCCUUAUGUUCCAUUUUGGGACU | 1821 |
| AD-2138047.1 | CCCAAAAUGGAACAUAAGGAA | 1272 | UUCCUUAUGUUCCAUUUUGGGAC | 1822 |
| AD-2138048.1 | CCAAAAUGGAACAUAAGGAAA | 1273 | UUUCCUUAUGUUCCAUUUUGGGA | 1823 |
| AD-2138049.1 | CAAAAUGGAACAUAAGGAAGA | 1274 | UCUUCCUUAUGUUCCAUUUUGGG | 1824 |
| AD-2138050.1 | AAAAUGGAACAUAAGGAAGUA | 1275 | UACUUCCUUAUGUUCCAUUUUGG | 1825 |
| AD-2138051.1 | AAAUGGAACAUAAGGAAGUGA | 1276 | UCACUUCCUUAUGUUCCAUUUUG | 1826 |
| AD-2138052.1 | AAUGGAACAUAAGGAAGUGGA | 1277 | UCCACUUCCUUAUGUUCCAUUUU | 1827 |
| AD-2138053.1 | AUGGAACAUAAGGAAGUGGUA | 1278 | UACCACUUCCUUAUGUUCCAUUU | 1828 |
| AD-2138054.1 | UGGAACAUAAGGAAGUGGUUA | 1279 | UAACCACUUCCUUAUGUUCCAUU | 1829 |
| AD-2138055.1 | CCUCUGGAUGACUAUGUGAAA | 1280 | UUUCACAUAGUCAUCCAGAGGCU | 1830 |
| AD-2138056.1 | UAAGAAGCAGCUGGGAGCAGA | 1281 | UCUGCUCCCAGCUGCUUCUUAGU | 1831 |
| AD-2138057.1 | AGCAGCUGGGAGCAGGAAGUA | 1282 | UACUUCCUGCUCCCAGCUGCUUC | 1832 |
| AD-2138059.1 | AGCUGGGAGCAGGAAGUAUAA | 1283 | UUAUACUUCCUGCUCCCAGCUGC | 1833 |
| AD-2138060.1 | CUGGGAGCAGGAAGUAUAGAA | 1284 | UUCUAUACUUCCUGCUCCCAGCU | 1834 |
| AD-2138061.1 | UGGGAGCAGGAAGUAUAGAAA | 1285 | UUUCUAUACUUCCUGCUCCCAGC | 1835 |
| AD-2138062.1 | GGGAGCAGGAAGUAUAGAAGA | 1286 | UCUUCUAUACUUCCUGCUCCCAG | 1836 |
| AD-2138063.1 | GGAGCAGGAAGUAUAGAAGAA | 1287 | UUCUUCUAUACUUCCUGCUCCCA | 1837 |
| AD-2138064.1 | GAGCAGGAAGUAUAGAAGAAA | 1288 | UUUCUUCUAUACUUCCUGCUCCC | 1838 |
| AD-2138065.1 | AGCAGGAAGUAUAGAAGAAUA | 1289 | UAUUCUUCUAUACUUCCUGCUCC | 1839 |
| AD-2138066.1 | GCAGGAAGUAUAGAAGAAUGA | 1290 | UCAUUCUUCUAUACUUCCUGCUC | 1840 |
| AD-2138067.1 | CAGGAAGUAUAGAAGAAUGUA | 1291 | UACAUUCUUCUAUACUUCCUGCU | 1841 |
| AD-2138068.1 | AGGAAGUAUAGAAGAAUGUGA | 1292 | UCACAUUCUUCUAUACUUCCUGC | 1842 |
| AD-2138069.1 | GGAAGUAUAGAAGAAUGUGCA | 1293 | UGCACAUUCUUCUAUACUUCCUG | 1843 |
| AD-2138070.1 | GAAGUAUAGAAGAAUGUGCAA | 1294 | UUGCACAUUCUUCUAUACUUCCU | 1844 |
| AD-2138071.1 | AAGUAUAGAAGAAUGUGCAGA | 1295 | UCUGCACAUUCUUCUAUACUUCC | 1845 |
| AD-2138072.1 | AGUAUAGAAGAAUGUGCAGCA | 1296 | UGCUGCACAUUCUUCUAUACUUC | 1846 |
| AD-2138073.1 | GUAUAGAAGAAUGUGCAGCAA | 1297 | UUGCUGCACAUUCUUCUAUACUU | 1847 |
| AD-2138074.1 | UAUAGAAGAAUGUGCAGCAAA | 1298 | UUUGCUGCACAUUCUUCUAUACU | 1848 |
| AD-2138075.1 | UCCAAUAUCACAGUAAAGAGA | 1299 | UCUCUUUACUGUGAUAUUGGAAU | 1849 |
| AD-2138076.1 | CCAAUAUCACAGUAAAGAGCA | 1300 | UGCUCUUUACUGUGAUAUUGGAA | 1850 |
| AD-2138077.1 | CAAUAUCACAGUAAAGAGCAA | 1301 | UUGCUCUUUACUGUGAUAUUGGA | 1851 |
| AD-2138078.1 | AAUAUCACAGUAAAGAGCAAA | 1302 | UUUGCUCUUUACUGUGAUAUUGG | 1852 |
| AD-2138079.1 | AUAUCACAGUAAAGAGCAACA | 1303 | UGUUGCUCUUUACUGUGAUAUUG | 1853 |
| AD-2138080.1 | UAUCACAGUAAAGAGCAACAA | 1304 | UUGUUGCUCUUUACUGUGAUAUU | 1854 |
| AD-2138081.1 | AUCACAGUAAAGAGCAACAAA | 1305 | UUUGUUGCUCUUUACUGUGAUAU | 1855 |
| AD-2138082.1 | UCACAGUAAAGAGCAACAAUA | 1306 | UAUUGUUGCUCUUUACUGUGAUA | 1856 |
| AD-2138083.1 | CACAGUAAAGAGCAACAAUGA | 1307 | UCAUUGUUGCUCUUUACUGUGAU | 1857 |
| AD-2138084.1 | ACAGUAAAGAGCAACAAUGUA | 1308 | UACAUUGUUGCUCUUUACUGUGA | 1858 |
| AD-2138085.1 | CAGUAAAGAGCAACAAUGUGA | 1309 | UCACAUUGUUGCUCUUUACUGUG | 1859 |
| AD-2138086.1 | AGUAAAGAGCAACAAUGUGUA | 1310 | UACACAUUGUUGCUCUUUACUGU | 1860 |
| AD-2138087.1 | GGAUGAGAGAUGUAGUUUUAA | 1311 | UUAAAACUACAUCUCUCAUCCUA | 1861 |
| AD-2138088.1 | GAUGAGAGAUGUAGUUUUAUA | 1312 | UAUAAAACUACAUCUCUCAUCCU | 1862 |
| AD-2138089.1 | AUGAGAGAUGUAGUUUUAUUA | 1313 | UAAUAAAACUACAUCUCUCAUCC | 1863 |
| AD-2138090.1 | UGAGAGAUGUAGUUUUAUUUA | 1314 | UAAAUAAAACUACAUCUCUCAUC | 1864 |
| AD-2138091.1 | GAGAGAUGUAGUUUUAUUUGA | 1315 | UCAAAUAAAACUACAUCUCUCAU | 1865 |
| AD-2138092.1 | AGAGAUGUAGUUUUAUUUGAA | 1316 | UUCAAAUAAAACUACAUCUCUCA | 1866 |
| AD-2138093.1 | GAGAUGUAGUUUUAUUUGAAA | 1317 | UUUCAAAUAAAACUACAUCUCUC | 1867 |
| AD-2138094.1 | AGAUGUAGUUUUAUUUGAAAA | 1318 | UUUUCAAAUAAAACUACAUCUCU | 1868 |
| AD-2138095.1 | GAUGUAGUUUUAUUUGAAAAA | 1319 | UUUUUCAAAUAAAACUACAUCUC | 1869 |
| AD-2138096.1 | AUGUAGUUUUAUUUGAAAAGA | 1320 | UCUUUUCAAAUAAAACUACAUCU | 1870 |
| AD-2138097.1 | UGUAGUUUUAUUUGAAAAGAA | 1321 | UUCUUUUCAAAUAAAACUACAUC | 1871 |
| AD-2138098.1 | GUAGUUUUAUUUGAAAAGAAA | 1322 | UUUCUUUUCAAAUAAAACUACAU | 1872 |
| AD-2138099.1 | UGAAAAGAAAGUGUAUCUCUA | 1323 | UAGAGAUACACUUUCUUUUCAAA | 1873 |
| AD-2138100.1 | GAAAAGAAAGUGUAUCUCUCA | 1324 | UGAGAGAUACACUUUCUUUUCAA | 1874 |
| AD-2138101.1 | AAAAGAAAGUGUAUCUCUCAA | 1325 | UUGAGAGAUACACUUUCUUUUCA | 1875 |
| AD-2138102.1 | AAAGAAAGUGUAUCUCUCAGA | 1326 | UCUGAGAGAUACACUUUCUUUUC | 1876 |
| AD-2138103.1 | AAGAAAGUGUAUCUCUCAGAA | 1327 | UUCUGAGAGAUACACUUUCUUUU | 1877 |
| AD-2138104.1 | AGAAAGUGUAUCUCUCAGAGA | 1328 | UCUCUGAGAGAUACACUUUCUUU | 1878 |
| AD-2138105.1 | GAAAGUGUAUCUCUCAGAGUA | 1329 | UACUCUGAGAGAUACACUUUCUU | 1879 |
| AD-2138106.1 | AAAGUGUAUCUCUCAGAGUGA | 1330 | UCACUCUGAGAGAUACACUUUCU | 1880 |
| AD-2138107.1 | AAGUGUAUCUCUCAGAGUGCA | 1331 | UGCACUCUGAGAGAUACACUUUC | 1881 |
| AD-2138108.1 | AGUGUAUCUCUCAGAGUGCAA | 1332 | UUGCACUCUGAGAGAUACACUUU | 1882 |
| AD-2138109.1 | GUGUAUCUCUCAGAGUGCAAA | 1333 | UUUGCACUCUGAGAGAUACACUU | 1883 |
| AD-2138110.1 | UGUAUCUCUCAGAGUGCAAGA | 1334 | UCUUGCACUCUGAGAGAUACACU | 1884 |
| AD-2138111.1 | GUAUCUCUCAGAGUGCAAGAA | 1335 | UUCUUGCACUCUGAGAGAUACAC | 1885 |
| AD-2138112.1 | AUCUCUCAGAGUGCAAGACUA | 1336 | UAGUCUUGCACUCUGAGAGAUAC | 1886 |
| AD-2138113.1 | ACAGAGGGACGAUGUCCAAAA | 1337 | UUUUGGACAUCGUCCCUCUGUAG | 1887 |
| AD-2138114.1 | CAGAGGGACGAUGUCCAAAAA | 1338 | UUUUUGGACAUCGUCCCUCUGUA | 1888 |
| AD-2138115.1 | AGAGGGACGAUGUCCAAAACA | 1339 | UGUUUUGGACAUCGUCCCUCUGU | 1889 |
| AD-2138116.1 | GAGGGACGAUGUCCAAAACAA | 1340 | UUGUUUUGGACAUCGUCCCUCUG | 1890 |
| AD-2138117.1 | AGGGACGAUGUCCAAAACAAA | 1341 | UUUGUUUUGGACAUCGUCCCUCU | 1891 |
| AD-2138118.1 | GGGACGAUGUCCAAAACAAAA | 1342 | UUUUGUUUUGGACAUCGUCCCUC | 1892 |
| AD-2138119.1 | GGACGAUGUCCAAAACAAAAA | 1343 | UUUUUGUUUUGGACAUCGUCCCU | 1893 |
| AD-2138120.1 | GACGAUGUCCAAAACAAAAAA | 1344 | UUUUUUGUUUUGGACAUCGUCCC | 1894 |
| AD-2138121.1 | ACGAUGUCCAAAACAAAAAAA | 1345 | UUUUUUUGUUUUGGACAUCGUCC | 1895 |
| AD-2138122.1 | CGAUGUCCAAAACAAAAAAUA | 1346 | UAUUUUUUGUUUUGGACAUCGUC | 1896 |
| AD-2138123.1 | GAUGUCCAAAACAAAAAAUGA | 1347 | UCAUUUUUUGUUUUGGACAUCGU | 1897 |
| AD-2138124.1 | AUGUCCAAAACAAAAAAUGGA | 1348 | UCCAUUUUUUGUUUUGGACAUCG | 1898 |
| AD-2138125.1 | CACAGACCUAGAUUCUCACCA | 1349 | UGGUGAGAAUCUAGGUCUGUGGG | 1899 |
| AD-2138126.1 | ACAGACCUAGAUUCUCACCUA | 1350 | UAGGUGAGAAUCUAGGUCUGUGG | 1900 |
| AD-2138127.1 | CAGACCUAGAUUCUCACCUGA | 1351 | UCAGGUGAGAAUCUAGGUCUGUG | 1901 |
| AD-2138128.1 | GACCUAGAUUCUCACCUGCUA | 1352 | UAGCAGGUGAGAAUCUAGGUCUG | 1902 |
| AD-2138129.1 | ACCUAGAUUCUCACCUGCUAA | 1353 | UUAGCAGGUGAGAAUCUAGGUCU | 1903 |
| AD-2138130.1 | CCUAGAUUCUCACCUGCUACA | 1354 | UGUAGCAGGUGAGAAUCUAGGUC | 1904 |
| AD-2138131.1 | CUCAGAGGGACUGGAGGAGAA | 1355 | UUCUCCUCCAGUCCCUCUGAGGG | 1905 |
| AD-2138132.1 | UCAGAGGGACUGGAGGAGAAA | 1356 | UUUCUCCUCCAGUCCCUCUGAGG | 1906 |
| AD-2138133.1 | CAGAGGGACUGGAGGAGAACA | 1357 | UGUUCUCCUCCAGUCCCUCUGAG | 1907 |
| AD-2138134.1 | AGAGGGACUGGAGGAGAACUA | 1358 | UAGUUCUCCUCCAGUCCCUCUGA | 1908 |
| AD-2138135.1 | GAGGGACUGGAGGAGAACUAA | 1359 | UUAGUUCUCCUCCAGUCCCUCUG | 1909 |
| AD-2138136.1 | AGGGACUGGAGGAGAACUACA | 1360 | UGUAGUUCUCCUCCAGUCCCUCU | 1910 |
| AD-2138137.1 | GGGACUGGAGGAGAACUACUA | 1361 | UAGUAGUUCUCCUCCAGUCCCUC | 1911 |
| AD-2138138.1 | GGACUGGAGGAGAACUACUGA | 1362 | UCAGUAGUUCUCCUCCAGUCCCU | 1912 |
| AD-2138139.1 | ACUGGAGGAGAACUACUGCAA | 1363 | UUGCAGUAGUUCUCCUCCAGUCC | 1913 |
| AD-2138140.1 | CUGGAGGAGAACUACUGCAGA | 1364 | UCUGCAGUAGUUCUCCUCCAGUC | 1914 |
| AD-2138141.1 | UGGAGGAGAACUACUGCAGGA | 1365 | UCCUGCAGUAGUUCUCCUCCAGU | 1915 |
| AD-2138142.1 | GAGGAGAACUACUGCAGGAAA | 1366 | UUUCCUGCAGUAGUUCUCCUCCA | 1916 |
| AD-2138143.1 | AAUCCAGACAACGAUCCGCAA | 1367 | UUGCGGAUCGUUGUCUGGAUUCC | 1917 |
| AD-2138144.1 | UCCAGACAACGAUCCGCAGGA | 1368 | UCCUGCGGAUCGUUGUCUGGAUU | 1918 |
| AD-2138145.1 | UGCUAUACUACUGAUCCAGAA | 1369 | UUCUGGAUCAGUAGUAUAGCACC | 1919 |
| AD-2138146.1 | GCUAUACUACUGAUCCAGAAA | 1370 | UUUCUGGAUCAGUAGUAUAGCAC | 1920 |
| AD-2138147.1 | CUAUACUACUGAUCCAGAAAA | 1371 | UUUUCUGGAUCAGUAGUAUAGCA | 1921 |
| AD-2138148.1 | UAUACUACUGAUCCAGAAAAA | 1372 | UUUUUCUGGAUCAGUAGUAUAGC | 1922 |
| AD-2138149.1 | AUACUACUGAUCCAGAAAAGA | 1373 | UCUUUUCUGGAUCAGUAGUAUAG | 1923 |
| AD-2138150.1 | UACUACUGAUCCAGAAAAGAA | 1374 | UUCUUUUCUGGAUCAGUAGUAUA | 1924 |
| AD-2138151.1 | ACUACUGAUCCAGAAAAGAGA | 1375 | UCUCUUUUCUGGAUCAGUAGUAU | 1925 |
| AD-2138152.1 | CUACUGAUCCAGAAAAGAGAA | 1376 | UUCUCUUUUCUGGAUCAGUAGUA | 1926 |
| AD-2138153.1 | UACUGAUCCAGAAAAGAGAUA | 1377 | UAUCUCUUUUCUGGAUCAGUAGU | 1927 |
| AD-2138154.1 | ACUGAUCCAGAAAAGAGAUAA | 1378 | UUAUCUCUUUUCUGGAUCAGUAG | 1928 |
| AD-2138155.1 | CUGAUCCAGAAAAGAGAUAUA | 1379 | UAUAUCUCUUUUCUGGAUCAGUA | 1929 |
| AD-2138156.1 | UGAUCCAGAAAAGAGAUAUGA | 1380 | UCAUAUCUCUUUUCUGGAUCAGU | 1930 |
| AD-2138157.1 | GAUCCAGAAAAGAGAUAUGAA | 1381 | UUCAUAUCUCUUUUCUGGAUCAG | 1931 |
| AD-2138158.1 | AUCCAGAAAAGAGAUAUGACA | 1382 | UGUCAUAUCUCUUUUCUGGAUCA | 1932 |
| AD-2138159.1 | UCCAGAAAAGAGAUAUGACUA | 1383 | UAGUCAUAUCUCUUUUCUGGAUC | 1933 |
| AD-2138160.1 | CCAGAAAAGAGAUAUGACUAA | 1384 | UUAGUCAUAUCUCUUUUCUGGAU | 1934 |
| AD-2138161.1 | CAGAAAAGAGAUAUGACUACA | 1385 | UGUAGUCAUAUCUCUUUUCUGGA | 1935 |
| AD-2138162.1 | AGAAAAGAGAUAUGACUACUA | 1386 | UAGUAGUCAUAUCUCUUUUCUGG | 1936 |
| AD-2138163.1 | GAAAAGAGAUAUGACUACUGA | 1387 | UCAGUAGUCAUAUCUCUUUUCUG | 1937 |
| AD-2138164.1 | AAAAGAGAUAUGACUACUGCA | 1388 | UGCAGUAGUCAUAUCUCUUUUCU | 1938 |
| AD-2138165.1 | UAUGACUACUGCGACAUUCUA | 1389 | UAGAAUGUCGCAGUAGUCAUAUC | 1939 |
| AD-2138166.1 | AUGACUACUGCGACAUUCUUA | 1390 | UAAGAAUGUCGCAGUAGUCAUAU | 1940 |
| AD-2138167.1 | UGACUACUGCGACAUUCUUGA | 1391 | UCAAGAAUGUCGCAGUAGUCAUA | 1941 |
| AD-2138168.1 | GACUACUGCGACAUUCUUGAA | 1392 | UUCAAGAAUGUCGCAGUAGUCAU | 1942 |
| AD-2138169.1 | CUACUGCGACAUUCUUGAGUA | 1393 | UACUCAAGAAUGUCGCAGUAGUC | 1943 |
| AD-2138170.1 | UACUGCGACAUUCUUGAGUGA | 1394 | UCACUCAAGAAUGUCGCAGUAGU | 1944 |
| AD-2138171.1 | ACUGCGACAUUCUUGAGUGUA | 1395 | UACACUCAAGAAUGUCGCAGUAG | 1945 |
| AD-2138172.1 | CUGCGACAUUCUUGAGUGUGA | 1396 | UCACACUCAAGAAUGUCGCAGUA | 1946 |
| AD-2138173.1 | UGCGACAUUCUUGAGUGUGAA | 1397 | UUCACACUCAAGAAUGUCGCAGU | 1947 |
| AD-2138174.1 | GCGACAUUCUUGAGUGUGAAA | 1398 | UUUCACACUCAAGAAUGUCGCAG | 1948 |
| AD-2138175.1 | CGACAUUCUUGAGUGUGAAGA | 1399 | UCUUCACACUCAAGAAUGUCGCA | 1949 |
| AD-2138176.1 | GACAUUCUUGAGUGUGAAGAA | 1400 | UUCUUCACACUCAAGAAUGUCGC | 1950 |
| AD-2138177.1 | ACAUUCUUGAGUGUGAAGAGA | 1401 | UCUCUUCACACUCAAGAAUGUCG | 1951 |
| AD-2138178.1 | AUUCUUGAGUGUGAAGAGGAA | 1402 | UUCCUCUUCACACUCAAGAAUGU | 1952 |
| AD-2138179.1 | UUCUUGAGUGUGAAGAGGAAA | 1403 | UUUCCUCUUCACACUCAAGAAUG | 1953 |
| AD-2138180.1 | UCUUGAGUGUGAAGAGGAAUA | 1404 | UAUUCCUCUUCACACUCAAGAAU | 1954 |
| AD-2138181.1 | CUUGAGUGUGAAGAGGAAUGA | 1405 | UCAUUCCUCUUCACACUCAAGAA | 1955 |
| AD-2138182.1 | UUGAGUGUGAAGAGGAAUGUA | 1406 | UACAUUCCUCUUCACACUCAAGA | 1956 |
| AD-2138183.1 | UGAGUGUGAAGAGGAAUGUAA | 1407 | UUACAUUCCUCUUCACACUCAAG | 1957 |
| AD-2138184.1 | GAGUGUGAAGAGGAAUGUAUA | 1408 | UAUACAUUCCUCUUCACACUCAA | 1958 |
| AD-2138185.1 | AGUGUGAAGAGGAAUGUAUGA | 1409 | UCAUACAUUCCUCUUCACACUCA | 1959 |
| AD-2138186.1 | GUGUGAAGAGGAAUGUAUGCA | 1410 | UGCAUACAUUCCUCUUCACACUC | 1960 |
| AD-2138187.1 | UGUGAAGAGGAAUGUAUGCAA | 1411 | UUGCAUACAUUCCUCUUCACACU | 1961 |
| AD-2138188.1 | GUGAAGAGGAAUGUAUGCAUA | 1412 | UAUGCAUACAUUCCUCUUCACAC | 1962 |
| AD-2138189.1 | UGAAGAGGAAUGUAUGCAUUA | 1413 | UAAUGCAUACAUUCCUCUUCACA | 1963 |
| AD-2138190.1 | GAAGAGGAAUGUAUGCAUUGA | 1414 | UCAAUGCAUACAUUCCUCUUCAC | 1964 |
| AD-2138191.1 | AAGAGGAAUGUAUGCAUUGCA | 1415 | UGCAAUGCAUACAUUCCUCUUCA | 1965 |
| AD-2138192.1 | AGAGGAAUGUAUGCAUUGCAA | 1416 | UUGCAAUGCAUACAUUCCUCUUC | 1966 |
| AD-2138193.1 | GAGGAAUGUAUGCAUUGCAGA | 1417 | UCUGCAAUGCAUACAUUCCUCUU | 1967 |
| AD-2138195.1 | GGAAUGUAUGCAUUGCAGUGA | 1418 | UCACUGCAAUGCAUACAUUCCUC | 1968 |
| AD-2138196.1 | GAAUGUAUGCAUUGCAGUGGA | 1419 | UCCACUGCAAUGCAUACAUUCCU | 1969 |
| AD-2138197.1 | AAUGUAUGCAUUGCAGUGGAA | 1420 | UUCCACUGCAAUGCAUACAUUCC | 1970 |
| AD-2138198.1 | AUGUAUGCAUUGCAGUGGAGA | 1421 | UCUCCACUGCAAUGCAUACAUUC | 1971 |
| AD-2138199.1 | UGUAUGCAUUGCAGUGGAGAA | 1422 | UUCUCCACUGCAAUGCAUACAUU | 1972 |
| AD-2138200.1 | GUAUGCAUUGCAGUGGAGAAA | 1423 | UUUCUCCACUGCAAUGCAUACAU | 1973 |
| AD-2138201.1 | UAUGCAUUGCAGUGGAGAAAA | 1424 | UUUUCUCCACUGCAAUGCAUACA | 1974 |
| AD-2138202.1 | AUGCAUUGCAGUGGAGAAAAA | 1425 | UUUUUCUCCACUGCAAUGCAUAC | 1975 |
| AD-2138203.1 | UGCAUUGCAGUGGAGAAAACA | 1426 | UGUUUUCUCCACUGCAAUGCAUA | 1976 |
| AD-2138204.1 | GCAUUGCAGUGGAGAAAACUA | 1427 | UAGUUUUCUCCACUGCAAUGCAU | 1977 |
| AD-2138205.1 | CAUUGCAGUGGAGAAAACUAA | 1428 | UUAGUUUUCUCCACUGCAAUGCA | 1978 |
| AD-2138206.1 | AUUGCAGUGGAGAAAACUAUA | 1429 | UAUAGUUUUCUCCACUGCAAUGC | 1979 |
| AD-2138207.1 | UUGCAGUGGAGAAAACUAUGA | 1430 | UCAUAGUUUUCUCCACUGCAAUG | 1980 |
| AD-2138208.1 | UGCAGUGGAGAAAACUAUGAA | 1431 | UUCAUAGUUUUCUCCACUGCAAU | 1981 |
| AD-2138209.1 | ACGGCAAAAUUUCCAAGACCA | 1432 | UGGUCUUGGAAAUUUUGCCGUCA | 1982 |
| AD-2138210.1 | CGGCAAAAUUUCCAAGACCAA | 1433 | UUGGUCUUGGAAAUUUUGCCGUC | 1983 |
| AD-2138211.1 | GGCAAAAUUUCCAAGACCAUA | 1434 | UAUGGUCUUGGAAAUUUUGCCGU | 1984 |
| AD-2138212.1 | GCAAAAUUUCCAAGACCAUGA | 1435 | UCAUGGUCUUGGAAAUUUUGCCG | 1985 |
| AD-2138213.1 | CAAAAUUUCCAAGACCAUGUA | 1436 | UACAUGGUCUUGGAAAUUUUGCC | 1986 |
| AD-2138214.1 | AAAAUUUCCAAGACCAUGUCA | 1437 | UGACAUGGUCUUGGAAAUUUUGC | 1987 |
| AD-2138215.1 | AAAUUUCCAAGACCAUGUCUA | 1438 | UAGACAUGGUCUUGGAAAUUUUG | 1988 |
| AD-2138216.1 | AAUUUCCAAGACCAUGUCUGA | 1439 | UCAGACAUGGUCUUGGAAAUUUU | 1989 |
| AD-2138217.1 | AUUUCCAAGACCAUGUCUGGA | 1440 | UCCAGACAUGGUCUUGGAAAUUU | 1990 |
| AD-2138218.1 | UUUCCAAGACCAUGUCUGGAA | 1441 | UUCCAGACAUGGUCUUGGAAAUU | 1991 |
| AD-2138219.1 | AAUGCCAGGCCUGGGACUCUA | 1442 | UAGAGUCCCAGGCCUGGCAUUCC | 1992 |
| AD-2138220.1 | GCCAGGCCUGGGACUCUCAGA | 1443 | UCUGAGAGUCCCAGGCCUGGCAU | 1993 |
| AD-2138221.1 | CCAGGCCUGGGACUCUCAGAA | 1444 | UUCUGAGAGUCCCAGGCCUGGCA | 1994 |
| AD-2138222.1 | AGCCCACACGCUCAUGGAUAA | 1445 | UUAUCCAUGAGCGUGUGGGCUCU | 1995 |
| AD-2138223.1 | CCACACGCUCAUGGAUACAUA | 1446 | UAUGUAUCCAUGAGCGUGUGGGC | 1996 |
| AD-2138224.1 | CACACGCUCAUGGAUACAUUA | 1447 | UAAUGUAUCCAUGAGCGUGUGGG | 1997 |
| AD-2138225.1 | ACGCUCAUGGAUACAUUCCUA | 1448 | UAGGAAUGUAUCCAUGAGCGUGU | 1998 |
| AD-2138226.1 | CGCUCAUGGAUACAUUCCUUA | 1449 | UAAGGAAUGUAUCCAUGAGCGUG | 1999 |
| AD-2138227.1 | GCUCAUGGAUACAUUCCUUCA | 1450 | UGAAGGAAUGUAUCCAUGAGCGU | 2000 |
| AD-2138228.1 | CUCAUGGAUACAUUCCUUCCA | 1451 | UGGAAGGAAUGUAUCCAUGAGCG | 2001 |
| AD-2138229.1 | UCAUGGAUACAUUCCUUCCAA | 1452 | UUGGAAGGAAUGUAUCCAUGAGC | 2002 |
| AD-2138230.1 | CAUGGAUACAUUCCUUCCAAA | 1453 | UUUGGAAGGAAUGUAUCCAUGAG | 2003 |
| AD-2138231.1 | AUGGAUACAUUCCUUCCAAAA | 1454 | UUUUGGAAGGAAUGUAUCCAUGA | 2004 |
| AD-2138232.1 | UGGAUACAUUCCUUCCAAAUA | 1455 | UAUUUGGAAGGAAUGUAUCCAUG | 2005 |
| AD-2138233.1 | GGAUACAUUCCUUCCAAAUUA | 1456 | UAAUUUGGAAGGAAUGUAUCCAU | 2006 |
| AD-2138234.1 | GAUACAUUCCUUCCAAAUUUA | 1457 | UAAAUUUGGAAGGAAUGUAUCCA | 2007 |
| AD-2138235.1 | AUACAUUCCUUCCAAAUUUCA | 1458 | UGAAAUUUGGAAGGAAUGUAUCC | 2008 |
| AD-2138236.1 | UACAUUCCUUCCAAAUUUCCA | 1459 | UGGAAAUUUGGAAGGAAUGUAUC | 2009 |
| AD-2138237.1 | ACAUUCCUUCCAAAUUUCCAA | 1460 | UUGGAAAUUUGGAAGGAAUGUAU | 2010 |
| AD-2138238.1 | CAUUCCUUCCAAAUUUCCAAA | 1461 | UUUGGAAAUUUGGAAGGAAUGUA | 2011 |
| AD-2138239.1 | AUUCCUUCCAAAUUUCCAAAA | 1462 | UUUUGGAAAUUUGGAAGGAAUGU | 2012 |
| AD-2138240.1 | UUCCUUCCAAAUUUCCAAACA | 1463 | UGUUUGGAAAUUUGGAAGGAAUG | 2013 |
| AD-2138241.1 | UCCUUCCAAAUUUCCAAACAA | 1464 | UUGUUUGGAAAUUUGGAAGGAAU | 2014 |
| AD-2138242.1 | CCUUCCAAAUUUCCAAACAAA | 1465 | UUUGUUUGGAAAUUUGGAAGGAA | 2015 |
| AD-2138243.1 | CUUCCAAAUUUCCAAACAAGA | 1466 | UCUUGUUUGGAAAUUUGGAAGGA | 2016 |
| AD-2138244.1 | UUCCAAAUUUCCAAACAAGAA | 1467 | UUCUUGUUUGGAAAUUUGGAAGG | 2017 |
| AD-2138245.1 | UCCAAAUUUCCAAACAAGAAA | 1468 | UUUCUUGUUUGGAAAUUUGGAAG | 2018 |
| AD-2138246.1 | CCAAAUUUCCAAACAAGAACA | 1469 | UGUUCUUGUUUGGAAAUUUGGAA | 2019 |
| AD-2138247.1 | CAAAUUUCCAAACAAGAACCA | 1470 | UGGUUCUUGUUUGGAAAUUUGGA | 2020 |
| AD-2138248.1 | AAAUUUCCAAACAAGAACCUA | 1471 | UAGGUUCUUGUUUGGAAAUUUGG | 2021 |
| AD-2138249.1 | AAUUUCCAAACAAGAACCUGA | 1472 | UCAGGUUCUUGUUUGGAAAUUUG | 2022 |
| AD-2138250.1 | AUUUCCAAACAAGAACCUGAA | 1473 | UUCAGGUUCUUGUUUGGAAAUUU | 2023 |
| AD-2138251.1 | UUUCCAAACAAGAACCUGAAA | 1474 | UUUCAGGUUCUUGUUUGGAAAUU | 2024 |
| AD-2138252.1 | UUCCAAACAAGAACCUGAAGA | 1475 | UCUUCAGGUUCUUGUUUGGAAAU | 2025 |
| AD-2138253.1 | UCCAAACAAGAACCUGAAGAA | 1476 | UUCUUCAGGUUCUUGUUUGGAAA | 2026 |
| AD-2138254.1 | CCAAACAAGAACCUGAAGAAA | 1477 | UUUCUUCAGGUUCUUGUUUGGAA | 2027 |
| AD-2138255.1 | CAAACAAGAACCUGAAGAAGA | 1478 | UCUUCUUCAGGUUCUUGUUUGGA | 2028 |
| AD-2138256.1 | AAACAAGAACCUGAAGAAGAA | 1479 | UUCUUCUUCAGGUUCUUGUUUGG | 2029 |
| AD-2138257.1 | AACAAGAACCUGAAGAAGAAA | 1480 | UUUCUUCUUCAGGUUCUUGUUUG | 2030 |
| AD-2138258.1 | ACAAGAACCUGAAGAAGAAUA | 1481 | UAUUCUUCUUCAGGUUCUUGUUU | 2031 |
| AD-2138259.1 | CAAGAACCUGAAGAAGAAUUA | 1482 | UAAUUCUUCUUCAGGUUCUUGUU | 2032 |
| AD-2138260.1 | AAGAACCUGAAGAAGAAUUAA | 1483 | UUAAUUCUUCUUCAGGUUCUUGU | 2033 |
| AD-2138261.1 | AGAACCUGAAGAAGAAUUACA | 1484 | UGUAAUUCUUCUUCAGGUUCUUG | 2034 |
| AD-2138262.1 | GAACCUGAAGAAGAAUUACUA | 1485 | UAGUAAUUCUUCUUCAGGUUCUU | 2035 |
| AD-2138263.1 | AACCUGAAGAAGAAUUACUGA | 1486 | UCAGUAAUUCUUCUUCAGGUUCU | 2036 |
| AD-2138264.1 | ACCUGAAGAAGAAUUACUGUA | 1487 | UACAGUAAUUCUUCUUCAGGUUC | 2037 |
| AD-2138265.1 | CCUGAAGAAGAAUUACUGUCA | 1488 | UGACAGUAAUUCUUCUUCAGGUU | 2038 |
| AD-2138266.1 | CUGAAGAAGAAUUACUGUCGA | 1489 | UCGACAGUAAUUCUUCUUCAGGU | 2039 |
| AD-2138267.1 | UGAAGAAGAAUUACUGUCGUA | 1490 | UACGACAGUAAUUCUUCUUCAGG | 2040 |
| AD-2138268.1 | GAAGAAGAAUUACUGUCGUAA | 1491 | UUACGACAGUAAUUCUUCUUCAG | 2041 |
| AD-2138269.1 | AAGAAGAAUUACUGUCGUAAA | 1492 | UUUACGACAGUAAUUCUUCUUCA | 2042 |
| AD-2138270.1 | AGGGAGCUGCGGCCUUGGUGA | 1493 | UCACCAAGGCCGCAGCUCCCUAU | 2043 |
| AD-2138271.1 | GGAGCUGCGGCCUUGGUGUUA | 1494 | UAACACCAAGGCCGCAGCUCCCU | 2044 |
| AD-2138272.1 | GAGCUGCGGCCUUGGUGUUUA | 1495 | UAAACACCAAGGCCGCAGCUCCC | 2045 |
| AD-2138273.1 | AGCUGCGGCCUUGGUGUUUCA | 1496 | UGAAACACCAAGGCCGCAGCUCC | 2046 |
| AD-2138274.1 | UGCGGCCUUGGUGUUUCACCA | 1497 | UGGUGAAACACCAAGGCCGCAGC | 2047 |
| AD-2138275.1 | CGGCCUUGGUGUUUCACCACA | 1498 | UGUGGUGAAACACCAAGGCCGCA | 2048 |
| AD-2138276.1 | GGCCUUGGUGUUUCACCACCA | 1499 | UGGUGGUGAAACACCAAGGCCGC | 2049 |
| AD-2138277.1 | GCCUUGGUGUUUCACCACCGA | 1500 | UCGGUGGUGAAACACCAAGGCCG | 2050 |
| AD-2138278.1 | CAACAAGCGCUGGGAACUUUA | 1501 | UAAAGUUCCCAGCGCUUGUUGGG | 2051 |
| AD-2138279.1 | AACAAGCGCUGGGAACUUUGA | 1502 | UCAAAGUUCCCAGCGCUUGUUGG | 2052 |
| AD-2138280.1 | GCUGCACAACACCUCCACCAA | 1503 | UUGGUGGAGGUGUUGUGCAGCGG | 2053 |
| AD-2138281.1 | CUGCACAACACCUCCACCAUA | 1504 | UAUGGUGGAGGUGUUGUGCAGCG | 2054 |
| AD-2138282.1 | UGCACAACACCUCCACCAUCA | 1505 | UGAUGGUGGAGGUGUUGUGCAGC | 2055 |
| AD-2138283.1 | GCACAACACCUCCACCAUCUA | 1506 | UAGAUGGUGGAGGUGUUGUGCAG | 2056 |
| AD-2138284.1 | CACAACACCUCCACCAUCUUA | 1507 | UAAGAUGGUGGAGGUGUUGUGCA | 2057 |
| AD-2138285.1 | ACAACACCUCCACCAUCUUCA | 1508 | UGAAGAUGGUGGAGGUGUUGUGC | 2058 |
| AD-2138286.1 | CAACACCUCCACCAUCUUCUA | 1509 | UAGAAGAUGGUGGAGGUGUUGUG | 2059 |
| AD-2138287.1 | CACCUCCACCAUCUUCUGGUA | 1510 | UACCAGAAGAUGGUGGAGGUGUU | 2060 |
| AD-2138288.1 | ACCUCCACCAUCUUCUGGUCA | 1511 | UGACCAGAAGAUGGUGGAGGUGU | 2061 |
| AD-2138289.1 | CCUCCACCAUCUUCUGGUCCA | 1512 | UGGACCAGAAGAUGGUGGAGGUG | 2062 |
| AD-2138290.1 | CUCCACCAUCUUCUGGUCCCA | 1513 | UGGGACCAGAAGAUGGUGGAGGU | 2063 |
| AD-2138291.1 | UCCACCAUCUUCUGGUCCCAA | 1514 | UUGGGACCAGAAGAUGGUGGAGG | 2064 |
| AD-2138292.1 | CCACCAUCUUCUGGUCCCACA | 1515 | UGUGGGACCAGAAGAUGGUGGAG | 2065 |
| AD-2138293.1 | CACCAUCUUCUGGUCCCACCA | 1516 | UGGUGGGACCAGAAGAUGGUGGA | 2066 |
| AD-2138295.1 | CAUCUUCUGGUCCCACCUACA | 1517 | UGUAGGUGGGACCAGAAGAUGGU | 2067 |
| AD-2138296.1 | UUCUGGUCCCACCUACCAGUA | 1518 | UACUGGUAGGUGGGACCAGAAGA | 2068 |
| AD-2138297.1 | UCUGGUCCCACCUACCAGUGA | 1519 | UCACUGGUAGGUGGGACCAGAAG | 2069 |
| AD-2138298.1 | CUGGUCCCACCUACCAGUGUA | 1520 | UACACUGGUAGGUGGGACCAGAA | 2070 |
| AD-2138299.1 | UGGUCCCACCUACCAGUGUCA | 1521 | UGACACUGGUAGGUGGGACCAGA | 2071 |
| AD-2138300.1 | CCCACCUACCAGUGUCUGAAA | 1522 | UUUCAGACACUGGUAGGUGGGAC | 2072 |
| AD-2138301.1 | CCACCUACCAGUGUCUGAAGA | 1523 | UCUUCAGACACUGGUAGGUGGGA | 2073 |
| AD-2138302.1 | ACCUACCAGUGUCUGAAGGGA | 1524 | UCCCUUCAGACACUGGUAGGUGG | 2074 |
| AD-2138303.1 | CCUACCAGUGUCUGAAGGGAA | 1525 | UUCCCUUCAGACACUGGUAGGUG | 2075 |
| AD-2138304.1 | CUACCAGUGUCUGAAGGGAAA | 1526 | UUUCCCUUCAGACACUGGUAGGU | 2076 |
| AD-2138305.1 | UACCAGUGUCUGAAGGGAACA | 1527 | UGUUCCCUUCAGACACUGGUAGG | 2077 |
| AD-2138306.1 | GUGUCUGAAGGGAACAGGUGA | 1528 | UCACCUGUUCCCUUCAGACACUG | 2078 |
| AD-2138307.1 | GUCUGAAGGGAACAGGUGAAA | 1529 | UUUCACCUGUUCCCUUCAGACAC | 2079 |
| AD-2138308.1 | UCUGAAGGGAACAGGUGAAAA | 1530 | UUUUCACCUGUUCCCUUCAGACA | 2080 |
| AD-2138309.1 | CUGAAGGGAACAGGUGAAAAA | 1531 | UUUUUCACCUGUUCCCUUCAGAC | 2081 |
| AD-2138310.1 | UGAAGGGAACAGGUGAAAACA | 1532 | UGUUUUCACCUGUUCCCUUCAGA | 2082 |
| AD-2138311.1 | GAAGGGAACAGGUGAAAACUA | 1533 | UAGUUUUCACCUGUUCCCUUCAG | 2083 |
| AD-2138312.1 | AAGGGAACAGGUGAAAACUAA | 1534 | UUAGUUUUCACCUGUUCCCUUCA | 2084 |
| AD-2138313.1 | AGGGAACAGGUGAAAACUAUA | 1535 | UAUAGUUUUCACCUGUUCCCUUC | 2085 |
| AD-2138314.1 | GGGAACAGGUGAAAACUAUCA | 1536 | UGAUAGUUUUCACCUGUUCCCUU | 2086 |
| AD-2138315.1 | GGAACAGGUGAAAACUAUCGA | 1537 | UCGAUAGUUUUCACCUGUUCCCU | 2087 |
| AD-2138316.1 | GAACAGGUGAAAACUAUCGCA | 1538 | UGCGAUAGUUUUCACCUGUUCCC | 2088 |
| AD-2138317.1 | GUGAAAACUAUCGCGGGAAUA | 1539 | UAUUCCCGCGAUAGUUUUCACCU | 2089 |
| AD-2138318.1 | GAAAACUAUCGCGGGAAUGUA | 1540 | UACAUUCCCGCGAUAGUUUUCAC | 2090 |
| AD-2138319.1 | AAAACUAUCGCGGGAAUGUGA | 1541 | UCACAUUCCCGCGAUAGUUUUCA | 2091 |
| AD-2138320.1 | UAUCGCGGGAAUGUGGCUGUA | 1542 | UACAGCCACAUUCCCGCGAUAGU | 2092 |
| AD-2138321.1 | AUCGCGGGAAUGUGGCUGUUA | 1543 | UAACAGCCACAUUCCCGCGAUAG | 2093 |
| AD-2138322.1 | UCGCGGGAAUGUGGCUGUUAA | 1544 | UUAACAGCCACAUUCCCGCGAUA | 2094 |
| AD-2138323.1 | CGCGGGAAUGUGGCUGUUACA | 1545 | UGUAACAGCCACAUUCCCGCGAU | 2095 |
| AD-2138324.1 | GGGAAUGUGGCUGUUACCGUA | 1546 | UACGGUAACAGCCACAUUCCCGC | 2096 |
| AD-2138325.1 | GAAUGUGGCUGUUACCGUGUA | 1547 | UACACGGUAACAGCCACAUUCCC | 2097 |
| AD-2138326.1 | AAUGUGGCUGUUACCGUGUCA | 1548 | UGACACGGUAACAGCCACAUUCC | 2098 |
| AD-2138327.1 | CCGUGUCCGGGCACACCUGUA | 1549 | UACAGGUGUGCCCGGACACGGUA | 2099 |
| AD-2138328.1 | UCCGGGCACACCUGUCAGCAA | 1550 | UUGCUGACAGGUGUGCCCGGACA | 2100 |
| AD-2138329.1 | CGGGCACACCUGUCAGCACUA | 1551 | UAGUGCUGACAGGUGUGCCCGGA | 2101 |
| AD-2138330.1 | GCACACCUGUCAGCACUGGAA | 1552 | UUCCAGUGCUGACAGGUGUGCCC | 2102 |
| AD-2138331.1 | CACACCUGUCAGCACUGGAGA | 1553 | UCUCCAGUGCUGACAGGUGUGCC | 2103 |
| AD-2138332.1 | ACACCUGUCAGCACUGGAGUA | 1554 | UACUCCAGUGCUGACAGGUGUGC | 2104 |
| AD-2138333.1 | CCUGUCAGCACUGGAGUGCAA | 1555 | UUGCACUCCAGUGCUGACAGGUG | 2105 |
| AD-2138334.1 | UGUCAGCACUGGAGUGCACAA | 1556 | UUGUGCACUCCAGUGCUGACAGG | 2106 |
| AD-2138335.1 | UCAGCACUGGAGUGCACAGAA | 1557 | UUCUGUGCACUCCAGUGCUGACA | 2107 |
| AD-2138336.1 | CAGCACUGGAGUGCACAGACA | 1558 | UGUCUGUGCACUCCAGUGCUGAC | 2108 |
| AD-2138337.1 | AGCACUGGAGUGCACAGACCA | 1559 | UGGUCUGUGCACUCCAGUGCUGA | 2109 |
| AD-2138338.1 | CUCACACACAUAACAGGACAA | 1560 | UUGUCCUGUUAUGUGUGUGAGGG | 2110 |
| AD-2138339.1 | CACACACAUAACAGGACACCA | 1561 | UGGUGUCCUGUUAUGUGUGUGAG | 2111 |
| AD-2138340.1 | ACACACAUAACAGGACACCAA | 1562 | UUGGUGUCCUGUUAUGUGUGUGA | 2112 |
| AD-2138341.1 | CACACAUAACAGGACACCAGA | 1563 | UCUGGUGUCCUGUUAUGUGUGUG | 2113 |
| AD-2138342.1 | ACACAUAACAGGACACCAGAA | 1564 | UUCUGGUGUCCUGUUAUGUGUGU | 2114 |
| AD-2138343.1 | CACAUAACAGGACACCAGAAA | 1565 | UUUCUGGUGUCCUGUUAUGUGUG | 2115 |
| AD-2138344.1 | ACAUAACAGGACACCAGAAAA | 1566 | UUUUCUGGUGUCCUGUUAUGUGU | 2116 |
| AD-2138345.1 | CAUAACAGGACACCAGAAAAA | 1567 | UUUUUCUGGUGUCCUGUUAUGUG | 2117 |
| AD-2138346.1 | AUAACAGGACACCAGAAAACA | 1568 | UGUUUUCUGGUGUCCUGUUAUGU | 2118 |
| AD-2138347.1 | UAACAGGACACCAGAAAACUA | 1569 | UAGUUUUCUGGUGUCCUGUUAUG | 2119 |
| AD-2138348.1 | AACAGGACACCAGAAAACUUA | 1570 | UAAGUUUUCUGGUGUCCUGUUAU | 2120 |
| AD-2138349.1 | CCUGCAAAAAUUUGGAUGAAA | 1571 | UUUCAUCCAAAUUUUUGCAGGGG | 2121 |
| AD-2138350.1 | CUGCAAAAAUUUGGAUGAAAA | 1572 | UUUUCAUCCAAAUUUUUGCAGGG | 2122 |
| AD-2138351.1 | UGCAAAAAUUUGGAUGAAAAA | 1573 | UUUUUCAUCCAAAUUUUUGCAGG | 2123 |
| AD-2138352.1 | GCAAAAAUUUGGAUGAAAACA | 1574 | UGUUUUCAUCCAAAUUUUUGCAG | 2124 |
| AD-2138353.1 | CAAAAAUUUGGAUGAAAACUA | 1575 | UAGUUUUCAUCCAAAUUUUUGCA | 2125 |
| AD-2138354.1 | AAAAAUUUGGAUGAAAACUAA | 1576 | UUAGUUUUCAUCCAAAUUUUUGC | 2126 |
| AD-2138355.1 | AAAAUUUGGAUGAAAACUACA | 1577 | UGUAGUUUUCAUCCAAAUUUUUG | 2127 |
| AD-2138356.1 | AAAUUUGGAUGAAAACUACUA | 1578 | UAGUAGUUUUCAUCCAAAUUUUU | 2128 |
| AD-2138357.1 | AAUUUGGAUGAAAACUACUGA | 1579 | UCAGUAGUUUUCAUCCAAAUUUU | 2129 |
| AD-2138358.1 | AUUUGGAUGAAAACUACUGCA | 1580 | UGCAGUAGUUUUCAUCCAAAUUU | 2130 |
| AD-2138359.1 | UUUGGAUGAAAACUACUGCCA | 1581 | UGGCAGUAGUUUUCAUCCAAAUU | 2131 |
| AD-2138360.1 | UUGGAUGAAAACUACUGCCGA | 1582 | UCGGCAGUAGUUUUCAUCCAAAU | 2132 |
| AD-2138361.1 | UGGAUGAAAACUACUGCCGCA | 1583 | UGCGGCAGUAGUUUUCAUCCAAA | 2133 |
| AD-2138362.1 | GGAUGAAAACUACUGCCGCAA | 1584 | UUGCGGCAGUAGUUUUCAUCCAA | 2134 |
| AD-2138363.1 | GAUGAAAACUACUGCCGCAAA | 1585 | UUUGCGGCAGUAGUUUUCAUCCA | 2135 |
| AD-2138364.1 | AUGAAAACUACUGCCGCAAUA | 1586 | UAUUGCGGCAGUAGUUUUCAUCC | 2136 |
| AD-2138365.1 | UGAAAACUACUGCCGCAAUCA | 1587 | UGAUUGCGGCAGUAGUUUUCAUC | 2137 |
| AD-2138366.1 | GAAAACUACUGCCGCAAUCCA | 1588 | UGGAUUGCGGCAGUAGUUUUCAU | 2138 |
| AD-2138367.1 | AAAACUACUGCCGCAAUCCUA | 1589 | UAGGAUUGCGGCAGUAGUUUUCA | 2139 |
| AD-2138368.1 | AAACUACUGCCGCAAUCCUGA | 1590 | UCAGGAUUGCGGCAGUAGUUUUC | 2140 |
| AD-2138369.1 | AACUACUGCCGCAAUCCUGAA | 1591 | UUCAGGAUUGCGGCAGUAGUUUU | 2141 |
| AD-2138370.1 | UACUGCCGCAAUCCUGACGGA | 1592 | UCCGUCAGGAUUGCGGCAGUAGU | 2142 |
| AD-2138371.1 | ACUGCCGCAAUCCUGACGGAA | 1593 | UUCCGUCAGGAUUGCGGCAGUAG | 2143 |
| AD-2138372.1 | CUGCCGCAAUCCUGACGGAAA | 1594 | UUUCCGUCAGGAUUGCGGCAGUA | 2144 |
| AD-2138373.1 | UGCCGCAAUCCUGACGGAAAA | 1595 | UUUUCCGUCAGGAUUGCGGCAGU | 2145 |
| AD-2138374.1 | GCCGCAAUCCUGACGGAAAAA | 1596 | UUUUUCCGUCAGGAUUGCGGCAG | 2146 |
| AD-2138375.1 | CCGCAAUCCUGACGGAAAAAA | 1597 | UUUUUUCCGUCAGGAUUGCGGCA | 2147 |
| AD-2138376.1 | CGCAAUCCUGACGGAAAAAGA | 1598 | UCUUUUUCCGUCAGGAUUGCGGC | 2148 |
| AD-2138377.1 | GCAAUCCUGACGGAAAAAGGA | 1599 | UCCUUUUUCCGUCAGGAUUGCGG | 2149 |
| AD-2138378.1 | CAAUCCUGACGGAAAAAGGGA | 1600 | UCCCUUUUUCCGUCAGGAUUGCG | 2150 |
| AD-2138379.1 | AAUCCUGACGGAAAAAGGGCA | 1601 | UGCCCUUUUUCCGUCAGGAUUGC | 2151 |
| AD-2138380.1 | AUCCUGACGGAAAAAGGGCCA | 1602 | UGGCCCUUUUUCCGUCAGGAUUG | 2152 |
| AD-2138381.1 | CAUGGUGCCAUACAACCAACA | 1603 | UGUUGGUUGUAUGGCACCAUGGG | 2153 |
| AD-2138383.1 | UGGUGCCAUACAACCAACAGA | 1604 | UCUGUUGGUUGUAUGGCACCAUG | 2154 |
| AD-2138384.1 | GUGCCAUACAACCAACAGCCA | 1605 | UGGCUGUUGGUUGUAUGGCACCA | 2155 |
| AD-2138385.1 | GCCAUACAACCAACAGCCAAA | 1606 | UUUGGCUGUUGGUUGUAUGGCAC | 2156 |
| AD-2138386.1 | CCAUACAACCAACAGCCAAGA | 1607 | UCUUGGCUGUUGGUUGUAUGGCA | 2157 |
| AD-2138387.1 | CAUACAACCAACAGCCAAGUA | 1608 | UACUUGGCUGUUGGUUGUAUGGC | 2158 |
| AD-2138388.1 | AUACAACCAACAGCCAAGUGA | 1609 | UCACUUGGCUGUUGGUUGUAUGG | 2159 |
| AD-2138389.1 | UACAACCAACAGCCAAGUGCA | 1610 | UGCACUUGGCUGUUGGUUGUAUG | 2160 |
| AD-2138390.1 | ACAACCAACAGCCAAGUGCGA | 1611 | UCGCACUUGGCUGUUGGUUGUAU | 2161 |
| AD-2138391.1 | GCCAAGUGCGGUGGGAGUACA | 1612 | UGUACUCCCACCGCACUUGGCUG | 2162 |
| AD-2138392.1 | AAGUGCGGUGGGAGUACUGUA | 1613 | UACAGUACUCCCACCGCACUUGG | 2163 |
| AD-2138393.1 | AGUGCGGUGGGAGUACUGUAA | 1614 | UUACAGUACUCCCACCGCACUUG | 2164 |
| AD-2138394.1 | GUGCGGUGGGAGUACUGUAAA | 1615 | UUUACAGUACUCCCACCGCACUU | 2165 |
| AD-2138395.1 | UGCGGUGGGAGUACUGUAAGA | 1616 | UCUUACAGUACUCCCACCGCACU | 2166 |
| AD-2138396.1 | GCGGUGGGAGUACUGUAAGAA | 1617 | UUCUUACAGUACUCCCACCGCAC | 2167 |
| AD-2138397.1 | CGGUGGGAGUACUGUAAGAUA | 1618 | UAUCUUACAGUACUCCCACCGCA | 2168 |
| AD-2138398.1 | GGUGGGAGUACUGUAAGAUAA | 1619 | UUAUCUUACAGUACUCCCACCGC | 2169 |
| AD-2138399.1 | GUGGGAGUACUGUAAGAUACA | 1620 | UGUAUCUUACAGUACUCCCACCG | 2170 |
| AD-2138400.1 | UGGGAGUACUGUAAGAUACCA | 1621 | UGGUAUCUUACAGUACUCCCACC | 2171 |
| AD-2138401.1 | GGAGUACUGUAAGAUACCGUA | 1622 | UACGGUAUCUUACAGUACUCCCA | 2172 |
| AD-2138402.1 | GAGUACUGUAAGAUACCGUCA | 1623 | UGACGGUAUCUUACAGUACUCCC | 2173 |
| AD-2138403.1 | AGUACUGUAAGAUACCGUCCA | 1624 | UGGACGGUAUCUUACAGUACUCC | 2174 |
| AD-2138405.1 | ACUGUAAGAUACCGUCCUGUA | 1625 | UACAGGACGGUAUCUUACAGUAC | 2175 |
| AD-2138406.1 | CUGUAAGAUACCGUCCUGUGA | 1626 | UCACAGGACGGUAUCUUACAGUA | 2176 |
| AD-2138407.1 | GUAAGAUACCGUCCUGUGACA | 1627 | UGUCACAGGACGGUAUCUUACAG | 2177 |
| AD-2138408.1 | UUGGCUCCCACAGCACCACCA | 1628 | UGGUGGUGCUGUGGGAGCCAAUU | 2178 |
| AD-2138409.1 | GGCUCCCACAGCACCACCUGA | 1629 | UCAGGUGGUGCUGUGGGAGCCAA | 2179 |
| AD-2138410.1 | GCUCCCACAGCACCACCUGAA | 1630 | UUCAGGUGGUGCUGUGGGAGCCA | 2180 |
| AD-2138412.1 | ACAGCACCACCUGAGCUAACA | 1631 | UGUUAGCUCAGGUGGUGCUGUGG | 2181 |
| AD-2138413.1 | CAGCACCACCUGAGCUAACCA | 1632 | UGGUUAGCUCAGGUGGUGCUGUG | 2182 |
| AD-2138414.1 | CAUGGUGAUGGACAGAGCUAA | 1633 | UUAGCUCUGUCCAUCACCAUGGU | 2183 |
| AD-2138415.1 | GACAGAGCUACCGAGGCACAA | 1634 | UUGUGCCUCGGUAGCUCUGUCCA | 2184 |
| AD-2138416.1 | ACAGAGCUACCGAGGCACAUA | 1635 | UAUGUGCCUCGGUAGCUCUGUCC | 2185 |
| AD-2138417.1 | CAGAGCUACCGAGGCACAUCA | 1636 | UGAUGUGCCUCGGUAGCUCUGUC | 2186 |
| AD-2138418.1 | GAGCUACCGAGGCACAUCCUA | 1637 | UAGGAUGUGCCUCGGUAGCUCUG | 2187 |
| AD-2138419.1 | ACCGAGGCACAUCCUCCACCA | 1638 | UGGUGGAGGAUGUGCCUCGGUAG | 2188 |
| AD-2138420.1 | CGAGGCACAUCCUCCACCACA | 1639 | UGUGGUGGAGGAUGUGCCUCGGU | 2189 |
| AD-2138421.1 | AGGCACAUCCUCCACCACCAA | 1640 | UUGGUGGUGGAGGAUGUGCCUCG | 2190 |
| AD-2138422.1 | GCACAUCCUCCACCACCACCA | 1641 | UGGUGGUGGUGGAGGAUGUGCCU | 2191 |
| AD-2138423.1 | CAUCCUCCACCACCACCACAA | 1642 | UUGUGGUGGUGGUGGAGGAUGUG | 2192 |
| AD-2138424.1 | AUCCUCCACCACCACCACAGA | 1643 | UCUGUGGUGGUGGUGGAGGAUGU | 2193 |
| AD-2138425.1 | UCCUCCACCACCACCACAGGA | 1644 | UCCUGUGGUGGUGGUGGAGGAUG | 2194 |
| AD-2138426.1 | CCUCCACCACCACCACAGGAA | 1645 | UUCCUGUGGUGGUGGUGGAGGAU | 2195 |
| AD-2138427.1 | CUCCACCACCACCACAGGAAA | 1646 | UUUCCUGUGGUGGUGGUGGAGGA | 2196 |
| AD-2138428.1 | UCCACCACCACCACAGGAAAA | 1647 | UUUUCCUGUGGUGGUGGUGGAGG | 2197 |
| AD-2138429.1 | CCACCACCACCACAGGAAAGA | 1648 | UCUUUCCUGUGGUGGUGGUGGAG | 2198 |
| AD-2138430.1 | CACCACCACCACAGGAAAGAA | 1649 | UUCUUUCCUGUGGUGGUGGUGGA | 2199 |
| AD-2138431.1 | ACCACCACCACAGGAAAGAAA | 1650 | UUUCUUUCCUGUGGUGGUGGUGG | 2200 |
| AD-2138432.1 | CCACCACCACAGGAAAGAAGA | 1651 | UCUUCUUUCCUGUGGUGGUGGUG | 2201 |
| AD-2138433.1 | CACCACCACAGGAAAGAAGUA | 1652 | UACUUCUUUCCUGUGGUGGUGGU | 2202 |
| AD-2138434.1 | CCACCACAGGAAAGAAGUGUA | 1653 | UACACUUCUUUCCUGUGGUGGUG | 2203 |
| AD-2138435.1 | CACCACAGGAAAGAAGUGUCA | 1654 | UGACACUUCUUUCCUGUGGUGGU | 2204 |
| AD-2138436.1 | ACCACAGGAAAGAAGUGUCAA | 1655 | UUGACACUUCUUUCCUGUGGUGG | 2205 |
| AD-2138437.1 | CCACAGGAAAGAAGUGUCAGA | 1656 | UCUGACACUUCUUUCCUGUGGUG | 2206 |
| AD-2138438.1 | CACAGGAAAGAAGUGUCAGUA | 1657 | UACUGACACUUCUUUCCUGUGGU | 2207 |
| AD-2138439.1 | ACAGGAAAGAAGUGUCAGUCA | 1658 | UGACUGACACUUCUUUCCUGUGG | 2208 |
| AD-2138440.1 | CAGGAAAGAAGUGUCAGUCUA | 1659 | UAGACUGACACUUCUUUCCUGUG | 2209 |
| AD-2138441.1 | AGGAAAGAAGUGUCAGUCUUA | 1660 | UAAGACUGACACUUCUUUCCUGU | 2210 |
| AD-2138442.1 | GGAAAGAAGUGUCAGUCUUGA | 1661 | UCAAGACUGACACUUCUUUCCUG | 2211 |
| AD-2138443.1 | GAAAGAAGUGUCAGUCUUGGA | 1662 | UCCAAGACUGACACUUCUUUCCU | 2212 |
| AD-2138444.1 | AAAGAAGUGUCAGUCUUGGUA | 1663 | UACCAAGACUGACACUUCUUUCC | 2213 |
| AD-2138445.1 | AGAAGUGUCAGUCUUGGUCAA | 1664 | UUGACCAAGACUGACACUUCUUU | 2214 |
| AD-2138446.1 | GAAGUGUCAGUCUUGGUCAUA | 1665 | UAUGACCAAGACUGACACUUCUU | 2215 |
| AD-2138447.1 | AAGUGUCAGUCUUGGUCAUCA | 1666 | UGAUGACCAAGACUGACACUUCU | 2216 |
| AD-2138448.1 | AGUGUCAGUCUUGGUCAUCUA | 1667 | UAGAUGACCAAGACUGACACUUC | 2217 |
| AD-2138449.1 | GUGUCAGUCUUGGUCAUCUAA | 1668 | UUAGAUGACCAAGACUGACACUU | 2218 |
| AD-2138450.1 | UGUCAGUCUUGGUCAUCUAUA | 1669 | UAUAGAUGACCAAGACUGACACU | 2219 |
| AD-2138451.1 | GUCAGUCUUGGUCAUCUAUGA | 1670 | UCAUAGAUGACCAAGACUGACAC | 2220 |
| AD-2138452.1 | UCAGUCUUGGUCAUCUAUGAA | 1671 | UUCAUAGAUGACCAAGACUGACA | 2221 |
| AD-2138453.1 | CAGUCUUGGUCAUCUAUGACA | 1672 | UGUCAUAGAUGACCAAGACUGAC | 2222 |
| AD-2138454.1 | AGUCUUGGUCAUCUAUGACAA | 1673 | UUGUCAUAGAUGACCAAGACUGA | 2223 |
| AD-2138455.1 | GGAAUCCAGAUGCCGAUAAAA | 1674 | UUUUAUCGGCAUCUGGAUUCCUG | 2224 |
| AD-2138456.1 | GAAUCCAGAUGCCGAUAAAGA | 1675 | UCUUUAUCGGCAUCUGGAUUCCU | 2225 |
| AD-2138457.1 | GGUGGGAGUACUGCAACCUGA | 1676 | UCAGGUUGCAGUACUCCCACCUG | 2226 |
| AD-2138458.1 | GUGGGAGUACUGCAACCUGAA | 1677 | UUCAGGUUGCAGUACUCCCACCU | 2227 |
| AD-2138459.1 | UGGGAGUACUGCAACCUGAAA | 1678 | UUUCAGGUUGCAGUACUCCCACC | 2228 |
| AD-2138460.1 | GGGAGUACUGCAACCUGAAAA | 1679 | UUUUCAGGUUGCAGUACUCCCAC | 2229 |
| AD-2138461.1 | GGAGUACUGCAACCUGAAAAA | 1680 | UUUUUCAGGUUGCAGUACUCCCA | 2230 |
| AD-2138462.1 | GAGUACUGCAACCUGAAAAAA | 1681 | UUUUUUCAGGUUGCAGUACUCCC | 2231 |
| AD-2138463.1 | AGUACUGCAACCUGAAAAAAA | 1682 | UUUUUUUCAGGUUGCAGUACUCC | 2232 |
| AD-2138464.1 | GUACUGCAACCUGAAAAAAUA | 1683 | UAUUUUUUCAGGUUGCAGUACUC | 2233 |
| AD-2138465.1 | UACUGCAACCUGAAAAAAUGA | 1684 | UCAUUUUUUCAGGUUGCAGUACU | 2234 |
| AD-2138466.1 | ACUGCAACCUGAAAAAAUGCA | 1685 | UGCAUUUUUUCAGGUUGCAGUAC | 2235 |
| AD-2138467.1 | CUGCAACCUGAAAAAAUGCUA | 1686 | UAGCAUUUUUUCAGGUUGCAGUA | 2236 |
| AD-2138468.1 | UGCAACCUGAAAAAAUGCUCA | 1687 | UGAGCAUUUUUUCAGGUUGCAGU | 2237 |
| AD-2138469.1 | GCAACCUGAAAAAAUGCUCAA | 1688 | UUGAGCAUUUUUUCAGGUUGCAG | 2238 |
| AD-2138470.1 | CAACCUGAAAAAAUGCUCAGA | 1689 | UCUGAGCAUUUUUUCAGGUUGCA | 2239 |
| AD-2138471.1 | AACCUGAAAAAAUGCUCAGGA | 1690 | UCCUGAGCAUUUUUUCAGGUUGC | 2240 |
| AD-2138472.1 | ACCUGAAAAAAUGCUCAGGAA | 1691 | UUCCUGAGCAUUUUUUCAGGUUG | 2241 |
| AD-2138473.1 | CCUGAAAAAAUGCUCAGGAAA | 1692 | UUUCCUGAGCAUUUUUUCAGGUU | 2242 |
| AD-2138474.1 | CUGAAAAAAUGCUCAGGAACA | 1693 | UGUUCCUGAGCAUUUUUUCAGGU | 2243 |
| AD-2138475.1 | UGAAAAAAUGCUCAGGAACAA | 1694 | UUGUUCCUGAGCAUUUUUUCAGG | 2244 |
| AD-2138476.1 | GAAAAAAUGCUCAGGAACAGA | 1695 | UCUGUUCCUGAGCAUUUUUUCAG | 2245 |
| AD-2138477.1 | AAAAAAUGCUCAGGAACAGAA | 1696 | UUCUGUUCCUGAGCAUUUUUUCA | 2246 |
| AD-2138478.1 | AAAAAUGCUCAGGAACAGAAA | 1697 | UUUCUGUUCCUGAGCAUUUUUUC | 2247 |
| AD-2138479.1 | AAAAUGCUCAGGAACAGAAGA | 1698 | UCUUCUGUUCCUGAGCAUUUUUU | 2248 |
| AD-2138480.1 | AAAUGCUCAGGAACAGAAGCA | 1699 | UGCUUCUGUUCCUGAGCAUUUUU | 2249 |
| AD-2138481.1 | GCACCUCCGCCUGUUGUCCUA | 1700 | UAGGACAACAGGCGGAGGUGCUA | 2250 |
| AD-2138482.1 | CACCUCCGCCUGUUGUCCUGA | 1701 | UCAGGACAACAGGCGGAGGUGCU | 2251 |
| AD-2138483.1 | CCUCCGCCUGUUGUCCUGCUA | 1702 | UAGCAGGACAACAGGCGGAGGUG | 2252 |
| AD-2138484.1 | CUCCGCCUGUUGUCCUGCUUA | 1703 | UAAGCAGGACAACAGGCGGAGGU | 2253 |
| AD-2138485.1 | UCCGCCUGUUGUCCUGCUUCA | 1704 | UGAAGCAGGACAACAGGCGGAGG | 2254 |
| AD-2138486.1 | CCGCCUGUUGUCCUGCUUCCA | 1705 | UGGAAGCAGGACAACAGGCGGAG | 2255 |
| AD-2138487.1 | CGCCUGUUGUCCUGCUUCCAA | 1706 | UUGGAAGCAGGACAACAGGCGGA | 2256 |
| AD-2138488.1 | CCGAAGAAGACUGUAUGUUUA | 1707 | UAAACAUACAGUCUUCUUCGGAA | 2257 |
| AD-2138489.1 | CGAAGAAGACUGUAUGUUUGA | 1708 | UCAAACAUACAGUCUUCUUCGGA | 2258 |
| AD-2138490.1 | GAAGAAGACUGUAUGUUUGGA | 1709 | UCCAAACAUACAGUCUUCUUCGG | 2259 |
| AD-2138491.1 | AAGAAGACUGUAUGUUUGGGA | 1710 | UCCCAAACAUACAGUCUUCUUCG | 2260 |
| AD-2138492.1 | GCGACCACUGUUACUGGGACA | 1711 | UGUCCCAGUAACAGUGGUCGCCC | 2261 |
| AD-2138493.1 | CUGGGACGCCAUGCCAGGACA | 1712 | UGUCCUGGCAUGGCGUCCCAGUA | 2262 |
| AD-2138494.1 | UGGGACGCCAUGCCAGGACUA | 1713 | UAGUCCUGGCAUGGCGUCCCAGU | 2263 |
| AD-2138495.1 | CAUAGACACAGCAUUUUCACA | 1714 | UGUGAAAAUGCUGUGUCUAUGGG | 2264 |
| AD-2138496.1 | AUAGACACAGCAUUUUCACUA | 1715 | UAGUGAAAAUGCUGUGUCUAUGG | 2265 |
| AD-2138497.1 | UAGACACAGCAUUUUCACUCA | 1716 | UGAGUGAAAAUGCUGUGUCUAUG | 2266 |
| AD-2138498.1 | AGACACAGCAUUUUCACUCCA | 1717 | UGGAGUGAAAAUGCUGUGUCUAU | 2267 |
| AD-2138499.1 | GACACAGCAUUUUCACUCCAA | 1718 | UUGGAGUGAAAAUGCUGUGUCUA | 2268 |
| AD-2138500.1 | ACACAGCAUUUUCACUCCAGA | 1719 | UCUGGAGUGAAAAUGCUGUGUCU | 2269 |
| AD-2138501.1 | CACAGCAUUUUCACUCCAGAA | 1720 | UUCUGGAGUGAAAAUGCUGUGUC | 2270 |
| AD-2138502.1 | ACAGCAUUUUCACUCCAGAGA | 1721 | UCUCUGGAGUGAAAAUGCUGUGU | 2271 |
| AD-2138503.1 | CAGCAUUUUCACUCCAGAGAA | 1722 | UUCUCUGGAGUGAAAAUGCUGUG | 2272 |
| AD-2138504.1 | AGCAUUUUCACUCCAGAGACA | 1723 | UGUCUCUGGAGUGAAAAUGCUGU | 2273 |
| AD-2138505.1 | GCAUUUUCACUCCAGAGACAA | 1724 | UUGUCUCUGGAGUGAAAAUGCUG | 2274 |
| AD-2138506.1 | CAUUUUCACUCCAGAGACAAA | 1725 | UUUGUCUCUGGAGUGAAAAUGCU | 2275 |
| AD-2138507.1 | AUUUUCACUCCAGAGACAAAA | 1726 | UUUUGUCUCUGGAGUGAAAAUGC | 2276 |
| AD-2138508.1 | UUUUCACUCCAGAGACAAAUA | 1727 | UAUUUGUCUCUGGAGUGAAAAUG | 2277 |
| AD-2138509.1 | UUUCACUCCAGAGACAAAUCA | 1728 | UGAUUUGUCUCUGGAGUGAAAAU | 2278 |
| AD-2138510.1 | UUCACUCCAGAGACAAAUCCA | 1729 | UGGAUUUGUCUCUGGAGUGAAAA | 2279 |
| AD-2138511.1 | UCACUCCAGAGACAAAUCCAA | 1730 | UUGGAUUUGUCUCUGGAGUGAAA | 2280 |
| AD-2138512.1 | ACGGGCGGGUCUGGAAAAAAA | 1731 | UUUUUUUCCAGACCCGCCCGUGG | 2281 |
| AD-2138513.1 | CGGGCGGGUCUGGAAAAAAAA | 1732 | UUUUUUUUCCAGACCCGCCCGUG | 2282 |
| AD-2138514.1 | GGGCGGGUCUGGAAAAAAAUA | 1733 | UAUUUUUUUCCAGACCCGCCCGU | 2283 |
| AD-2138515.1 | GGCGGGUCUGGAAAAAAAUUA | 1734 | UAAUUUUUUUCCAGACCCGCCCG | 2284 |
| AD-2138516.1 | GCGGGUCUGGAAAAAAAUUAA | 1735 | UUAAUUUUUUUCCAGACCCGCCC | 2285 |
| AD-2138517.1 | CGGGUCUGGAAAAAAAUUACA | 1736 | UGUAAUUUUUUUCCAGACCCGCC | 2286 |
| AD-2138518.1 | GGGUCUGGAAAAAAAUUACUA | 1737 | UAGUAAUUUUUUUCCAGACCCGC | 2287 |
| AD-2138519.1 | GGUCUGGAAAAAAAUUACUGA | 1738 | UCAGUAAUUUUUUUCCAGACCCG | 2288 |
| AD-2138520.1 | GUCUGGAAAAAAAUUACUGCA | 1739 | UGCAGUAAUUUUUUUCCAGACCC | 2289 |
| AD-2138521.1 | UCUGGAAAAAAAUUACUGCCA | 1740 | UGGCAGUAAUUUUUUUCCAGACC | 2290 |
| AD-2138522.1 | CUGGAAAAAAAUUACUGCCGA | 1741 | UCGGCAGUAAUUUUUUUCCAGAC | 2291 |
| AD-2138523.1 | UGGAAAAAAAUUACUGCCGUA | 1742 | UACGGCAGUAAUUUUUUUCCAGA | 2292 |
| AD-2138524.1 | CGUAACCCUGAUGGUGAUGUA | 1743 | UACAUCACCAUCAGGGUUACGGC | 2293 |
| AD-2138525.1 | AACCCUGAUGGUGAUGUAGGA | 1744 | UCCUACAUCACCAUCAGGGUUAC | 2294 |
| AD-2138526.1 | CCCUGAUGGUGAUGUAGGUGA | 1745 | UCACCUACAUCACCAUCAGGGUU | 2295 |
| AD-2138527.1 | CCUGAUGGUGAUGUAGGUGGA | 1746 | UCCACCUACAUCACCAUCAGGGU | 2296 |
| AD-2138528.1 | UAGGUGGUCCCUGGUGCUACA | 1747 | UGUAGCACCAGGGACCACCUACA | 2297 |
| AD-2138529.1 | AGGUGGUCCCUGGUGCUACAA | 1748 | UUGUAGCACCAGGGACCACCUAC | 2298 |
| AD-2138530.1 | GUGGUCCCUGGUGCUACACGA | 1749 | UCGUGUAGCACCAGGGACCACCU | 2299 |
| AD-2138531.1 | CUGGUGCUACACGACAAAUCA | 1750 | UGAUUUGUCGUGUAGCACCAGGG | 2300 |
| AD-2138532.1 | GGUGCUACACGACAAAUCCAA | 1751 | UUGGAUUUGUCGUGUAGCACCAG | 2301 |
| AD-2138533.1 | GUGCUACACGACAAAUCCAAA | 1752 | UUUGGAUUUGUCGUGUAGCACCA | 2302 |
| AD-2138534.1 | UGCUACACGACAAAUCCAAGA | 1753 | UCUUGGAUUUGUCGUGUAGCACC | 2303 |
| AD-2138535.1 | GCUACACGACAAAUCCAAGAA | 1754 | UUCUUGGAUUUGUCGUGUAGCAC | 2304 |
| AD-2138536.1 | CUACACGACAAAUCCAAGAAA | 1755 | UUUCUUGGAUUUGUCGUGUAGCA | 2305 |
| AD-2138537.1 | UACACGACAAAUCCAAGAAAA | 1756 | UUUUCUUGGAUUUGUCGUGUAGC | 2306 |
| AD-2138538.1 | ACACGACAAAUCCAAGAAAAA | 1757 | UUUUUCUUGGAUUUGUCGUGUAG | 2307 |
| AD-2138539.1 | CACGACAAAUCCAAGAAAACA | 1758 | UGUUUUCUUGGAUUUGUCGUGUA | 2308 |
| AD-2138540.1 | ACGACAAAUCCAAGAAAACUA | 1759 | UAGUUUUCUUGGAUUUGUCGUGU | 2309 |
| AD-2138541.1 | CGACAAAUCCAAGAAAACUUA | 1760 | UAAGUUUUCUUGGAUUUGUCGUG | 2310 |
| AD-2138542.1 | GACAAAUCCAAGAAAACUUUA | 1761 | UAAAGUUUUCUUGGAUUUGUCGU | 2311 |
| AD-2138543.1 | ACAAAUCCAAGAAAACUUUAA | 1762 | UUAAAGUUUUCUUGGAUUUGUCG | 2312 |
| AD-2138544.1 | CAAAUCCAAGAAAACUUUACA | 1763 | UGUAAAGUUUUCUUGGAUUUGUC | 2313 |
| AD-2138545.1 | AAAUCCAAGAAAACUUUACGA | 1764 | UCGUAAAGUUUUCUUGGAUUUGU | 2314 |
| AD-2138546.1 | AAUCCAAGAAAACUUUACGAA | 1765 | UUCGUAAAGUUUUCUUGGAUUUG | 2315 |
| AD-2138547.1 | AUCCAAGAAAACUUUACGACA | 1766 | UGUCGUAAAGUUUUCUUGGAUUU | 2316 |
| AD-2138548.1 | UCCAAGAAAACUUUACGACUA | 1767 | UAGUCGUAAAGUUUUCUUGGAUU | 2317 |
| AD-2138549.1 | CCAAGAAAACUUUACGACUAA | 1768 | UUAGUCGUAAAGUUUUCUUGGAU | 2318 |
| AD-2138550.1 | AAGAAAACUUUACGACUACUA | 1769 | UAGUAGUCGUAAAGUUUUCUUGG | 2319 |
| AD-2138551.1 | AGAAAACUUUACGACUACUGA | 1770 | UCAGUAGUCGUAAAGUUUUCUUG | 2320 |
| AD-2138552.1 | GAAAACUUUACGACUACUGUA | 1771 | UACAGUAGUCGUAAAGUUUUCUU | 2321 |
| AD-2138553.1 | AAAACUUUACGACUACUGUGA | 1772 | UCACAGUAGUCGUAAAGUUUUCU | 2322 |
| AD-2138554.1 | AAACUUUACGACUACUGUGAA | 1773 | UUCACAGUAGUCGUAAAGUUUUC | 2323 |
| AD-2138555.1 | AACUUUACGACUACUGUGAUA | 1774 | UAUCACAGUAGUCGUAAAGUUUU | 2324 |
| AD-2138556.1 | ACUUUACGACUACUGUGAUGA | 1775 | UCAUCACAGUAGUCGUAAAGUUU | 2325 |
| AD-2138557.1 | CUUUACGACUACUGUGAUGUA | 1776 | UACAUCACAGUAGUCGUAAAGUU | 2326 |
| AD-2138558.1 | UUUACGACUACUGUGAUGUCA | 1777 | UGACAUCACAGUAGUCGUAAAGU | 2327 |
| AD-2138559.1 | GACUACUGUGAUGUCCCUCAA | 1778 | UUGAGGGACAUCACAGUAGUCGU | 2328 |
| AD-2138560.1 | CUGUGAUGUCCCUCAGUGUGA | 1779 | UCACACUGAGGGACAUCACAGUA | 2329 |
| AD-2138561.1 | AUGUCCCUCAGUGUGCGGCCA | 1780 | UGGCCGCACACUGAGGGACAUCA | 2330 |
| AD-2138562.1 | AAGAAAUGUCCUGGAAGGGUA | 1781 | UACCCUUCCAGGACAUUUCUUCG | 2331 |
| AD-2138563.1 | GCCCUGGCAAGUCAGUCUUAA | 1782 | UUAAGACUGACUUGCCAGGGCCA | 2332 |
| AD-2138564.1 | CCUGGCAAGUCAGUCUUAGAA | 1783 | UUCUAAGACUGACUUGCCAGGGC | 2333 |
| AD-2138565.1 | CUGGCAAGUCAGUCUUAGAAA | 1784 | UUUCUAAGACUGACUUGCCAGGG | 2334 |
| AD-2138566.1 | UGGCAAGUCAGUCUUAGAACA | 1785 | UGUUCUAAGACUGACUUGCCAGG | 2335 |
| AD-2138567.1 | GGCAAGUCAGUCUUAGAACAA | 1786 | UUGUUCUAAGACUGACUUGCCAG | 2336 |
| AD-2138568.1 | GCAAGUCAGUCUUAGAACAAA | 1787 | UUUGUUCUAAGACUGACUUGCCA | 2337 |
| AD-2138569.1 | CAAGUCAGUCUUAGAACAAGA | 1788 | UCUUGUUCUAAGACUGACUUGCC | 2338 |
| AD-2138570.1 | AAGUCAGUCUUAGAACAAGGA | 1789 | UCCUUGUUCUAAGACUGACUUGC | 2339 |
| AD-2138571.1 | AGUCAGUCUUAGAACAAGGUA | 1790 | UACCUUGUUCUAAGACUGACUUG | 2340 |
| AD-2138572.1 | GUCAGUCUUAGAACAAGGUUA | 1791 | UAACCUUGUUCUAAGACUGACUU | 2341 |
| AD-2138573.1 | UCAGUCUUAGAACAAGGUUUA | 1792 | UAAACCUUGUUCUAAGACUGACU | 2342 |
| AD-2138574.1 | CAGUCUUAGAACAAGGUUUGA | 1793 | UCAAACCUUGUUCUAAGACUGAC | 2343 |
| AD-2138575.1 | AGUCUUAGAACAAGGUUUGGA | 1794 | UCCAAACCUUGUUCUAAGACUGA | 2344 |
| AD-2138576.1 | GUCUUAGAACAAGGUUUGGAA | 1795 | UUCCAAACCUUGUUCUAAGACUG | 2345 |
| AD-2138577.1 | UCUUAGAACAAGGUUUGGAAA | 1796 | UUUCCAAACCUUGUUCUAAGACU | 2346 |
| AD-2138578.1 | CUUAGAACAAGGUUUGGAAUA | 1797 | UAUUCCAAACCUUGUUCUAAGAC | 2347 |
| AD-2138579.1 | UUAGAACAAGGUUUGGAAUGA | 1798 | UCAUUCCAAACCUUGUUCUAAGA | 2348 |
| AD-2138580.1 | UAGAACAAGGUUUGGAAUGCA | 1799 | UGCAUUCCAAACCUUGUUCUAAG | 2349 |
| AD-2138581.1 | AGAACAAGGUUUGGAAUGCAA | 1800 | UUGCAUUCCAAACCUUGUUCUAA | 2350 |
| AD-2138582.1 | GAACAAGGUUUGGAAUGCACA | 1801 | UGUGCAUUCCAAACCUUGUUCUA | 2351 |
| AD-2138583.1 | AACAAGGUUUGGAAUGCACUA | 1802 | UAGUGCAUUCCAAACCUUGUUCU | 2352 |
| AD-2138584.1 | ACAAGGUUUGGAAUGCACUUA | 1803 | UAAGUGCAUUCCAAACCUUGUUC | 2353 |
| AD-2138585.1 | CAAGGUUUGGAAUGCACUUCA | 1804 | UGAAGUGCAUUCCAAACCUUGUU | 2354 |
| AD-2138586.1 | AAGGUUUGGAAUGCACUUCUA | 1805 | UAGAAGUGCAUUCCAAACCUUGU | 2355 |
| AD-2138587.1 | AGGUUUGGAAUGCACUUCUGA | 1806 | UCAGAAGUGCAUUCCAAACCUUG | 2356 |
| AD-2138588.1 | GGUUUGGAAUGCACUUCUGUA | 1807 | UACAGAAGUGCAUUCCAAACCUU | 2357 |
| AD-2138589.1 | UUGGAAUGCACUUCUGUGGAA | 1808 | UUCCACAGAAGUGCAUUCCAAAC | 2358 |
| AD-2138590.1 | UGGAAUGCACUUCUGUGGAGA | 1809 | UCUCCACAGAAGUGCAUUCCAAA | 2359 |
| AD-2138591.1 | GAAUGCACUUCUGUGGAGGCA | 1810 | UGCCUCCACAGAAGUGCAUUCCA | 2360 |
| AD-2138592.1 | CUGUGGAGGCACCUUGAUAUA | 1811 | UAUAUCAAGGUGCCUCCACAGAA | 2361 |
| AD-2138593.1 | UGUGGAGGCACCUUGAUAUCA | 1812 | UGAUAUCAAGGUGCCUCCACAGA | 2362 |
| AD-2138594.1 | GUGGAGGCACCUUGAUAUCCA | 1813 | UGGAUAUCAAGGUGCCUCCACAG | 2363 |
| AD-2138595.1 | UUGACUGCUGCCCACUGCUUA | 1814 | UAAGCAGUGGGCAGCAGUCAACA | 2364 |
| AD-2138596.1 | UGACUGCUGCCCACUGCUUGA | 2365 | UCAAGCAGUGGGCAGCAGUCAAC | 2915 |
| AD-2138597.1 | ACUGCUGCCCACUGCUUGGAA | 2366 | UUCCAAGCAGUGGGCAGCAGUCA | 2916 |
| AD-2138598.1 | CUGCUGCCCACUGCUUGGAGA | 2367 | UCUCCAAGCAGUGGGCAGCAGUC | 2917 |
| AD-2138599.1 | UGCUGCCCACUGCUUGGAGAA | 2368 | UUCUCCAAGCAGUGGGCAGCAGU | 2918 |
| AD-2138600.1 | CUGCCCACUGCUUGGAGAAGA | 2369 | UCUUCUCCAAGCAGUGGGCAGCA | 2919 |
| AD-2138601.1 | UGCCCACUGCUUGGAGAAGUA | 2370 | UACUUCUCCAAGCAGUGGGCAGC | 2920 |
| AD-2138602.1 | CCCACUGCUUGGAGAAGUCCA | 2371 | UGGACUUCUCCAAGCAGUGGGCA | 2921 |
| AD-2138603.1 | GUGCACACCAAGAAGUGAAUA | 2372 | UAUUCACUUCUUGGUGUGCACCC | 2922 |
| AD-2138604.1 | GCACACCAAGAAGUGAAUCUA | 2373 | UAGAUUCACUUCUUGGUGUGCAC | 2923 |
| AD-2138605.1 | ACACCAAGAAGUGAAUCUCGA | 2374 | UCGAGAUUCACUUCUUGGUGUGC | 2924 |
| AD-2138606.1 | CACCAAGAAGUGAAUCUCGAA | 2375 | UUCGAGAUUCACUUCUUGGUGUG | 2925 |
| AD-2138607.1 | ACCAAGAAGUGAAUCUCGAAA | 2376 | UUUCGAGAUUCACUUCUUGGUGU | 2926 |
| AD-2138608.1 | UGAAUCUCGAACCGCAUGUUA | 2377 | UAACAUGCGGUUCGAGAUUCACU | 2927 |
| AD-2138609.1 | AAUCUCGAACCGCAUGUUCAA | 2378 | UUGAACAUGCGGUUCGAGAUUCA | 2928 |
| AD-2138610.1 | CGAACCGCAUGUUCAGGAAAA | 2379 | UUUUCCUGAACAUGCGGUUCGAG | 2929 |
| AD-2138611.1 | GAACCGCAUGUUCAGGAAAUA | 2380 | UAUUUCCUGAACAUGCGGUUCGA | 2930 |
| AD-2138612.1 | AACCGCAUGUUCAGGAAAUAA | 2381 | UUAUUUCCUGAACAUGCGGUUCG | 2931 |
| AD-2138613.1 | ACCGCAUGUUCAGGAAAUAGA | 2382 | UCUAUUUCCUGAACAUGCGGUUC | 2932 |
| AD-2138614.1 | CCGCAUGUUCAGGAAAUAGAA | 2383 | UUCUAUUUCCUGAACAUGCGGUU | 2933 |
| AD-2138615.1 | UUGGAGCCCACACGAAAAGAA | 2384 | UUCUUUUCGUGUGGGCUCCAAGA | 2934 |
| AD-2138616.1 | UGGAGCCCACACGAAAAGAUA | 2385 | UAUCUUUUCGUGUGGGCUCCAAG | 2935 |
| AD-2138617.1 | GAGCCCACACGAAAAGAUAUA | 2386 | UAUAUCUUUUCGUGUGGGCUCCA | 2936 |
| AD-2138618.1 | AGCCCACACGAAAAGAUAUUA | 2387 | UAAUAUCUUUUCGUGUGGGCUCC | 2937 |
| AD-2138619.1 | GCCCACACGAAAAGAUAUUGA | 2388 | UCAAUAUCUUUUCGUGUGGGCUC | 2938 |
| AD-2138620.1 | CCCACACGAAAAGAUAUUGCA | 2389 | UGCAAUAUCUUUUCGUGUGGGCU | 2939 |
| AD-2138621.1 | CCACACGAAAAGAUAUUGCCA | 2390 | UGGCAAUAUCUUUUCGUGUGGGC | 2940 |
| AD-2138622.1 | CACACGAAAAGAUAUUGCCUA | 2391 | UAGGCAAUAUCUUUUCGUGUGGG | 2941 |
| AD-2138623.1 | ACACGAAAAGAUAUUGCCUUA | 2392 | UAAGGCAAUAUCUUUUCGUGUGG | 2942 |
| AD-2138624.1 | CACGAAAAGAUAUUGCCUUGA | 2393 | UCAAGGCAAUAUCUUUUCGUGUG | 2943 |
| AD-2138625.1 | ACGAAAAGAUAUUGCCUUGCA | 2394 | UGCAAGGCAAUAUCUUUUCGUGU | 2944 |
| AD-2138626.1 | CGAAAAGAUAUUGCCUUGCUA | 2395 | UAGCAAGGCAAUAUCUUUUCGUG | 2945 |
| AD-2138627.1 | GAAAAGAUAUUGCCUUGCUAA | 2396 | UUAGCAAGGCAAUAUCUUUUCGU | 2946 |
| AD-2138628.1 | AAAAGAUAUUGCCUUGCUAAA | 2397 | UUUAGCAAGGCAAUAUCUUUUCG | 2947 |
| AD-2138629.1 | AAAGAUAUUGCCUUGCUAAAA | 2398 | UUUUAGCAAGGCAAUAUCUUUUC | 2948 |
| AD-2138630.1 | AAGAUAUUGCCUUGCUAAAGA | 2399 | UCUUUAGCAAGGCAAUAUCUUUU | 2949 |
| AD-2138631.1 | AGAUAUUGCCUUGCUAAAGCA | 2400 | UGCUUUAGCAAGGCAAUAUCUUU | 2950 |
| AD-2138632.1 | GAUAUUGCCUUGCUAAAGCUA | 2401 | UAGCUUUAGCAAGGCAAUAUCUU | 2951 |
| AD-2138633.1 | AUAUUGCCUUGCUAAAGCUAA | 2402 | UUAGCUUUAGCAAGGCAAUAUCU | 2952 |
| AD-2138634.1 | UAUUGCCUUGCUAAAGCUAAA | 2403 | UUUAGCUUUAGCAAGGCAAUAUC | 2953 |
| AD-2138635.1 | CCUUGCUAAAGCUAAGCAGUA | 2404 | UACUGCUUAGCUUUAGCAAGGCA | 2954 |
| AD-2138636.1 | CUUGCUAAAGCUAAGCAGUCA | 2405 | UGACUGCUUAGCUUUAGCAAGGC | 2955 |
| AD-2138637.1 | UGCUAAAGCUAAGCAGUCCUA | 2406 | UAGGACUGCUUAGCUUUAGCAAG | 2956 |
| AD-2138638.1 | CUAAGCAGUCCUGCCGUCAUA | 2407 | UAUGACGGCAGGACUGCUUAGCU | 2957 |
| AD-2138639.1 | AGCAGUCCUGCCGUCAUCACA | 2408 | UGUGAUGACGGCAGGACUGCUUA | 2958 |
| AD-2138640.1 | GCAGUCCUGCCGUCAUCACUA | 2409 | UAGUGAUGACGGCAGGACUGCUU | 2959 |
| AD-2138641.1 | CAGUCCUGCCGUCAUCACUGA | 2410 | UCAGUGAUGACGGCAGGACUGCU | 2960 |
| AD-2138642.1 | UCAUCACUGACAAAGUAAUCA | 2411 | UGAUUACUUUGUCAGUGAUGACG | 2961 |
| AD-2138643.1 | CAUCACUGACAAAGUAAUCCA | 2412 | UGGAUUACUUUGUCAGUGAUGAC | 2962 |
| AD-2138644.1 | AUCACUGACAAAGUAAUCCCA | 2413 | UGGGAUUACUUUGUCAGUGAUGA | 2963 |
| AD-2138645.1 | UCACUGACAAAGUAAUCCCAA | 2414 | UUGGGAUUACUUUGUCAGUGAUG | 2964 |
| AD-2138646.1 | CACUGACAAAGUAAUCCCAGA | 2415 | UCUGGGAUUACUUUGUCAGUGAU | 2965 |
| AD-2138647.1 | ACUGACAAAGUAAUCCCAGCA | 2416 | UGCUGGGAUUACUUUGUCAGUGA | 2966 |
| AD-2138648.1 | CUGACAAAGUAAUCCCAGCUA | 2417 | UAGCUGGGAUUACUUUGUCAGUG | 2967 |
| AD-2138649.1 | UGACAAAGUAAUCCCAGCUUA | 2418 | UAAGCUGGGAUUACUUUGUCAGU | 2968 |
| AD-2138650.1 | GACAAAGUAAUCCCAGCUUGA | 2419 | UCAAGCUGGGAUUACUUUGUCAG | 2969 |
| AD-2138651.1 | ACAAAGUAAUCCCAGCUUGUA | 2420 | UACAAGCUGGGAUUACUUUGUCA | 2970 |
| AD-2138652.1 | CAAAGUAAUCCCAGCUUGUCA | 2421 | UGACAAGCUGGGAUUACUUUGUC | 2971 |
| AD-2138653.1 | AAAGUAAUCCCAGCUUGUCUA | 2422 | UAGACAAGCUGGGAUUACUUUGU | 2972 |
| AD-2138654.1 | UAAUCCCAGCUUGUCUGCCAA | 2423 | UUGGCAGACAAGCUGGGAUUACU | 2973 |
| AD-2138655.1 | AUCCCAGCUUGUCUGCCAUCA | 2424 | UGAUGGCAGACAAGCUGGGAUUA | 2974 |
| AD-2138656.1 | CUGACCGGACCGAAUGUUUCA | 2425 | UGAAACAUUCGGUCCGGUCAGCG | 2975 |
| AD-2138657.1 | GACCGGACCGAAUGUUUCAUA | 2426 | UAUGAAACAUUCGGUCCGGUCAG | 2976 |
| AD-2138658.1 | ACCGGACCGAAUGUUUCAUCA | 2427 | UGAUGAAACAUUCGGUCCGGUCA | 2977 |
| AD-2138659.1 | CCGGACCGAAUGUUUCAUCAA | 2428 | UUGAUGAAACAUUCGGUCCGGUC | 2978 |
| AD-2138660.1 | CGGACCGAAUGUUUCAUCACA | 2429 | UGUGAUGAAACAUUCGGUCCGGU | 2979 |
| AD-2138661.1 | GGACCGAAUGUUUCAUCACUA | 2430 | UAGUGAUGAAACAUUCGGUCCGG | 2980 |
| AD-2138662.1 | GACCGAAUGUUUCAUCACUGA | 2431 | UCAGUGAUGAAACAUUCGGUCCG | 2981 |
| AD-2138663.1 | CGAAUGUUUCAUCACUGGCUA | 2432 | UAGCCAGUGAUGAAACAUUCGGU | 2982 |
| AD-2138664.1 | GAGAAACCCAAGGUACUUUUA | 2433 | UAAAAGUACCUUGGGUUUCUCCC | 2983 |
| AD-2138665.1 | AGAAACCCAAGGUACUUUUGA | 2434 | UCAAAAGUACCUUGGGUUUCUCC | 2984 |
| AD-2138666.1 | GAAACCCAAGGUACUUUUGGA | 2435 | UCCAAAAGUACCUUGGGUUUCUC | 2985 |
| AD-2138667.1 | AAACCCAAGGUACUUUUGGAA | 2436 | UUCCAAAAGUACCUUGGGUUUCU | 2986 |
| AD-2138668.1 | AACCCAAGGUACUUUUGGAGA | 2437 | UCUCCAAAAGUACCUUGGGUUUC | 2987 |
| AD-2138669.1 | ACCCAAGGUACUUUUGGAGCA | 2438 | UGCUCCAAAAGUACCUUGGGUUU | 2988 |
| AD-2138670.1 | CCCAAGGUACUUUUGGAGCUA | 2439 | UAGCUCCAAAAGUACCUUGGGUU | 2989 |
| AD-2138671.1 | CAAGGUACUUUUGGAGCUGGA | 2440 | UCCAGCUCCAAAAGUACCUUGGG | 2990 |
| AD-2138672.1 | ACUUUUGGAGCUGGCCUUCUA | 2441 | UAGAAGGCCAGCUCCAAAAGUAC | 2991 |
| AD-2138673.1 | UUUGGAGCUGGCCUUCUCAAA | 2442 | UUUGAGAAGGCCAGCUCCAAAAG | 2992 |
| AD-2138674.1 | UUGGAGCUGGCCUUCUCAAGA | 2443 | UCUUGAGAAGGCCAGCUCCAAAA | 2993 |
| AD-2138675.1 | UGGAGCUGGCCUUCUCAAGGA | 2444 | UCCUUGAGAAGGCCAGCUCCAAA | 2994 |
| AD-2138676.1 | GGAGCUGGCCUUCUCAAGGAA | 2445 | UUCCUUGAGAAGGCCAGCUCCAA | 2995 |
| AD-2138677.1 | GGAAGCCCAGCUCCCUGUGAA | 2446 | UUCACAGGGAGCUGGGCUUCCUU | 2996 |
| AD-2138678.1 | GAAGCCCAGCUCCCUGUGAUA | 2447 | UAUCACAGGGAGCUGGGCUUCCU | 2997 |
| AD-2138679.1 | AAGCCCAGCUCCCUGUGAUUA | 2448 | UAAUCACAGGGAGCUGGGCUUCC | 2998 |
| AD-2138680.1 | AGCCCAGCUCCCUGUGAUUGA | 2449 | UCAAUCACAGGGAGCUGGGCUUC | 2999 |
| AD-2138681.1 | GCCCAGCUCCCUGUGAUUGAA | 2450 | UUCAAUCACAGGGAGCUGGGCUU | 3000 |
| AD-2138682.1 | CCCAGCUCCCUGUGAUUGAGA | 2451 | UCUCAAUCACAGGGAGCUGGGCU | 3001 |
| AD-2138683.1 | CCAGCUCCCUGUGAUUGAGAA | 2452 | UUCUCAAUCACAGGGAGCUGGGC | 3002 |
| AD-2138684.1 | CAGCUCCCUGUGAUUGAGAAA | 2453 | UUUCUCAAUCACAGGGAGCUGGG | 3003 |
| AD-2138685.1 | AGCUCCCUGUGAUUGAGAAUA | 2454 | UAUUCUCAAUCACAGGGAGCUGG | 3004 |
| AD-2138686.1 | GCUCCCUGUGAUUGAGAAUAA | 2455 | UUAUUCUCAAUCACAGGGAGCUG | 3005 |
| AD-2138687.1 | CUCCCUGUGAUUGAGAAUAAA | 2456 | UUUAUUCUCAAUCACAGGGAGCU | 3006 |
| AD-2138688.1 | UCCCUGUGAUUGAGAAUAAAA | 2457 | UUUUAUUCUCAAUCACAGGGAGC | 3007 |
| AD-2138689.1 | CCCUGUGAUUGAGAAUAAAGA | 2458 | UCUUUAUUCUCAAUCACAGGGAG | 3008 |
| AD-2138690.1 | CCUGUGAUUGAGAAUAAAGUA | 2459 | UACUUUAUUCUCAAUCACAGGGA | 3009 |
| AD-2138691.1 | CUGUGAUUGAGAAUAAAGUGA | 2460 | UCACUUUAUUCUCAAUCACAGGG | 3010 |
| AD-2138692.1 | UGUGAUUGAGAAUAAAGUGUA | 2461 | UACACUUUAUUCUCAAUCACAGG | 3011 |
| AD-2138693.1 | GUGAUUGAGAAUAAAGUGUGA | 2462 | UCACACUUUAUUCUCAAUCACAG | 3012 |
| AD-2138694.1 | UGAUUGAGAAUAAAGUGUGCA | 2463 | UGCACACUUUAUUCUCAAUCACA | 3013 |
| AD-2138695.1 | GAUUGAGAAUAAAGUGUGCAA | 2464 | UUGCACACUUUAUUCUCAAUCAC | 3014 |
| AD-2138696.1 | AUUGAGAAUAAAGUGUGCAAA | 2465 | UUUGCACACUUUAUUCUCAAUCA | 3015 |
| AD-2138697.1 | UUGAGAAUAAAGUGUGCAAUA | 2466 | UAUUGCACACUUUAUUCUCAAUC | 3016 |
| AD-2138698.1 | UGAGAAUAAAGUGUGCAAUCA | 2467 | UGAUUGCACACUUUAUUCUCAAU | 3017 |
| AD-2138699.1 | GAGAAUAAAGUGUGCAAUCGA | 2468 | UCGAUUGCACACUUUAUUCUCAA | 3018 |
| AD-2138700.1 | GAAUAAAGUGUGCAAUCGCUA | 2469 | UAGCGAUUGCACACUUUAUUCUC | 3019 |
| AD-2138701.1 | AAUAAAGUGUGCAAUCGCUAA | 2470 | UUAGCGAUUGCACACUUUAUUCU | 3020 |
| AD-2138702.1 | AUAAAGUGUGCAAUCGCUAUA | 2471 | UAUAGCGAUUGCACACUUUAUUC | 3021 |
| AD-2138703.1 | UAAAGUGUGCAAUCGCUAUGA | 2472 | UCAUAGCGAUUGCACACUUUAUU | 3022 |
| AD-2138704.1 | AAAGUGUGCAAUCGCUAUGAA | 2473 | UUCAUAGCGAUUGCACACUUUAU | 3023 |
| AD-2138705.1 | AAGUGUGCAAUCGCUAUGAGA | 2474 | UCUCAUAGCGAUUGCACACUUUA | 3024 |
| AD-2138706.1 | AGUGUGCAAUCGCUAUGAGUA | 2475 | UACUCAUAGCGAUUGCACACUUU | 3025 |
| AD-2138707.1 | GUGUGCAAUCGCUAUGAGUUA | 2476 | UAACUCAUAGCGAUUGCACACUU | 3026 |
| AD-2138708.1 | UGUGCAAUCGCUAUGAGUUUA | 2477 | UAAACUCAUAGCGAUUGCACACU | 3027 |
| AD-2138709.1 | GUGCAAUCGCUAUGAGUUUCA | 2478 | UGAAACUCAUAGCGAUUGCACAC | 3028 |
| AD-2138710.1 | UGCAAUCGCUAUGAGUUUCUA | 2479 | UAGAAACUCAUAGCGAUUGCACA | 3029 |
| AD-2138711.1 | CAAUCGCUAUGAGUUUCUGAA | 2480 | UUCAGAAACUCAUAGCGAUUGCA | 3030 |
| AD-2138712.1 | AAUCGCUAUGAGUUUCUGAAA | 2481 | UUUCAGAAACUCAUAGCGAUUGC | 3031 |
| AD-2138713.1 | AUCGCUAUGAGUUUCUGAAUA | 2482 | UAUUCAGAAACUCAUAGCGAUUG | 3032 |
| AD-2138714.1 | UCGCUAUGAGUUUCUGAAUGA | 2483 | UCAUUCAGAAACUCAUAGCGAUU | 3033 |
| AD-2138715.1 | CGCUAUGAGUUUCUGAAUGGA | 2484 | UCCAUUCAGAAACUCAUAGCGAU | 3034 |
| AD-2138716.1 | GCUAUGAGUUUCUGAAUGGAA | 2485 | UUCCAUUCAGAAACUCAUAGCGA | 3035 |
| AD-2138717.1 | CUAUGAGUUUCUGAAUGGAAA | 2486 | UUUCCAUUCAGAAACUCAUAGCG | 3036 |
| AD-2138718.1 | UAUGAGUUUCUGAAUGGAAGA | 2487 | UCUUCCAUUCAGAAACUCAUAGC | 3037 |
| AD-2138719.1 | AUGAGUUUCUGAAUGGAAGAA | 2488 | UUCUUCCAUUCAGAAACUCAUAG | 3038 |
| AD-2138720.1 | UGAGUUUCUGAAUGGAAGAGA | 2489 | UCUCUUCCAUUCAGAAACUCAUA | 3039 |
| AD-2138721.1 | GAGUUUCUGAAUGGAAGAGUA | 2490 | UACUCUUCCAUUCAGAAACUCAU | 3040 |
| AD-2138722.1 | GUUUCUGAAUGGAAGAGUCCA | 2491 | UGGACUCUUCCAUUCAGAAACUC | 3041 |
| AD-2138723.1 | UUUCUGAAUGGAAGAGUCCAA | 2492 | UUGGACUCUUCCAUUCAGAAACU | 3042 |
| AD-2138724.1 | UUCUGAAUGGAAGAGUCCAAA | 2493 | UUUGGACUCUUCCAUUCAGAAAC | 3043 |
| AD-2138725.1 | UCUGAAUGGAAGAGUCCAAUA | 2494 | UAUUGGACUCUUCCAUUCAGAAA | 3044 |
| AD-2138726.1 | CUGAAUGGAAGAGUCCAAUCA | 2495 | UGAUUGGACUCUUCCAUUCAGAA | 3045 |
| AD-2138727.1 | GAAUGGAAGAGUCCAAUCCAA | 2496 | UUGGAUUGGACUCUUCCAUUCAG | 3046 |
| AD-2138728.1 | GAACUCUGUGCUGGGCAUUUA | 2497 | UAAAUGCCCAGCACAGAGUUCGG | 3047 |
| AD-2138729.1 | AACUCUGUGCUGGGCAUUUGA | 2498 | UCAAAUGCCCAGCACAGAGUUCG | 3048 |
| AD-2138730.1 | CUCUGUGCUGGGCAUUUGGCA | 2499 | UGCCAAAUGCCCAGCACAGAGUU | 3049 |
| AD-2138731.1 | UCUGUGCUGGGCAUUUGGCCA | 2500 | UGGCCAAAUGCCCAGCACAGAGU | 3050 |
| AD-2138732.1 | UGUGCUGGGCAUUUGGCCGGA | 2501 | UCCGGCCAAAUGCCCAGCACAGA | 3051 |
| AD-2138733.1 | GUGCUGGGCAUUUGGCCGGAA | 2502 | UUCCGGCCAAAUGCCCAGCACAG | 3052 |
| AD-2138734.1 | UGCUGGGCAUUUGGCCGGAGA | 2503 | UCUCCGGCCAAAUGCCCAGCACA | 3053 |
| AD-2138735.1 | CUUCGAGAAGGACAAAUACAA | 2504 | UUGUAUUUGUCCUUCUCGAAGCA | 3054 |
| AD-2138736.1 | UUCGAGAAGGACAAAUACAUA | 2505 | UAUGUAUUUGUCCUUCUCGAAGC | 3055 |
| AD-2138737.1 | UCGAGAAGGACAAAUACAUUA | 2506 | UAAUGUAUUUGUCCUUCUCGAAG | 3056 |
| AD-2138738.1 | CGAGAAGGACAAAUACAUUUA | 2507 | UAAAUGUAUUUGUCCUUCUCGAA | 3057 |
| AD-2138739.1 | GAGAAGGACAAAUACAUUUUA | 2508 | UAAAAUGUAUUUGUCCUUCUCGA | 3058 |
| AD-2138740.1 | AGAAGGACAAAUACAUUUUAA | 2509 | UUAAAAUGUAUUUGUCCUUCUCG | 3059 |
| AD-2138741.1 | GAAGGACAAAUACAUUUUACA | 2510 | UGUAAAAUGUAUUUGUCCUUCUC | 3060 |
| AD-2138742.1 | AAGGACAAAUACAUUUUACAA | 2511 | UUGUAAAAUGUAUUUGUCCUUCU | 3061 |
| AD-2138743.1 | AGGACAAAUACAUUUUACAAA | 2512 | UUUGUAAAAUGUAUUUGUCCUUC | 3062 |
| AD-2138744.1 | GGACAAAUACAUUUUACAAGA | 2513 | UCUUGUAAAAUGUAUUUGUCCUU | 3063 |
| AD-2138745.1 | GACAAAUACAUUUUACAAGGA | 2514 | UCCUUGUAAAAUGUAUUUGUCCU | 3064 |
| AD-2138746.1 | ACAAAUACAUUUUACAAGGAA | 2515 | UUCCUUGUAAAAUGUAUUUGUCC | 3065 |
| AD-2138747.1 | AAUAAGCCUGGUGUCUAUGUA | 2516 | UACAUAGACACCAGGCUUAUUGG | 3066 |
| AD-2138748.1 | AUAAGCCUGGUGUCUAUGUUA | 2517 | UAACAUAGACACCAGGCUUAUUG | 3067 |
| AD-2138749.1 | UAAGCCUGGUGUCUAUGUUCA | 2518 | UGAACAUAGACACCAGGCUUAUU | 3068 |
| AD-2138750.1 | AGCCUGGUGUCUAUGUUCGUA | 2519 | UACGAACAUAGACACCAGGCUUA | 3069 |
| AD-2138751.1 | CCUGGUGUCUAUGUUCGUGUA | 2520 | UACACGAACAUAGACACCAGGCU | 3070 |
| AD-2138752.1 | CUGGUGUCUAUGUUCGUGUUA | 2521 | UAACACGAACAUAGACACCAGGC | 3071 |
| AD-2138753.1 | UGGUGUCUAUGUUCGUGUUUA | 2522 | UAAACACGAACAUAGACACCAGG | 3072 |
| AD-2138754.1 | GGUGUCUAUGUUCGUGUUUCA | 2523 | UGAAACACGAACAUAGACACCAG | 3073 |
| AD-2138755.1 | GUGUCUAUGUUCGUGUUUCAA | 2524 | UUGAAACACGAACAUAGACACCA | 3074 |
| AD-2138756.1 | UGUCUAUGUUCGUGUUUCAAA | 2525 | UUUGAAACACGAACAUAGACACC | 3075 |
| AD-2138757.1 | GUCUAUGUUCGUGUUUCAAGA | 2526 | UCUUGAAACACGAACAUAGACAC | 3076 |
| AD-2138758.1 | UCUAUGUUCGUGUUUCAAGGA | 2527 | UCCUUGAAACACGAACAUAGACA | 3077 |
| AD-2138759.1 | CUAUGUUCGUGUUUCAAGGUA | 2528 | UACCUUGAAACACGAACAUAGAC | 3078 |
| AD-2138760.1 | UAUGUUCGUGUUUCAAGGUUA | 2529 | UAACCUUGAAACACGAACAUAGA | 3079 |
| AD-2138761.1 | AUGUUCGUGUUUCAAGGUUUA | 2530 | UAAACCUUGAAACACGAACAUAG | 3080 |
| AD-2138762.1 | UGUUCGUGUUUCAAGGUUUGA | 2531 | UCAAACCUUGAAACACGAACAUA | 3081 |
| AD-2138763.1 | GUUCGUGUUUCAAGGUUUGUA | 2532 | UACAAACCUUGAAACACGAACAU | 3082 |
| AD-2138764.1 | UUCGUGUUUCAAGGUUUGUUA | 2533 | UAACAAACCUUGAAACACGAACA | 3083 |
| AD-2138765.1 | UCGUGUUUCAAGGUUUGUUAA | 2534 | UUAACAAACCUUGAAACACGAAC | 3084 |
| AD-2138766.1 | CGUGUUUCAAGGUUUGUUACA | 2535 | UGUAACAAACCUUGAAACACGAA | 3085 |
| AD-2138767.1 | GUGUUUCAAGGUUUGUUACUA | 2536 | UAGUAACAAACCUUGAAACACGA | 3086 |
| AD-2138768.1 | UGUUUCAAGGUUUGUUACUUA | 2537 | UAAGUAACAAACCUUGAAACACG | 3087 |
| AD-2138769.1 | GUUUCAAGGUUUGUUACUUGA | 2538 | UCAAGUAACAAACCUUGAAACAC | 3088 |
| AD-2138770.1 | UUUCAAGGUUUGUUACUUGGA | 2539 | UCCAAGUAACAAACCUUGAAACA | 3089 |
| AD-2138771.1 | UUCAAGGUUUGUUACUUGGAA | 2540 | UUCCAAGUAACAAACCUUGAAAC | 3090 |
| AD-2138772.1 | UCAAGGUUUGUUACUUGGAUA | 2541 | UAUCCAAGUAACAAACCUUGAAA | 3091 |
| AD-2138773.1 | UGUUACUUGGAUUGAGGGAGA | 2542 | UCUCCCUCAAUCCAAGUAACAAA | 3092 |
| AD-2138774.1 | GUUACUUGGAUUGAGGGAGUA | 2543 | UACUCCCUCAAUCCAAGUAACAA | 3093 |
| AD-2138775.1 | UACUUGGAUUGAGGGAGUGAA | 2544 | UUCACUCCCUCAAUCCAAGUAAC | 3094 |
| AD-2138776.1 | ACUUGGAUUGAGGGAGUGAUA | 2545 | UAUCACUCCCUCAAUCCAAGUAA | 3095 |
| AD-2138777.1 | CUUGGAUUGAGGGAGUGAUGA | 2546 | UCAUCACUCCCUCAAUCCAAGUA | 3096 |
| AD-2138778.1 | UUGGAUUGAGGGAGUGAUGAA | 2547 | UUCAUCACUCCCUCAAUCCAAGU | 3097 |
| AD-2138779.1 | UGGAUUGAGGGAGUGAUGAGA | 2548 | UCUCAUCACUCCCUCAAUCCAAG | 3098 |
| AD-2138780.1 | GGAUUGAGGGAGUGAUGAGAA | 2549 | UUCUCAUCACUCCCUCAAUCCAA | 3099 |
| AD-2138781.1 | GAUUGAGGGAGUGAUGAGAAA | 2550 | UUUCUCAUCACUCCCUCAAUCCA | 3100 |
| AD-2138782.1 | AUUGAGGGAGUGAUGAGAAAA | 2551 | UUUUCUCAUCACUCCCUCAAUCC | 3101 |
| AD-2138783.1 | UUGAGGGAGUGAUGAGAAAUA | 2552 | UAUUUCUCAUCACUCCCUCAAUC | 3102 |
| AD-2138784.2 | UGAGGGAGUGAUGAGAAAUAA | 2553 | UUAUUUCUCAUCACUCCCUCAAU | 3103 |
| AD-2138785.2 | GAGGGAGUGAUGAGAAAUAAA | 2554 | UUUAUUUCUCAUCACUCCCUCAA | 3104 |
| AD-2138787.2 | GGGAGUGAUGAGAAAUAAUUA | 2555 | UAAUUAUUUCUCAUCACUCCCUC | 3105 |
| AD-2138789.2 | GAGUGAUGAGAAAUAAUUAAA | 2556 | UUUAAUUAUUUCUCAUCACUCCC | 3106 |
| AD-2138790.2 | AGUGAUGAGAAAUAAUUAAUA | 2557 | UAUUAAUUAUUUCUCAUCACUCC | 3107 |
| AD-2138791.2 | GUGAUGAGAAAUAAUUAAUUA | 2558 | UAAUUAAUUAUUUCUCAUCACUC | 3108 |
| AD-2138792.2 | UGAUGAGAAAUAAUUAAUUGA | 2559 | UCAAUUAAUUAUUUCUCAUCACU | 3109 |
| AD-2138793.2 | GAUGAGAAAUAAUUAAUUGGA | 2560 | UCCAAUUAAUUAUUUCUCAUCAC | 3110 |
| AD-2138794.2 | AUGAGAAAUAAUUAAUUGGAA | 2561 | UUCCAAUUAAUUAUUUCUCAUCA | 3111 |
| AD-2138795.2 | UGGACGGGAGACAGAGUGACA | 2562 | UGUCACUCUGUCUCCCGUCCAAU | 3112 |
| AD-2138796.2 | GGACGGGAGACAGAGUGACGA | 2563 | UCGUCACUCUGUCUCCCGUCCAA | 3113 |
| AD-2138797.2 | GACGGGAGACAGAGUGACGCA | 2564 | UGCGUCACUCUGUCUCCCGUCCA | 3114 |
| AD-2138798.2 | ACGGGAGACAGAGUGACGCAA | 2565 | UUGCGUCACUCUGUCUCCCGUCC | 3115 |
| AD-2138800.2 | AGACAGAGUGACGCACUGACA | 2566 | UGUCAGUGCGUCACUCUGUCUCC | 3116 |
| AD-2138802.2 | ACAGAGUGACGCACUGACUCA | 2567 | UGAGUCAGUGCGUCACUCUGUCU | 3117 |
| AD-2138804.2 | AGAGUGACGCACUGACUCACA | 2568 | UGUGAGUCAGUGCGUCACUCUGU | 3118 |
| AD-2138805.2 | GAGUGACGCACUGACUCACCA | 2569 | UGGUGAGUCAGUGCGUCACUCUG | 3119 |
| AD-2138806.2 | AGUGACGCACUGACUCACCUA | 2570 | UAGGUGAGUCAGUGCGUCACUCU | 3120 |
| AD-2138807.2 | UGACGCACUGACUCACCUAGA | 2571 | UCUAGGUGAGUCAGUGCGUCACU | 3121 |
| AD-2138808.2 | GACGCACUGACUCACCUAGAA | 2572 | UUCUAGGUGAGUCAGUGCGUCAC | 3122 |
| AD-2138809.2 | ACGCACUGACUCACCUAGAGA | 2573 | UCUCUAGGUGAGUCAGUGCGUCA | 3123 |
| AD-2138810.2 | CGCACUGACUCACCUAGAGGA | 2574 | UCCUCUAGGUGAGUCAGUGCGUC | 3124 |
| AD-2138811.2 | GCACUGACUCACCUAGAGGCA | 2575 | UGCCUCUAGGUGAGUCAGUGCGU | 3125 |
| AD-2138812.2 | CACUGACUCACCUAGAGGCUA | 2576 | UAGCCUCUAGGUGAGUCAGUGCG | 3126 |
| AD-2138813.2 | ACUGACUCACCUAGAGGCUGA | 2577 | UCAGCCUCUAGGUGAGUCAGUGC | 3127 |
| AD-2138814.2 | GAACGUGGGUAGGGAUUUAGA | 2578 | UCUAAAUCCCUACCCACGUUCCA | 3128 |
| AD-2138816.2 | ACGUGGGUAGGGAUUUAGCAA | 2579 | UUGCUAAAUCCCUACCCACGUUC | 3129 |
| AD-2138819.2 | UGGGUAGGGAUUUAGCAUGCA | 2580 | UGCAUGCUAAAUCCCUACCCACG | 3130 |
| AD-2138820.2 | GGGUAGGGAUUUAGCAUGCUA | 2581 | UAGCAUGCUAAAUCCCUACCCAC | 3131 |
| AD-2138821.2 | GGUAGGGAUUUAGCAUGCUGA | 2582 | UCAGCAUGCUAAAUCCCUACCCA | 3132 |
| AD-2138822.2 | GUAGGGAUUUAGCAUGCUGGA | 2583 | UCCAGCAUGCUAAAUCCCUACCC | 3133 |
| AD-2138823.2 | UAGGGAUUUAGCAUGCUGGAA | 2584 | UUCCAGCAUGCUAAAUCCCUACC | 3134 |
| AD-2138824.2 | UUUAGCAUGCUGGAAAUAACA | 2585 | UGUUAUUUCCAGCAUGCUAAAUC | 3135 |
| AD-2138825.2 | UUAGCAUGCUGGAAAUAACUA | 2586 | UAGUUAUUUCCAGCAUGCUAAAU | 3136 |
| AD-2138826.2 | UAGCAUGCUGGAAAUAACUGA | 2587 | UCAGUUAUUUCCAGCAUGCUAAA | 3137 |
| AD-2138827.2 | AGCAUGCUGGAAAUAACUGGA | 2588 | UCCAGUUAUUUCCAGCAUGCUAA | 3138 |
| AD-2138828.2 | GCAUGCUGGAAAUAACUGGCA | 2589 | UGCCAGUUAUUUCCAGCAUGCUA | 3139 |
| AD-2138829.2 | CAUGCUGGAAAUAACUGGCAA | 2590 | UUGCCAGUUAUUUCCAGCAUGCU | 3140 |
| AD-2138830.2 | AUGCUGGAAAUAACUGGCAGA | 2591 | UCUGCCAGUUAUUUCCAGCAUGC | 3141 |
| AD-2138831.2 | UGCUGGAAAUAACUGGCAGUA | 2592 | UACUGCCAGUUAUUUCCAGCAUG | 3142 |
| AD-2138832.2 | GCUGGAAAUAACUGGCAGUAA | 2593 | UUACUGCCAGUUAUUUCCAGCAU | 3143 |
| AD-2138833.2 | CUGGAAAUAACUGGCAGUAAA | 2594 | UUUACUGCCAGUUAUUUCCAGCA | 3144 |
| AD-2138834.2 | UGGAAAUAACUGGCAGUAAUA | 2595 | UAUUACUGCCAGUUAUUUCCAGC | 3145 |
| AD-2138835.2 | GGAAAUAACUGGCAGUAAUCA | 2596 | UGAUUACUGCCAGUUAUUUCCAG | 3146 |
| AD-2138836.2 | GAAAUAACUGGCAGUAAUCAA | 2597 | UUGAUUACUGCCAGUUAUUUCCA | 3147 |
| AD-2138837.2 | AAAUAACUGGCAGUAAUCAAA | 2598 | UUUGAUUACUGCCAGUUAUUUCC | 3148 |
| AD-2138838.2 | AAUAACUGGCAGUAAUCAAAA | 2599 | UUUUGAUUACUGCCAGUUAUUUC | 3149 |
| AD-2138839.2 | AUAACUGGCAGUAAUCAAACA | 2600 | UGUUUGAUUACUGCCAGUUAUUU | 3150 |
| AD-2138840.2 | AACUGGCAGUAAUCAAACGAA | 2601 | UUCGUUUGAUUACUGCCAGUUAU | 3151 |
| AD-2138841.2 | ACUGGCAGUAAUCAAACGAAA | 2602 | UUUCGUUUGAUUACUGCCAGUUA | 3152 |
| AD-2138842.2 | CUGGCAGUAAUCAAACGAAGA | 2603 | UCUUCGUUUGAUUACUGCCAGUU | 3153 |
| AD-2138843.2 | UGGCAGUAAUCAAACGAAGAA | 2604 | UUCUUCGUUUGAUUACUGCCAGU | 3154 |
| AD-2138844.2 | GGCAGUAAUCAAACGAAGACA | 2605 | UGUCUUCGUUUGAUUACUGCCAG | 3155 |
| AD-2138845.2 | GCAGUAAUCAAACGAAGACAA | 2606 | UUGUCUUCGUUUGAUUACUGCCA | 3156 |
| AD-2138847.2 | AGUAAUCAAACGAAGACACUA | 2607 | UAGUGUCUUCGUUUGAUUACUGC | 3157 |
| AD-2138848.2 | AAUCAAACGAAGACACUGUCA | 2608 | UGACAGUGUCUUCGUUUGAUUAC | 3158 |
| AD-2138849.2 | AUCAAACGAAGACACUGUCCA | 2609 | UGGACAGUGUCUUCGUUUGAUUA | 3159 |
| AD-2138850.2 | ACGCCAAACCUCGGCAUUUUA | 2610 | UAAAAUGCCGAGGUUUGGCGUAG | 3160 |
| AD-2138851.2 | CGCCAAACCUCGGCAUUUUUA | 2611 | UAAAAAUGCCGAGGUUUGGCGUA | 3161 |
| AD-2138852.2 | GCCAAACCUCGGCAUUUUUUA | 2612 | UAAAAAAUGCCGAGGUUUGGCGU | 3162 |
| AD-2138853.2 | CCAAACCUCGGCAUUUUUUGA | 2613 | UCAAAAAAUGCCGAGGUUUGGCG | 3163 |
| AD-2138854.2 | CAAACCUCGGCAUUUUUUGUA | 2614 | UACAAAAAAUGCCGAGGUUUGGC | 3164 |
| AD-2138855.2 | AAACCUCGGCAUUUUUUGUGA | 2615 | UCACAAAAAAUGCCGAGGUUUGG | 3165 |
| AD-2138856.2 | AACCUCGGCAUUUUUUGUGUA | 2616 | UACACAAAAAAUGCCGAGGUUUG | 3166 |
| AD-2138857.2 | ACCUCGGCAUUUUUUGUGUUA | 2617 | UAACACAAAAAAUGCCGAGGUUU | 3167 |
| AD-2138858.2 | CCUCGGCAUUUUUUGUGUUAA | 2618 | UUAACACAAAAAAUGCCGAGGUU | 3168 |
| AD-2138859.2 | CUCGGCAUUUUUUGUGUUAUA | 2619 | UAUAACACAAAAAAUGCCGAGGU | 3169 |
| AD-2138860.2 | UCGGCAUUUUUUGUGUUAUUA | 2620 | UAAUAACACAAAAAAUGCCGAGG | 3170 |
| AD-2138861.2 | GGCAUUUUUUGUGUUAUUUUA | 2621 | UAAAAUAACACAAAAAAUGCCGA | 3171 |
| AD-2138862.2 | GCAUUUUUUGUGUUAUUUUCA | 2622 | UGAAAAUAACACAAAAAAUGCCG | 3172 |
| AD-2138863.2 | CAUUUUUUGUGUUAUUUUCUA | 2623 | UAGAAAAUAACACAAAAAAUGCC | 3173 |
| AD-2138864.2 | UUUGUGUUAUUUUCUGACUGA | 2624 | UCAGUCAGAAAAUAACACAAAAA | 3174 |
| AD-2138865.2 | UUGUGUUAUUUUCUGACUGCA | 2625 | UGCAGUCAGAAAAUAACACAAAA | 3175 |
| AD-2138866.2 | UGUGUUAUUUUCUGACUGCUA | 2626 | UAGCAGUCAGAAAAUAACACAAA | 3176 |
| AD-2138867.2 | GUGUUAUUUUCUGACUGCUGA | 2627 | UCAGCAGUCAGAAAAUAACACAA | 3177 |
| AD-2138868.2 | UGUUAUUUUCUGACUGCUGGA | 2628 | UCCAGCAGUCAGAAAAUAACACA | 3178 |
| AD-2138869.2 | GUUAUUUUCUGACUGCUGGAA | 2629 | UUCCAGCAGUCAGAAAAUAACAC | 3179 |
| AD-2138870.2 | UUAUUUUCUGACUGCUGGAUA | 2630 | UAUCCAGCAGUCAGAAAAUAACA | 3180 |
| AD-2138871.2 | UAUUUUCUGACUGCUGGAUUA | 2631 | UAAUCCAGCAGUCAGAAAAUAAC | 3181 |
| AD-2138872.2 | AUUUUCUGACUGCUGGAUUCA | 2632 | UGAAUCCAGCAGUCAGAAAAUAA | 3182 |
| AD-2138873.2 | UCUGACUGCUGGAUUCUGUAA | 2633 | UUACAGAAUCCAGCAGUCAGAAA | 3183 |
| AD-2138874.2 | AGUAAGGUGACAUAGCUAUGA | 2634 | UCAUAGCUAUGUCACCUUACUAC | 3184 |
| AD-2138875.2 | GUAAGGUGACAUAGCUAUGAA | 2635 | UUCAUAGCUAUGUCACCUUACUA | 3185 |
| AD-2138876.2 | UAAGGUGACAUAGCUAUGACA | 2636 | UGUCAUAGCUAUGUCACCUUACU | 3186 |
| AD-2138877.2 | AAGGUGACAUAGCUAUGACAA | 2637 | UUGUCAUAGCUAUGUCACCUUAC | 3187 |
| AD-2138878.2 | AGGUGACAUAGCUAUGACAUA | 2638 | UAUGUCAUAGCUAUGUCACCUUA | 3188 |
| AD-2138879.2 | GGUGACAUAGCUAUGACAUUA | 2639 | UAAUGUCAUAGCUAUGUCACCUU | 3189 |
| AD-2138880.2 | GUGACAUAGCUAUGACAUUUA | 2640 | UAAAUGUCAUAGCUAUGUCACCU | 3190 |
| AD-2138881.2 | UGACAUAGCUAUGACAUUUGA | 2641 | UCAAAUGUCAUAGCUAUGUCACC | 3191 |
| AD-2138882.2 | ACAUAGCUAUGACAUUUGUUA | 2642 | UAACAAAUGUCAUAGCUAUGUCA | 3192 |
| AD-2138883.2 | CAUAGCUAUGACAUUUGUUAA | 2643 | UUAACAAAUGUCAUAGCUAUGUC | 3193 |
| AD-2138884.2 | AUAGCUAUGACAUUUGUUAAA | 2644 | UUUAACAAAUGUCAUAGCUAUGU | 3194 |
| AD-2138885.2 | UAGCUAUGACAUUUGUUAAAA | 2645 | UUUUAACAAAUGUCAUAGCUAUG | 3195 |
| AD-2138886.2 | AGCUAUGACAUUUGUUAAAAA | 2646 | UUUUUAACAAAUGUCAUAGCUAU | 3196 |
| AD-2138887.2 | GCUAUGACAUUUGUUAAAAAA | 2647 | UUUUUUAACAAAUGUCAUAGCUA | 3197 |
| AD-2138888.2 | CUAUGACAUUUGUUAAAAAUA | 2648 | UAUUUUUAACAAAUGUCAUAGCU | 3198 |
| AD-2138889.2 | UAUGACAUUUGUUAAAAAUAA | 2649 | UUAUUUUUAACAAAUGUCAUAGC | 3199 |
| AD-2138890.2 | AUGACAUUUGUUAAAAAUAAA | 2650 | UUUAUUUUUAACAAAUGUCAUAG | 3200 |
| AD-2138891.2 | UGACAUUUGUUAAAAAUAAAA | 2651 | UUUUAUUUUUAACAAAUGUCAUA | 3201 |
| AD-2138892.2 | GACAUUUGUUAAAAAUAAACA | 2652 | UGUUUAUUUUUAACAAAUGUCAU | 3202 |
| AD-2138893.2 | ACAUUUGUUAAAAAUAAACUA | 2653 | UAGUUUAUUUUUAACAAAUGUCA | 3203 |
| AD-2138894.2 | AAUAAACUCUGUACUUAACUA | 2654 | UAGUUAAGUACAGAGUUUAUUUU | 3204 |
| AD-2138895.2 | AUAAACUCUGUACUUAACUUA | 2655 | UAAGUUAAGUACAGAGUUUAUUU | 3205 |
| AD-2138896.2 | UAAACUCUGUACUUAACUUUA | 2656 | UAAAGUUAAGUACAGAGUUUAUU | 3206 |
| AD-2138897.2 | AAACUCUGUACUUAACUUUGA | 2657 | UCAAAGUUAAGUACAGAGUUUAU | 3207 |
| AD-2138898.2 | AACUCUGUACUUAACUUUGAA | 2658 | UUCAAAGUUAAGUACAGAGUUUA | 3208 |
| AD-2138899.2 | ACUCUGUACUUAACUUUGAUA | 2659 | UAUCAAAGUUAAGUACAGAGUUU | 3209 |
| AD-2138900.2 | CUCUGUACUUAACUUUGAUUA | 2660 | UAAUCAAAGUUAAGUACAGAGUU | 3210 |
| AD-2138901.2 | UCUGUACUUAACUUUGAUUUA | 2661 | UAAAUCAAAGUUAAGUACAGAGU | 3211 |
| AD-2138902.2 | CUGUACUUAACUUUGAUUUGA | 2662 | UCAAAUCAAAGUUAAGUACAGAG | 3212 |
| AD-2138903.2 | UGUACUUAACUUUGAUUUGAA | 2663 | UUCAAAUCAAAGUUAAGUACAGA | 3213 |
| AD-2138904.2 | GUACUUAACUUUGAUUUGAGA | 2664 | UCUCAAAUCAAAGUUAAGUACAG | 3214 |
| AD-2138905.2 | UACUUAACUUUGAUUUGAGUA | 2665 | UACUCAAAUCAAAGUUAAGUACA | 3215 |
| AD-2138906.2 | ACUUAACUUUGAUUUGAGUAA | 2666 | UUACUCAAAUCAAAGUUAAGUAC | 3216 |
| AD-2138907.2 | UUGAUUUGAGUAAAUUUUGGA | 2667 | UCCAAAAUUUACUCAAAUCAAAG | 3217 |
| AD-2138908.2 | UGAGUAAAUUUUGGUUUUGGA | 2668 | UCCAAAACCAAAAUUUACUCAAA | 3218 |
| AD-2138909.2 | GAGUAAAUUUUGGUUUUGGUA | 2669 | UACCAAAACCAAAAUUUACUCAA | 3219 |
| AD-2138910.2 | AGUAAAUUUUGGUUUUGGUCA | 2670 | UGACCAAAACCAAAAUUUACUCA | 3220 |
| AD-2138911.2 | GUAAAUUUUGGUUUUGGUCUA | 2671 | UAGACCAAAACCAAAAUUUACUC | 3221 |
| AD-2138912.2 | UAAAUUUUGGUUUUGGUCUUA | 2672 | UAAGACCAAAACCAAAAUUUACU | 3222 |
| AD-2138913.2 | AAAUUUUGGUUUUGGUCUUCA | 2673 | UGAAGACCAAAACCAAAAUUUAC | 3223 |
| AD-2138914.2 | AUUUUGGUUUUGGUCUUCAAA | 2674 | UUUGAAGACCAAAACCAAAAUUU | 3224 |
| AD-2138915.2 | UUUGGUUUUGGUCUUCAACAA | 2675 | UUGUUGAAGACCAAAACCAAAAU | 3225 |
| AD-2138916.2 | UUGGUUUUGGUCUUCAACAUA | 2676 | UAUGUUGAAGACCAAAACCAAAA | 3226 |
| AD-2138917.2 | UGGUUUUGGUCUUCAACAUUA | 2677 | UAAUGUUGAAGACCAAAACCAAA | 3227 |
| AD-2138918.2 | GGUUUUGGUCUUCAACAUUUA | 2678 | UAAAUGUUGAAGACCAAAACCAA | 3228 |
| AD-2138919.2 | GUUUUGGUCUUCAACAUUUUA | 2679 | UAAAAUGUUGAAGACCAAAACCA | 3229 |
| AD-2138920.2 | UUUUGGUCUUCAACAUUUUCA | 2680 | UGAAAAUGUUGAAGACCAAAACC | 3230 |
| AD-2138921.2 | UUUGGUCUUCAACAUUUUCAA | 2681 | UUGAAAAUGUUGAAGACCAAAAC | 3231 |
| AD-2138922.2 | UUGGUCUUCAACAUUUUCAUA | 2682 | UAUGAAAAUGUUGAAGACCAAAA | 3232 |
| AD-2138923.2 | UGGUCUUCAACAUUUUCAUGA | 2683 | UCAUGAAAAUGUUGAAGACCAAA | 3233 |
| AD-2138924.2 | GGUCUUCAACAUUUUCAUGCA | 2684 | UGCAUGAAAAUGUUGAAGACCAA | 3234 |
| AD-2138925.2 | GUCUUCAACAUUUUCAUGCUA | 2685 | UAGCAUGAAAAUGUUGAAGACCA | 3235 |
| AD-2138926.2 | CUUCAACAUUUUCAUGCUCUA | 2686 | UAGAGCAUGAAAAUGUUGAAGAC | 3236 |
| AD-2138927.2 | UUCAACAUUUUCAUGCUCUUA | 2687 | UAAGAGCAUGAAAAUGUUGAAGA | 3237 |
| AD-2138928.2 | UCAACAUUUUCAUGCUCUUUA | 2688 | UAAAGAGCAUGAAAAUGUUGAAG | 3238 |
| AD-2138929.2 | CAACAUUUUCAUGCUCUUUGA | 2689 | UCAAAGAGCAUGAAAAUGUUGAA | 3239 |
| AD-2138930.2 | AACAUUUUCAUGCUCUUUGUA | 2690 | UACAAAGAGCAUGAAAAUGUUGA | 3240 |
| AD-2138931.2 | ACAUUUUCAUGCUCUUUGUUA | 2691 | UAACAAAGAGCAUGAAAAUGUUG | 3241 |
| AD-2138932.2 | CAUUUUCAUGCUCUUUGUUCA | 2692 | UGAACAAAGAGCAUGAAAAUGUU | 3242 |
| AD-2138933.2 | AUUUUCAUGCUCUUUGUUCAA | 2693 | UUGAACAAAGAGCAUGAAAAUGU | 3243 |
| AD-2138934.2 | UUUUCAUGCUCUUUGUUCACA | 2694 | UGUGAACAAAGAGCAUGAAAAUG | 3244 |
| AD-2138935.2 | UUUCAUGCUCUUUGUUCACCA | 2695 | UGGUGAACAAAGAGCAUGAAAAU | 3245 |
| AD-2138936.2 | GAUUUAGCUGCUUUUGAUAAA | 2696 | UUUAUCAAAAGCAGCUAAAUCCC | 3246 |
| AD-2138937.2 | AUUUAGCUGCUUUUGAUAAGA | 2697 | UCUUAUCAAAAGCAGCUAAAUCC | 3247 |
| AD-2138938.2 | UUAGCUGCUUUUGAUAAGGAA | 2698 | UUCCUUAUCAAAAGCAGCUAAAU | 3248 |
| AD-2138939.2 | UAGCUGCUUUUGAUAAGGAAA | 2699 | UUUCCUUAUCAAAAGCAGCUAAA | 3249 |
| AD-2138940.2 | AGCUGCUUUUGAUAAGGAACA | 2700 | UGUUCCUUAUCAAAAGCAGCUAA | 3250 |
| AD-2138941.2 | GCUGCUUUUGAUAAGGAACAA | 2701 | UUGUUCCUUAUCAAAAGCAGCUA | 3251 |
| AD-2138942.2 | AUAAGGAACAGCUGCACAAAA | 2702 | UUUUGUGCAGCUGUUCCUUAUCA | 3252 |
| AD-2138943.2 | CGCAUUUACCUCAUCAGCUAA | 2703 | UUAGCUGAUGAGGUAAAUGCGUG | 3253 |
| AD-2138944.2 | GCAUUUACCUCAUCAGCUAAA | 2704 | UUUAGCUGAUGAGGUAAAUGCGU | 3254 |
| AD-2138945.2 | CAUUUACCUCAUCAGCUAACA | 2705 | UGUUAGCUGAUGAGGUAAAUGCG | 3255 |
| AD-2138946.2 | GCUUGACAUGCAUUUUUACUA | 2706 | UAGUAAAAAUGCAUGUCAAGCCC | 3256 |
| AD-2138947.2 | CUUGACAUGCAUUUUUACUGA | 2707 | UCAGUAAAAAUGCAUGUCAAGCC | 3257 |
| AD-2138948.2 | UUGACAUGCAUUUUUACUGUA | 2708 | UACAGUAAAAAUGCAUGUCAAGC | 3258 |
| AD-2138949.2 | UGACAUGCAUUUUUACUGUCA | 2709 | UGACAGUAAAAAUGCAUGUCAAG | 3259 |
| AD-2138950.2 | GACAUGCAUUUUUACUGUCUA | 2710 | UAGACAGUAAAAAUGCAUGUCAA | 3260 |
| AD-2138951.2 | ACAUGCAUUUUUACUGUCUUA | 2711 | UAAGACAGUAAAAAUGCAUGUCA | 3261 |
| AD-2138952.2 | CAUGCAUUUUUACUGUCUUUA | 2712 | UAAAGACAGUAAAAAUGCAUGUC | 3262 |
| AD-2138953.2 | AUGCAUUUUUACUGUCUUUAA | 2713 | UUAAAGACAGUAAAAAUGCAUGU | 3263 |
| AD-2138954.2 | UGCAUUUUUACUGUCUUUAUA | 2714 | UAUAAAGACAGUAAAAAUGCAUG | 3264 |
| AD-2138955.2 | GCAUUUUUACUGUCUUUAUUA | 2715 | UAAUAAAGACAGUAAAAAUGCAU | 3265 |
| AD-2138956.2 | CAUUUUUACUGUCUUUAUUCA | 2716 | UGAAUAAAGACAGUAAAAAUGCA | 3266 |
| AD-2138957.2 | AUUUUUACUGUCUUUAUUCCA | 2717 | UGGAAUAAAGACAGUAAAAAUGC | 3267 |
| AD-2138958.2 | UUUUUACUGUCUUUAUUCCUA | 2718 | UAGGAAUAAAGACAGUAAAAAUG | 3268 |
| AD-2138959.2 | UUUUACUGUCUUUAUUCCUGA | 2719 | UCAGGAAUAAAGACAGUAAAAAU | 3269 |
| AD-2138960.2 | UUUACUGUCUUUAUUCCUGAA | 2720 | UUCAGGAAUAAAGACAGUAAAAA | 3270 |
| AD-2138961.2 | UACUGUCUUUAUUCCUGACAA | 2721 | UUGUCAGGAAUAAAGACAGUAAA | 3271 |
| AD-2138962.2 | ACUGUCUUUAUUCCUGACACA | 2722 | UGUGUCAGGAAUAAAGACAGUAA | 3272 |
| AD-2138963.2 | CUGUCUUUAUUCCUGACACUA | 2723 | UAGUGUCAGGAAUAAAGACAGUA | 3273 |
| AD-2138964.2 | GUCUUUAUUCCUGACACUGAA | 2724 | UUCAGUGUCAGGAAUAAAGACAG | 3274 |
| AD-2138965.2 | GACACUGAGAUGAAUGUUUUA | 2725 | UAAAACAUUCAUCUCAGUGUCAG | 3275 |
| AD-2138966.2 | ACACUGAGAUGAAUGUUUUCA | 2726 | UGAAAACAUUCAUCUCAGUGUCA | 3276 |
| AD-2138967.2 | CACUGAGAUGAAUGUUUUCAA | 2727 | UUGAAAACAUUCAUCUCAGUGUC | 3277 |
| AD-2138968.2 | ACUGAGAUGAAUGUUUUCAAA | 2728 | UUUGAAAACAUUCAUCUCAGUGU | 3278 |
| AD-2138969.2 | CUGAGAUGAAUGUUUUCAAAA | 2729 | UUUUGAAAACAUUCAUCUCAGUG | 3279 |
| AD-2138970.2 | UGAGAUGAAUGUUUUCAAAGA | 2730 | UCUUUGAAAACAUUCAUCUCAGU | 3280 |
| AD-2138971.2 | GAGAUGAAUGUUUUCAAAGCA | 2731 | UGCUUUGAAAACAUUCAUCUCAG | 3281 |
| AD-2138972.2 | AGAUGAAUGUUUUCAAAGCUA | 2732 | UAGCUUUGAAAACAUUCAUCUCA | 3282 |
| AD-2138973.2 | AAUGUUUUCAAAGCUGCAACA | 2733 | UGUUGCAGCUUUGAAAACAUUCA | 3283 |
| AD-2138974.2 | AUGUUUUCAAAGCUGCAACAA | 2734 | UUGUUGCAGCUUUGAAAACAUUC | 3284 |
| AD-2138975.2 | UGUUUUCAAAGCUGCAACAUA | 2735 | UAUGUUGCAGCUUUGAAAACAUU | 3285 |
| AD-2138976.2 | GUUUUCAAAGCUGCAACAUGA | 2736 | UCAUGUUGCAGCUUUGAAAACAU | 3286 |
| AD-2138977.2 | AACCGAUUCUGUUAUUGGGAA | 2737 | UUCCCAAUAACAGAAUCGGUUUG | 3287 |
| AD-2138978.2 | ACCGAUUCUGUUAUUGGGAAA | 2738 | UUUCCCAAUAACAGAAUCGGUUU | 3288 |
| AD-2138979.2 | CCGAUUCUGUUAUUGGGAAUA | 2739 | UAUUCCCAAUAACAGAAUCGGUU | 3289 |
| AD-2138980.2 | CGAUUCUGUUAUUGGGAAUGA | 2740 | UCAUUCCCAAUAACAGAAUCGGU | 3290 |
| AD-2138981.2 | GAUUCUGUUAUUGGGAAUGAA | 2741 | UUCAUUCCCAAUAACAGAAUCGG | 3291 |
| AD-2138982.2 | AUUCUGUUAUUGGGAAUGAAA | 2742 | UUUCAUUCCCAAUAACAGAAUCG | 3292 |
| AD-2138983.2 | UUCUGUUAUUGGGAAUGAAAA | 2743 | UUUUCAUUCCCAAUAACAGAAUC | 3293 |
| AD-2138984.2 | UCUGUUAUUGGGAAUGAAAUA | 2744 | UAUUUCAUUCCCAAUAACAGAAU | 3294 |
| AD-2138985.2 | CUGUUAUUGGGAAUGAAAUCA | 2745 | UGAUUUCAUUCCCAAUAACAGAA | 3295 |
| AD-2138986.2 | UGUUAUUGGGAAUGAAAUCUA | 2746 | UAGAUUUCAUUCCCAAUAACAGA | 3296 |
| AD-2138987.2 | GUUAUUGGGAAUGAAAUCUGA | 2747 | UCAGAUUUCAUUCCCAAUAACAG | 3297 |
| AD-2138988.2 | UUAUUGGGAAUGAAAUCUGUA | 2748 | UACAGAUUUCAUUCCCAAUAACA | 3298 |
| AD-2138989.2 | AUUGGGAAUGAAAUCUGUCAA | 2749 | UUGACAGAUUUCAUUCCCAAUAA | 3299 |
| AD-2138990.2 | AGAGCUGUAUAUGAUGGAGUA | 2750 | UACUCCAUCAUAUACAGCUCUCU | 3300 |
| AD-2138991.2 | GCUGUAUAUGAUGGAGUGAAA | 2751 | UUUCACUCCAUCAUAUACAGCUC | 3301 |
| AD-2138992.2 | GGAUGUGUAACACAAGACCAA | 2752 | UUGGUCUUGUGUUACACAUCCAU | 3302 |
| AD-2138993.2 | GAUGUGUAACACAAGACCAAA | 2753 | UUUGGUCUUGUGUUACACAUCCA | 3303 |
| AD-2138994.2 | GUGUAACACAAGACCAACUGA | 2754 | UCAGUUGGUCUUGUGUUACACAU | 3304 |
| AD-2138995.2 | UGUAACACAAGACCAACUGAA | 2755 | UUCAGUUGGUCUUGUGUUACACA | 3305 |
| AD-2138996.2 | UAACACAAGACCAACUGAGAA | 2756 | UUCUCAGUUGGUCUUGUGUUACA | 3306 |
| AD-2138997.2 | AACUGAGAGUCUGAAUGUUAA | 2757 | UUAACAUUCAGACUCUCAGUUGG | 3307 |
| AD-2138998.2 | ACUGAGAGUCUGAAUGUUAUA | 2758 | UAUAACAUUCAGACUCUCAGUUG | 3308 |
| AD-2138999.2 | CUGAGAGUCUGAAUGUUAUUA | 2759 | UAAUAACAUUCAGACUCUCAGUU | 3309 |
| AD-2139000.2 | GAGAGUCUGAAUGUUAUUCUA | 2760 | UAGAAUAACAUUCAGACUCUCAG | 3310 |
| AD-2139001.2 | GAGUCUGAAUGUUAUUCUGGA | 2761 | UCCAGAAUAACAUUCAGACUCUC | 3311 |
| AD-2139002.2 | UGCCAAGAGCAUGUAAAUGAA | 2762 | UUCAUUUACAUGCUCUUGGCACC | 3312 |
| AD-2139003.2 | GCCAAGAGCAUGUAAAUGAAA | 2763 | UUUCAUUUACAUGCUCUUGGCAC | 3313 |
| AD-2139004.2 | CCAAGAGCAUGUAAAUGAACA | 2764 | UGUUCAUUUACAUGCUCUUGGCA | 3314 |
| AD-2139005.2 | CAAGAGCAUGUAAAUGAACAA | 2765 | UUGUUCAUUUACAUGCUCUUGGC | 3315 |
| AD-2139006.2 | AAGAGCAUGUAAAUGAACAAA | 2766 | UUUGUUCAUUUACAUGCUCUUGG | 3316 |
| AD-2139007.2 | AGAGCAUGUAAAUGAACAACA | 2767 | UGUUGUUCAUUUACAUGCUCUUG | 3317 |
| AD-2139008.2 | GAGCAUGUAAAUGAACAACAA | 2768 | UUGUUGUUCAUUUACAUGCUCUU | 3318 |
| AD-2139009.2 | AGCAUGUAAAUGAACAACAAA | 2769 | UUUGUUGUUCAUUUACAUGCUCU | 3319 |
| AD-2139010.2 | GCAUGUAAAUGAACAACAAGA | 2770 | UCUUGUUGUUCAUUUACAUGCUC | 3320 |
| AD-2139011.2 | CAUGUAAAUGAACAACAAGCA | 2771 | UGCUUGUUGUUCAUUUACAUGCU | 3321 |
| AD-2139012.2 | AUGUAAAUGAACAACAAGCAA | 2772 | UUGCUUGUUGUUCAUUUACAUGC | 3322 |
| AD-2139013.2 | UGUAAAUGAACAACAAGCAAA | 2773 | UUUGCUUGUUGUUCAUUUACAUG | 3323 |
| AD-2139014.2 | GUAAAUGAACAACAAGCAAAA | 2774 | UUUUGCUUGUUGUUCAUUUACAU | 3324 |
| AD-2139015.2 | UAAAUGAACAACAAGCAAAUA | 2775 | UAUUUGCUUGUUGUUCAUUUACA | 3325 |
| AD-2139016.2 | AAAUGAACAACAAGCAAAUAA | 2776 | UUAUUUGCUUGUUGUUCAUUUAC | 3326 |
| AD-2139017.2 | AAUGAACAACAAGCAAAUAUA | 2777 | UAUAUUUGCUUGUUGUUCAUUUA | 3327 |
| AD-2139018.2 | AUGAACAACAAGCAAAUAUUA | 2778 | UAAUAUUUGCUUGUUGUUCAUUU | 3328 |
| AD-2139019.2 | UGAACAACAAGCAAAUAUUGA | 2779 | UCAAUAUUUGCUUGUUGUUCAUU | 3329 |
| AD-2139020.2 | GAACAACAAGCAAAUAUUGAA | 2780 | UUCAAUAUUUGCUUGUUGUUCAU | 3330 |
| AD-2139021.2 | AACAACAAGCAAAUAUUGAAA | 2781 | UUUCAAUAUUUGCUUGUUGUUCA | 3331 |
| AD-2139022.2 | ACAACAAGCAAAUAUUGAAGA | 2782 | UCUUCAAUAUUUGCUUGUUGUUC | 3332 |
| AD-2139023.2 | CAACAAGCAAAUAUUGAAGGA | 2783 | UCCUUCAAUAUUUGCUUGUUGUU | 3333 |
| AD-2139024.2 | AACAAGCAAAUAUUGAAGGUA | 2784 | UACCUUCAAUAUUUGCUUGUUGU | 3334 |
| AD-2139025.2 | ACAAGCAAAUAUUGAAGGUGA | 2785 | UCACCUUCAAUAUUUGCUUGUUG | 3335 |
| AD-2139026.2 | CACUUAUUUCCCAUUGCUAAA | 2786 | UUUAGCAAUGGGAAAUAAGUGGU | 3336 |
| AD-2139027.2 | ACUUAUUUCCCAUUGCUAAUA | 2787 | UAUUAGCAAUGGGAAAUAAGUGG | 3337 |
| AD-2139028.2 | CUUAUUUCCCAUUGCUAAUUA | 2788 | UAAUUAGCAAUGGGAAAUAAGUG | 3338 |
| AD-2139029.2 | UUAUUUCCCAUUGCUAAUUGA | 2789 | UCAAUUAGCAAUGGGAAAUAAGU | 3339 |
| AD-2139030.2 | AUUUCCCAUUGCUAAUUGCCA | 2790 | UGGCAAUUAGCAAUGGGAAAUAA | 3340 |
| AD-2139031.2 | GCCUGCCCGGUUUUGAAACAA | 2791 | UUGUUUCAAAACCGGGCAGGCAA | 3341 |
| AD-2139032.2 | UUUUGAAACAGUCUGCAGUAA | 2792 | UUACUGCAGACUGUUUCAAAACC | 3342 |
| AD-2139033.2 | UUGAAACAGUCUGCAGUACAA | 2793 | UUGUACUGCAGACUGUUUCAAAA | 3343 |
| AD-2139034.2 | GUGGGAGAGAUACAUGUUUAA | 2794 | UUAAACAUGUAUCUCUCCCACAG | 3344 |
| AD-2139035.2 | GGGAGAGAUACAUGUUUAGAA | 2795 | UUCUAAACAUGUAUCUCUCCCAC | 3345 |
| AD-2139036.2 | GGAGAGAUACAUGUUUAGAAA | 2796 | UUUCUAAACAUGUAUCUCUCCCA | 3346 |
| AD-2139037.2 | GAGAGAUACAUGUUUAGAAGA | 2797 | UCUUCUAAACAUGUAUCUCUCCC | 3347 |
| AD-2139038.2 | GAGAUACAUGUUUAGAAGGAA | 2798 | UUCCUUCUAAACAUGUAUCUCUC | 3348 |
| AD-2139039.2 | AGAUACAUGUUUAGAAGGAAA | 2799 | UUUCCUUCUAAACAUGUAUCUCU | 3349 |
| AD-2139040.2 | GAUACAUGUUUAGAAGGAAGA | 2800 | UCUUCCUUCUAAACAUGUAUCUC | 3350 |
| AD-2139041.2 | AUACAUGUUUAGAAGGAAGAA | 2801 | UUCUUCCUUCUAAACAUGUAUCU | 3351 |
| AD-2139042.2 | CAUGUUUAGAAGGAAGAGAAA | 2802 | UUUCUCUUCCUUCUAAACAUGUA | 3352 |
| AD-2139043.2 | UGUUUAGAAGGAAGAGAAAGA | 2803 | UCUUUCUCUUCCUUCUAAACAUG | 3353 |
| AD-2139044.2 | GUUUAGAAGGAAGAGAAAGGA | 2804 | UCCUUUCUCUUCCUUCUAAACAU | 3354 |
| AD-2139045.2 | UUAGAAGGAAGAGAAAGGACA | 2805 | UGUCCUUUCUCUUCCUUCUAAAC | 3355 |
| AD-2139046.2 | UAGAAGGAAGAGAAAGGACAA | 2806 | UUGUCCUUUCUCUUCCUUCUAAA | 3356 |
| AD-2139047.2 | AGAAGGAAGAGAAAGGACAAA | 2807 | UUUGUCCUUUCUCUUCCUUCUAA | 3357 |
| AD-2139048.2 | GAAGGAAGAGAAAGGACAAAA | 2808 | UUUUGUCCUUUCUCUUCCUUCUA | 3358 |
| AD-2139049.2 | AAGGCACACGUUUUACCAUUA | 2809 | UAAUGGUAAAACGUGUGCCUUUG | 3359 |
| AD-2139050.2 | AGGCACACGUUUUACCAUUUA | 2810 | UAAAUGGUAAAACGUGUGCCUUU | 3360 |
| AD-2139051.2 | GGCACACGUUUUACCAUUUAA | 2811 | UUAAAUGGUAAAACGUGUGCCUU | 3361 |
| AD-2139052.2 | GCACACGUUUUACCAUUUAAA | 2812 | UUUAAAUGGUAAAACGUGUGCCU | 3362 |
| AD-2139053.2 | CACACGUUUUACCAUUUAAAA | 2813 | UUUUAAAUGGUAAAACGUGUGCC | 3363 |
| AD-2139054.2 | ACACGUUUUACCAUUUAAAAA | 2814 | UUUUUAAAUGGUAAAACGUGUGC | 3364 |
| AD-2139055.2 | CACGUUUUACCAUUUAAAAUA | 2815 | UAUUUUAAAUGGUAAAACGUGUG | 3365 |
| AD-2139056.2 | ACGUUUUACCAUUUAAAAUAA | 2816 | UUAUUUUAAAUGGUAAAACGUGU | 3366 |
| AD-2139057.2 | CGUUUUACCAUUUAAAAUAUA | 2817 | UAUAUUUUAAAUGGUAAAACGUG | 3367 |
| AD-2139058.2 | GUUUUACCAUUUAAAAUAUUA | 2818 | UAAUAUUUUAAAUGGUAAAACGU | 3368 |
| AD-2139059.2 | UUUUACCAUUUAAAAUAUUGA | 2819 | UCAAUAUUUUAAAUGGUAAAACG | 3369 |
| AD-2139060.2 | UUUACCAUUUAAAAUAUUGUA | 2820 | UACAAUAUUUUAAAUGGUAAAAC | 3370 |
| AD-2139061.2 | UUUAAAAUAUUGUUACCAAAA | 2821 | UUUUGGUAACAAUAUUUUAAAUG | 3371 |
| AD-2139062.2 | UUAAAAUAUUGUUACCAAACA | 2822 | UGUUUGGUAACAAUAUUUUAAAU | 3372 |
| AD-2139063.2 | UAAAAUAUUGUUACCAAACAA | 2823 | UUGUUUGGUAACAAUAUUUUAAA | 3373 |
| AD-2139064.2 | AAAAUAUUGUUACCAAACAAA | 2824 | UUUGUUUGGUAACAAUAUUUUAA | 3374 |
| AD-2139065.2 | AAAUAUUGUUACCAAACAAAA | 2825 | UUUUGUUUGGUAACAAUAUUUUA | 3375 |
| AD-2139066.2 | AAUAUUGUUACCAAACAAAAA | 2826 | UUUUUGUUUGGUAACAAUAUUUU | 3376 |
| AD-2139067.2 | AUAUUGUUACCAAACAAAAAA | 2827 | UUUUUUGUUUGGUAACAAUAUUU | 3377 |
| AD-2139068.2 | UAUUGUUACCAAACAAAAAUA | 2828 | UAUUUUUGUUUGGUAACAAUAUU | 3378 |
| AD-2139069.2 | AUUGUUACCAAACAAAAAUAA | 2829 | UUAUUUUUGUUUGGUAACAAUAU | 3379 |
| AD-2139070.2 | UUGUUACCAAACAAAAAUAUA | 2830 | UAUAUUUUUGUUUGGUAACAAUA | 3380 |
| AD-2139071.2 | UGUUACCAAACAAAAAUAUCA | 2831 | UGAUAUUUUUGUUUGGUAACAAU | 3381 |
| AD-2139072.2 | GUUACCAAACAAAAAUAUCCA | 2832 | UGGAUAUUUUUGUUUGGUAACAA | 3382 |
| AD-2139073.2 | UUACCAAACAAAAAUAUCCAA | 2833 | UUGGAUAUUUUUGUUUGGUAACA | 3383 |
| AD-2139074.2 | UACCAAACAAAAAUAUCCAUA | 2834 | UAUGGAUAUUUUUGUUUGGUAAC | 3384 |
| AD-2139075.2 | CCAAACAAAAAUAUCCAUUCA | 2835 | UGAAUGGAUAUUUUUGUUUGGUA | 3385 |
| AD-2139076.2 | CAAACAAAAAUAUCCAUUCAA | 2836 | UUGAAUGGAUAUUUUUGUUUGGU | 3386 |
| AD-2139077.2 | AAACAAAAAUAUCCAUUCAAA | 2837 | UUUGAAUGGAUAUUUUUGUUUGG | 3387 |
| AD-2139078.2 | AAAAUAUCCAUUCAAAAUACA | 2838 | UGUAUUUUGAAUGGAUAUUUUUG | 3388 |
| AD-2139079.2 | AAAUAUCCAUUCAAAAUACAA | 2839 | UUGUAUUUUGAAUGGAUAUUUUU | 3389 |
| AD-2139080.2 | AAUAUCCAUUCAAAAUACAAA | 2840 | UUUGUAUUUUGAAUGGAUAUUUU | 3390 |
| AD-2139081.2 | AUAUCCAUUCAAAAUACAAUA | 2841 | UAUUGUAUUUUGAAUGGAUAUUU | 3391 |
| AD-2139082.2 | UAUCCAUUCAAAAUACAAUUA | 2842 | UAAUUGUAUUUUGAAUGGAUAUU | 3392 |
| AD-2139083.2 | AUCCAUUCAAAAUACAAUUUA | 2843 | UAAAUUGUAUUUUGAAUGGAUAU | 3393 |
| AD-2139084.2 | UCCAUUCAAAAUACAAUUUAA | 2844 | UUAAAUUGUAUUUUGAAUGGAUA | 3394 |
| AD-2139085.2 | CCAUUCAAAAUACAAUUUAAA | 2845 | UUUAAAUUGUAUUUUGAAUGGAU | 3395 |
| AD-2139086.2 | CAUUCAAAAUACAAUUUAACA | 2846 | UGUUAAAUUGUAUUUUGAAUGGA | 3396 |
| AD-2139087.2 | AUUCAAAAUACAAUUUAACAA | 2847 | UUGUUAAAUUGUAUUUUGAAUGG | 3397 |
| AD-2139088.2 | UUCAAAAUACAAUUUAACAAA | 2848 | UUUGUUAAAUUGUAUUUUGAAUG | 3398 |
| AD-2139089.2 | UCAAAAUACAAUUUAACAAUA | 2849 | UAUUGUUAAAUUGUAUUUUGAAU | 3399 |
| AD-2139090.2 | CAAUUUAACAAUGCAACAGUA | 2850 | UACUGUUGCAUUGUUAAAUUGUA | 3400 |
| AD-2139091.2 | UCAUCUUACAGCAGAGAAAUA | 2851 | UAUUUCUCUGCUGUAAGAUGACU | 3401 |
| AD-2139092.2 | CAUCUUACAGCAGAGAAAUGA | 2852 | UCAUUUCUCUGCUGUAAGAUGAC | 3402 |
| AD-2139093.2 | AUCUUACAGCAGAGAAAUGCA | 2853 | UGCAUUUCUCUGCUGUAAGAUGA | 3403 |
| AD-2139094.2 | UCUUACAGCAGAGAAAUGCAA | 2854 | UUGCAUUUCUCUGCUGUAAGAUG | 3404 |
| AD-2139095.2 | CUUACAGCAGAGAAAUGCAGA | 2855 | UCUGCAUUUCUCUGCUGUAAGAU | 3405 |
| AD-2139096.2 | UUACAGCAGAGAAAUGCAGAA | 2856 | UUCUGCAUUUCUCUGCUGUAAGA | 3406 |
| AD-2139097.2 | UACAGCAGAGAAAUGCAGAGA | 2857 | UCUCUGCAUUUCUCUGCUGUAAG | 3407 |
| AD-2139098.2 | ACAGCAGAGAAAUGCAGAGAA | 2858 | UUCUCUGCAUUUCUCUGCUGUAA | 3408 |
| AD-2139099.2 | CAGCAGAGAAAUGCAGAGAAA | 2859 | UUUCUCUGCAUUUCUCUGCUGUA | 3409 |
| AD-2139100.2 | AGCAGAGAAAUGCAGAGAAAA | 2860 | UUUUCUCUGCAUUUCUCUGCUGU | 3410 |
| AD-2139101.2 | GCAGAGAAAUGCAGAGAAAAA | 2861 | UUUUUCUCUGCAUUUCUCUGCUG | 3411 |
| AD-2139102.2 | CAGAGAAAUGCAGAGAAAAGA | 2862 | UCUUUUCUCUGCAUUUCUCUGCU | 3412 |
| AD-2139103.2 | AGAGAAAUGCAGAGAAAAGCA | 2863 | UGCUUUUCUCUGCAUUUCUCUGC | 3413 |
| AD-2139104.2 | GAGAAAUGCAGAGAAAAGCAA | 2864 | UUGCUUUUCUCUGCAUUUCUCUG | 3414 |
| AD-2139105.2 | AGAAAUGCAGAGAAAAGCAAA | 2865 | UUUGCUUUUCUCUGCAUUUCUCU | 3415 |
| AD-2139106.2 | GAAAUGCAGAGAAAAGCAAAA | 2866 | UUUUGCUUUUCUCUGCAUUUCUC | 3416 |
| AD-2139107.2 | AAAUGCAGAGAAAAGCAAAAA | 2867 | UUUUUGCUUUUCUCUGCAUUUCU | 3417 |
| AD-2139108.2 | AAUGCAGAGAAAAGCAAAACA | 2868 | UGUUUUGCUUUUCUCUGCAUUUC | 3418 |
| AD-2139109.2 | AUGCAGAGAAAAGCAAAACUA | 2869 | UAGUUUUGCUUUUCUCUGCAUUU | 3419 |
| AD-2139110.2 | UGCAGAGAAAAGCAAAACUGA | 2870 | UCAGUUUUGCUUUUCUCUGCAUU | 3420 |
| AD-2139111.2 | GCAGAGAAAAGCAAAACUGCA | 2871 | UGCAGUUUUGCUUUUCUCUGCAU | 3421 |
| AD-2139112.2 | CAGAGAAAAGCAAAACUGCAA | 2872 | UUGCAGUUUUGCUUUUCUCUGCA | 3422 |
| AD-2139113.2 | AGAGAAAAGCAAAACUGCAAA | 2873 | UUUGCAGUUUUGCUUUUCUCUGC | 3423 |
| AD-2139114.2 | AGAAAAGCAAAACUGCAAGUA | 2874 | UACUUGCAGUUUUGCUUUUCUCU | 3424 |
| AD-2139115.2 | AAAAGCAAAACUGCAAGUGAA | 2875 | UUCACUUGCAGUUUUGCUUUUCU | 3425 |
| AD-2139116.2 | AAAGCAAAACUGCAAGUGACA | 2876 | UGUCACUUGCAGUUUUGCUUUUC | 3426 |
| AD-2139117.2 | AAGCAAAACUGCAAGUGACUA | 2877 | UAGUCACUUGCAGUUUUGCUUUU | 3427 |
| AD-2139118.2 | AAACUGCAAGUGACUGUGAAA | 2878 | UUUCACAGUCACUUGCAGUUUUG | 3428 |
| AD-2139119.2 | AACUGCAAGUGACUGUGAAUA | 2879 | UAUUCACAGUCACUUGCAGUUUU | 3429 |
| AD-2139120.2 | ACUGCAAGUGACUGUGAAUAA | 2880 | UUAUUCACAGUCACUUGCAGUUU | 3430 |
| AD-2139121.2 | CUGCAAGUGACUGUGAAUAAA | 2881 | UUUAUUCACAGUCACUUGCAGUU | 3431 |
| AD-2139122.2 | UGCAAGUGACUGUGAAUAAAA | 2882 | UUUUAUUCACAGUCACUUGCAGU | 3432 |
| AD-2139123.2 | GCAAGUGACUGUGAAUAAAGA | 2883 | UCUUUAUUCACAGUCACUUGCAG | 3433 |
| AD-2139124.2 | CAAGUGACUGUGAAUAAAGGA | 2884 | UCCUUUAUUCACAGUCACUUGCA | 3434 |
| AD-2139125.2 | GACUGUGAAUAAAGGGUGAAA | 2885 | UUUCACCCUUUAUUCACAGUCAC | 3435 |
| AD-2139126.2 | ACUGUGAAUAAAGGGUGAAUA | 2886 | UAUUCACCCUUUAUUCACAGUCA | 3436 |
| AD-2139128.2 | GUGAAUAAAGGGUGAAUGUAA | 2887 | UUACAUUCACCCUUUAUUCACAG | 3437 |
| AD-2139129.2 | UGAAUAAAGGGUGAAUGUAGA | 2888 | UCUACAUUCACCCUUUAUUCACA | 3438 |
| AD-2139130.2 | GAAUAAAGGGUGAAUGUAGUA | 2889 | UACUACAUUCACCCUUUAUUCAC | 3439 |
| AD-2139131.2 | UAAAGGGUGAAUGUAGUCUCA | 2890 | UGAGACUACAUUCACCCUUUAUU | 3440 |
| AD-2139132.2 | AAGGGUGAAUGUAGUCUCAAA | 2891 | UUUGAGACUACAUUCACCCUUUA | 3441 |
| AD-2139133.2 | AGGGUGAAUGUAGUCUCAAAA | 2892 | UUUUGAGACUACAUUCACCCUUU | 3442 |
| AD-2139134.2 | AUCCUCAAAGAGCUGUGUUUA | 2893 | UAAACACAGCUCUUUGAGGAUUU | 3443 |
| AD-2139135.2 | UCCUCAAAGAGCUGUGUUUAA | 2894 | UUAAACACAGCUCUUUGAGGAUU | 3444 |
| AD-2139136.2 | CCUCAAAGAGCUGUGUUUAUA | 2895 | UAUAAACACAGCUCUUUGAGGAU | 3445 |
| AD-2139137.2 | CUCAAAGAGCUGUGUUUAUUA | 2896 | UAAUAAACACAGCUCUUUGAGGA | 3446 |
| AD-2139138.2 | UCAAAGAGCUGUGUUUAUUUA | 2897 | UAAAUAAACACAGCUCUUUGAGG | 3447 |
| AD-2139139.2 | CAAAGAGCUGUGUUUAUUUCA | 2898 | UGAAAUAAACACAGCUCUUUGAG | 3448 |
| AD-2139140.2 | AAAGAGCUGUGUUUAUUUCAA | 2899 | UUGAAAUAAACACAGCUCUUUGA | 3449 |
| AD-2139141.2 | AGCUGUGUUUAUUUCAUUGAA | 2900 | UUCAAUGAAAUAAACACAGCUCU | 3450 |
| AD-2139142.2 | GCUGUGUUUAUUUCAUUGACA | 2901 | UGUCAAUGAAAUAAACACAGCUC | 3451 |
| AD-2139143.2 | GUGUUUAUUUCAUUGACAAAA | 2902 | UUUUGUCAAUGAAAUAAACACAG | 3452 |
| AD-2139144.2 | AUUUCAUUGACAAAUAGAUUA | 2903 | UAAUCUAUUUGUCAAUGAAAUAA | 3453 |
| AD-2139145.2 | UUUCAUUGACAAAUAGAUUAA | 2904 | UUAAUCUAUUUGUCAAUGAAAUA | 3454 |
| AD-2139146.2 | UUCAUUGACAAAUAGAUUAUA | 2905 | UAUAAUCUAUUUGUCAAUGAAAU | 3455 |
| AD-2139147.2 | UCAUUGACAAAUAGAUUAUUA | 2906 | UAAUAAUCUAUUUGUCAAUGAAA | 3456 |
| AD-2139148.2 | CAUUGACAAAUAGAUUAUUUA | 2907 | UAAAUAAUCUAUUUGUCAAUGAA | 3457 |
| AD-2139149.2 | AUUGACAAAUAGAUUAUUUGA | 2908 | UCAAAUAAUCUAUUUGUCAAUGA | 3458 |
| AD-2139150.2 | UUGACAAAUAGAUUAUUUGUA | 2909 | UACAAAUAAUCUAUUUGUCAAUG | 3459 |
| AD-2139151.2 | UGACAAAUAGAUUAUUUGUAA | 2910 | UUACAAAUAAUCUAUUUGUCAAU | 3460 |
| AD-2139152.2 | GACAAAUAGAUUAUUUGUAUA | 2911 | UAUACAAAUAAUCUAUUUGUCAA | 3461 |
| AD-2139153.2 | ACAAAUAGAUUAUUUGUAUUA | 2912 | UAAUACAAAUAAUCUAUUUGUCA | 3462 |
| AD-2139154.2 | CAAAUAGAUUAUUUGUAUUCA | 2913 | UGAAUACAAAUAAUCUAUUUGUC | 3463 |
| AD-2139155.2 | AAAUAGAUUAUUUGUAUUCAA | 2914 | UUGAAUACAAAUAAUCUAUUUGU | 3464 |

TABLE 8B
Additional Modified Sense and Antisense Strands of Human PLG dsRNA Agents

| | | SEQ ID | | SEQ ID |
|---|---|---|---|---|
| Duplex ID | Sense Sequence | NO | Antisense Sequence | NO |
| AD-2138040.1 | ggacccAfcUfUfUfcugggcacua | 3465 | PuAfgugCfccagaaaGfuGfgguccca | 4565 |
| AD-2138041.1 | gacccaCfuUfUfCfugggcacuga | 3466 | PuCfaguGfcccagaaAfgUfggguccc | 4566 |
| AD-2138042.1 | acccacUfuUfCfUfgggcacugca | 3467 | PuGfcagUfgcccagaAfaGfugggucc | 4567 |
| AD-2138043.1 | caguccCfaAfAfAfuggaacauaa | 3468 | PuUfaugUfuccauuuUfgGfgacuggc | 4568 |
| AD-2138044.1 | agucccAfaAfAfUfggaacauaaa | 3469 | PuUfuauGfuuccauuUfuGfggacugg | 4569 |
| AD-2138045.1 | gucccaAfaAfUfGfgaacauaaga | 3470 | PuCfuuaUfguuccauUfuUfgggacug | 4570 |
| AD-2138046.1 | ucccaaAfaUfGfGfaacauaagga | 3471 | PuCfcuuAfuguuccaUfuUfugggacu | 4571 |
| AD-2138047.1 | cccaaaAfuGfGfAfacauaaggaa | 3472 | PuUfccuUfauguuccAfuUfuugggac | 4572 |
| AD-2138048.1 | ccaaaaUfgGfAfAfcauaaggaaa | 3473 | PuUfuccUfuauguucCfaUfuuuggga | 4573 |
| AD-2138049.1 | caaaauGfgAfAfCfauaaggaaga | 3474 | PuCfuucCfuuauguuCfcAfuuuuggg | 4574 |
| AD-2138050.1 | aaaaugGfaAfCfAfuaaggaagua | 3475 | PuAfcuuCfcuuauguUfcCfauuuugg | 4575 |
| AD-2138051.1 | aaauggAfaCfAfUfaaggaaguga | 3476 | PuCfacuUfccuuaugUfuCfcauuuug | 4576 |
| AD-2138052.1 | aauggaAfcAfUfAfaggaagugga | 3477 | PuCfcacUfuccuuauGfuUfccauuuu | 4577 |
| AD-2138053.1 | auggaaCfaUfAfAfggaaguggua | 3478 | PuAfccaCfuuccuuaUfgUfuccauuu | 4578 |
| AD-2138054.1 | uggaacAfuAfAfGfgaagugguua | 3479 | PuAfaccAfcuuccuuAfuGfuuccauu | 4579 |
| AD-2138055.1 | ccucugGfaUfGfAfcuaugugaaa | 3480 | PuUfucaCfauagucaUfcCfagaggcu | 4580 |
| AD-2138056.1 | uaagaaGfcAfGfCfugggagcaga | 3481 | PuCfugcUfcccagcuGfcUfucuuagu | 4581 |
| AD-2138057.1 | agcagcUfgGfGfAfgcaggaagua | 3482 | PuAfcuuCfcugcuccCfaGfcugcuuc | 4582 |
| AD-2138059.1 | agcuggGfaGfCfAfggaaguauaa | 3483 | PuUfauaCfuuccugcUfcCfcagcugc | 4583 |
| AD-2138060.1 | cugggaGfcAfGfGfaaguauagaa | 3484 | PuUfcuaUfacuuccuGfcUfcccagcu | 4584 |
| AD-2138061.1 | ugggagCfaGfGfAfaguauagaaa | 3485 | PuUfucuAfuacuuccUfgCfucccagc | 4585 |
| AD-2138062.1 | gggagcAfgGfAfAfguauagaaga | 3486 | PuCfuucUfauacuucCfuGfcucccag | 4586 |
| AD-2138063.1 | ggagcaGfgAfAfGfuauagaagaa | 3487 | PuUfcuuCfuauacuuCfcUfgcuccca | 4587 |
| AD-2138064.1 | gagcagGfaAfGfUfauagaagaaa | 3488 | PuUfucuUfcuauacuUfcCfugcuccc | 4588 |
| AD-2138065.1 | agcaggAfaGfUfAfuagaagaaua | 3489 | PuAfuucUfucuauacUfuCfcugcucc | 4589 |
| AD-2138066.1 | gcaggaAfgUfAfUfagaagaauga | 3490 | PuCfauuCfuucuauaCfuUfccugcuc | 4590 |
| AD-2138067.1 | caggaaGfuAfUfAfgaagaaugua | 3491 | PuAfcauUfcuucuauAfcUfuccugcu | 4591 |
| AD-2138068.1 | aggaagUfaUfAfGfaagaauguga | 3492 | PuCfacaUfucuucuaUfaCfuuccugc | 4592 |
| AD-2138069.1 | ggaaguAfuAfGfAfagaaugugca | 3493 | PuGfcacAfuucuucuAfuAfcuuccug | 4593 |
| AD-2138070.1 | gaaguaUfaGfAfAfgaaugugcaa | 3494 | PuUfgcaCfauucuucUfaUfacuuccu | 4594 |
| AD-2138071.1 | aaguauAfgAfAfGfaaugugcaga | 3495 | PuCfugcAfcauucuuCfuAfuacuucc | 4595 |
| AD-2138072.1 | aguauaGfaAfGfAfaugugcagca | 3496 | PuGfcugCfacauucuUfcUfauacuuc | 4596 |
| AD-2138073.1 | guauagAfaGfAfAfugugcagcaa | 3497 | PuUfgcuGfcacauucUfuCfuauacuu | 4597 |
| AD-2138074.1 | uauagaAfgAfAfUfgugcagcaaa | 3498 | PuUfugcUfgcacauuCfuUfcuauacu | 4598 |
| AD-2138075.1 | uccaauAfuCfAfCfaguaaagaga | 3499 | PuCfucuUfuacugugAfuAfuuggaau | 4599 |
| AD-2138076.1 | ccaauaUfcAfCfAfguaaagagca | 3500 | PuGfcucUfuuacuguGfaUfauuggaa | 4600 |
| AD-2138077.1 | caauauCfaCfAfGfuaaagagcaa | 3501 | PuUfgcuCfuuuacugUfgAfuauugga | 4601 |
| AD-2138078.1 | aauaucAfcAfGfUfaaagagcaaa | 3502 | PuUfugcUfcuuuacuGfuGfauauugg | 4602 |
| AD-2138079.1 | auaucaCfaGfUfAfaagagcaaca | 3503 | PuGfuugCfucuuuacUfgUfgauauug | 4603 |
| AD-2138080.1 | uaucacAfgUfAfAfagagcaacaa | 3504 | PuUfguuGfcucuuuaCfuGfugauauu | 4604 |
| AD-2138081.1 | aucacaGfuAfAfAfgagcaacaaa | 3505 | PuUfuguUfgcucuuuAfcUfgugauau | 4605 |
| AD-2138082.1 | ucacagUfaAfAfGfagcaacaaua | 3506 | PuAfuugUfugcucuuUfaCfugugaua | 4606 |
| AD-2138083.1 | cacaguAfaAfGfAfgcaacaauga | 3507 | PuCfauuGfuugcucuUfuAfcugugau | 4607 |
| AD-2138084.1 | acaguaAfaGfAfGfcaacaaugua | 3508 | PuAfcauUfguugcucUfuUfacuguga | 4608 |
| AD-2138085.1 | caguaaAfgAfGfCfaacaauguga | 3509 | PuCfacaUfuguugcuCfuUfuacugug | 4609 |
| AD-2138086.1 | aguaaaGfaGfCfAfacaaugugua | 3510 | PuAfcacAfuuguugcUfcUfuuacugu | 4610 |
| AD-2138087.1 | ggaugaGfaGfAfUfguaguuuuaa | 3511 | PuUfaaaAfcuacaucUfcUfcauccua | 4611 |
| AD-2138088.1 | gaugagAfgAfUfGfuaguuuuaua | 3512 | PuAfuaaAfacuacauCfuCfucauccu | 4612 |
| AD-2138089.1 | augagaGfaUfGfUfaguuuuauua | 3513 | PuAfauaAfaacuacaUfcUfcucaucc | 4613 |
| AD-2138090.1 | ugagagAfuGfUfAfguuuuauuua | 3514 | PuAfaauAfaaacuacAfuCfucucauc | 4614 |
| AD-2138091.1 | gagagaUfgUfAfGfuuuuauuuga | 3515 | PuCfaaaUfaaaacuaCfaUfcucucau | 4615 |
| AD-2138092.1 | agagauGfuAfGfUfuuuauuugaa | 3516 | PuUfcaaAfuaaaacuAfcAfucucuca | 4616 |
| AD-2138093.1 | gagaugUfaGfUfUfuuauuugaaa | 3517 | PuUfucaAfauaaaacUfaCfaucucuc | 4617 |
| AD-2138094.1 | agauguAfgUfUfUfuauuugaaaa | 3518 | PuUfuucAfaauaaaaCfuAfcaucucu | 4618 |
| AD-2138095.1 | gauguaGfuUfUfUfauuugaaaaa | 3519 | PuUfuuuCfaaauaaaAfcUfacaucuc | 4619 |
| AD-2138096.1 | auguagUfuUfUfAfuuugaaaaga | 3520 | PuCfuuuUfcaaauaaAfaCfuacaucu | 4620 |
| AD-2138097.1 | uguaguUfuUfAfUfuugaaaagaa | 3521 | PuUfcuuUfucaaauaAfaAfcuacauc | 4621 |
| AD-2138098.1 | guaguuUfuAfUfUfugaaaagaaa | 3522 | PuUfucuUfuucaaauAfaAfacuacau | 4622 |
| AD-2138099.1 | ugaaaaGfaAfAfGfuguaucucua | 3523 | PuAfgagAfuacacuuUfcUfuuucaaa | 4623 |
| AD-2138100.1 | gaaaagAfaAfGfUfguaucucuca | 3524 | PuGfagaGfauacacuUfuCfuuuucaa | 4624 |
| AD-2138101.1 | aaaagaAfaGfUfGfuaucucucaa | 3525 | PuUfgagAfgauacacUfuUfcuuuuca | 4625 |
| AD-2138102.1 | aaagaaAfgUfGfUfaucucucaga | 3526 | PuCfugaGfagauacaCfuUfucuuuuc | 4626 |
| AD-2138103.1 | aagaaaGfuGfUfAfucucucagaa | 3527 | PuUfcugAfgagauacAfcUfuucuuuu | 4627 |
| AD-2138104.1 | agaaagUfgUfAfUfcucucagaga | 3528 | PuCfucuGfagagauaCfaCfuuucuuu | 4628 |
| AD-2138105.1 | gaaaguGfuAfUfCfucucagagua | 3529 | PuAfcucUfgagagauAfcAfcuuucuu | 4629 |
| AD-2138106.1 | aaagugUfaUfCfUfcucagaguga | 3530 | PuCfacuCfugagagaUfaCfacuuucu | 4630 |
| AD-2138107.1 | aaguguAfuCfUfCfucagagugca | 3531 | PuGfcacUfcugagagAfuAfcacuuuc | 4631 |
| AD-2138108.1 | aguguaUfcUfCfUfcagagugcaa | 3532 | PuUfgcaCfucugagaGfaUfacacuuu | 4632 |
| AD-2138109.1 | guguauCfuCfUfCfagagugcaaa | 3533 | PuUfugcAfcucugagAfgAfuacacuu | 4633 |
| AD-2138110.1 | uguaucUfcUfCfAfgagugcaaga | 3534 | PuCfuugCfacucugaGfaGfauacacu | 4634 |
| AD-2138111.1 | guaucuCfuCfAfGfagugcaagaa | 3535 | PuUfcuuGfcacucugAfgAfgauacac | 4635 |
| AD-2138112.1 | aucucuCfaGfAfGfugcaagacua | 3536 | PuAfgucUfugcacucUfgAfgagauac | 4636 |
| AD-2138113.1 | acagagGfgAfCfGfauguccaaaa | 3537 | PuUfuugGfacaucguCfcCfucuguag | 4637 |
| AD-2138114.1 | cagaggGfaCfGfAfuguccaaaaa | 3538 | PuUfuuuGfgacaucgUfcCfcucugua | 4638 |
| AD-2138115.1 | agagggAfcGfAfUfguccaaaaca | 3539 | PuGfuuuUfggacaucGfuCfccucugu | 4639 |
| AD-2138116.1 | gagggaCfgAfUfGfuccaaaacaa | 3540 | PuUfguuUfuggacauCfgUfcccucug | 4640 |
| AD-2138117.1 | agggacGfaUfGfUfccaaaacaaa | 3541 | PuUfuguUfuuggacaUfcGfucccucu | 4641 |
| AD-2138118.1 | gggacgAfuGfUfCfcaaaacaaaa | 3542 | PuUfuugUfuuuggacAfuCfgucccuc | 4642 |
| AD-2138119.1 | ggacgaUfgUfCfCfaaaacaaaaa | 3543 | PuUfuuuGfuuuuggaCfaUfcgucccu | 4643 |
| AD-2138120.1 | gacgauGfuCfCfAfaaacaaaaaa | 3544 | PuUfuuuUfguuuuggAfcAfucguccc | 4644 |
| AD-2138121.1 | acgaugUfcCfAfAfaacaaaaaaa | 3545 | PuUfuuuUfuguuuugGfaCfaucgucc | 4645 |
| AD-2138122.1 | cgauguCfcAfAfAfacaaaaaaua | 3546 | PuAfuuuUfuuguuuuGfgAfcaucguc | 4646 |
| AD-2138123.1 | gaugucCfaAfAfAfcaaaaaauga | 3547 | PuCfauuUfuuuguuuUfgGfacaucgu | 4647 |
| AD-2138124.1 | auguccAfaAfAfCfaaaaaaugga | 3548 | PuCfcauUfuuuuguuUfuGfgacaucg | 4648 |
| AD-2138125.1 | cacagaCfcUfAfGfauucucacca | 3549 | PuGfgugAfgaaucuaGfgUfcuguggg | 4649 |
| AD-2138126.1 | acagacCfuAfGfAfuucucaccua | 3550 | PuAfgguGfagaaucuAfgGfucugugg | 4650 |
| AD-2138127.1 | cagaccUfaGfAfUfucucaccuga | 3551 | PuCfaggUfgagaaucUfaGfgucugug | 4651 |
| AD-2138128.1 | gaccuaGfaUfUfCfucaccugcua | 3552 | PuAfgcaGfgugagaaUfcUfaggucug | 4652 |
| AD-2138129.1 | accuagAfuUfCfUfcaccugcuaa | 3553 | PuUfagcAfggugagaAfuCfuaggucu | 4653 |
| AD-2138130.1 | ccuagaUfuCfUfCfaccugcuaca | 3554 | PuGfuagCfaggugagAfaUfcuagguc | 4654 |
| AD-2138131.1 | cucagaGfgGfAfCfuggaggagaa | 3555 | PuUfcucCfuccagucCfcUfcugaggg | 4655 |
| AD-2138132.1 | ucagagGfgAfCfUfggaggagaaa | 3556 | PuUfucuCfcuccaguCfcCfucugagg | 4656 |
| AD-2138133.1 | cagaggGfaCfUfGfgaggagaaca | 3557 | PuGfuucUfccuccagUfcCfcucugag | 4657 |
| AD-2138134.1 | agagggAfcUfGfGfaggagaacua | 3558 | PuAfguuCfuccuccaGfuCfccucuga | 4658 |
| AD-2138135.1 | gagggaCfuGfGfAfggagaacuaa | 3559 | PuUfaguUfcuccuccAfgUfcccucug | 4659 |
| AD-2138136.1 | agggacUfgGfAfGfgagaacuaca | 3560 | PuGfuagUfucuccucCfaGfucccucu | 4660 |
| AD-2138137.1 | gggacuGfgAfGfGfagaacuacua | 3561 | PuAfguaGfuucuccuCfcAfgucccuc | 4661 |
| AD-2138138.1 | ggacugGfaGfGfAfgaacuacuga | 3562 | PuCfaguAfguucuccUfcCfagucccu | 4662 |
| AD-2138139.1 | acuggaGfgAfGfAfacuacugcaa | 3563 | PuUfgcaGfuaguucuCfcUfccagucc | 4663 |
| AD-2138140.1 | cuggagGfaGfAfAfcuacugcaga | 3564 | PuCfugcAfguaguucUfcCfuccaguc | 4664 |
| AD-2138141.1 | uggaggAfgAfAfCfuacugcagga | 3565 | PuCfcugCfaguaguuCfuCfcuccagu | 4665 |
| AD-2138142.1 | gaggagAfaCfUfAfcugcaggaaa | 3566 | PuUfuccUfgcaguagUfuCfuccucca | 4666 |
| AD-2138143.1 | aauccaGfaCfAfAfcgauccgcaa | 3567 | PuUfgcgGfaucguugUfcUfggauucc | 4667 |
| AD-2138144.1 | uccagaCfaAfCfGfauccgcagga | 3568 | PuCfcugCfggaucguUfgUfcuggauu | 4668 |
| AD-2138145.1 | ugcuauAfcUfAfCfugauccagaa | 3569 | PuUfcugGfaucaguaGfuAfuagcacc | 4669 |
| AD-2138146.1 | gcuauaCfuAfCfUfgauccagaaa | 3570 | PuUfucuGfgaucaguAfgUfauagcac | 4670 |
| AD-2138147.1 | cuauacUfaCfUfGfauccagaaaa | 3571 | PuUfuucUfggaucagUfaGfuauagca | 4671 |
| AD-2138148.1 | uauacuAfcUfGfAfuccagaaaaa | 3572 | PuUfuuuCfuggaucaGfuAfguauagc | 4672 |
| AD-2138149.1 | auacuaCfuGfAfUfccagaaaaga | 3573 | PuCfuuuUfcuggaucAfgUfaguauag | 4673 |
| AD-2138150.1 | uacuacUfgAfUfCfcagaaaagaa | 3574 | PuUfcuuUfucuggauCfaGfuaguaua | 4674 |
| AD-2138151.1 | acuacuGfaUfCfCfagaaaagaga | 3575 | PuCfucuUfuucuggaUfcAfguaguau | 4675 |
| AD-2138152.1 | cuacugAfuCfCfAfgaaaagagaa | 3576 | PuUfcucUfuuucuggAfuCfaguagua | 4676 |
| AD-2138153.1 | uacugaUfcCfAfGfaaaagagaua | 3577 | PuAfucuCfuuuucugGfaUfcaguagu | 4677 |
| AD-2138154.1 | acugauCfcAfGfAfaaagagauaa | 3578 | PuUfaucUfcuuuucuGfgAfucaguag | 4678 |
| AD-2138155.1 | cugaucCfaGfAfAfaagagauaua | 3579 | PuAfuauCfucuuuucUfgGfaucagua | 4679 |
| AD-2138156.1 | ugauccAfgAfAfAfagagauauga | 3580 | PuCfauaUfcucuuuuCfuGfgaucagu | 4680 |
| AD-2138157.1 | gauccaGfaAfAfAfgagauaugaa | 3581 | PuUfcauAfucucuuuUfcUfggaucag | 4681 |
| AD-2138158.1 | auccagAfaAfAfGfagauaugaca | 3582 | PuGfucaUfaucucuuUfuCfuggauca | 4682 |
| AD-2138159.1 | uccagaAfaAfGfAfgauaugacua | 3583 | PuAfgucAfuaucucuUfuUfcuggauc | 4683 |
| AD-2138160.1 | ccagaaAfaGfAfGfauaugacuaa | 3584 | PuUfaguCfauaucucUfuUfucuggau | 4684 |
| AD-2138161.1 | cagaaaAfgAfGfAfuaugacuaca | 3585 | PuGfuagUfcauaucuCfuUfuucugga | 4685 |
| AD-2138162.1 | agaaaaGfaGfAfUfaugacuacua | 3586 | PuAfguaGfucauaucUfcUfuuucugg | 4686 |
| AD-2138163.1 | gaaaagAfgAfUfAfugacuacuga | 3587 | PuCfaguAfgucauauCfuCfuuuucug | 4687 |
| AD-2138164.1 | aaaagaGfaUfAfUfgacuacugca | 3588 | PuGfcagUfagucauaUfcUfcuuuucu | 4688 |
| AD-2138165.1 | uaugacUfaCfUfGfcgacauucua | 3589 | PuAfgaaUfgucgcagUfaGfucauauc | 4689 |
| AD-2138166.1 | augacuAfcUfGfCfgacauucuua | 3590 | PuAfagaAfugucgcaGfuAfgucauau | 4690 |
| AD-2138167.1 | ugacuaCfuGfCfGfacauucuuga | 3591 | PuCfaagAfaugucgcAfgUfagucaua | 4691 |
| AD-2138168.1 | gacuacUfgCfGfAfcauucuugaa | 3592 | PuUfcaaGfaaugucgCfaGfuagucau | 4692 |
| AD-2138169.1 | cuacugCfgAfCfAfuucuugagua | 3593 | PuAfcucAfagaauguCfgCfaguaguc | 4693 |
| AD-2138170.1 | uacugcGfaCfAfUfucuugaguga | 3594 | PuCfacuCfaagaaugUfcGfcaguagu | 4694 |
| AD-2138171.1 | acugcgAfcAfUfUfcuugagugua | 3595 | PuAfcacUfcaagaauGfuCfgcaguag | 4695 |
| AD-2138172.1 | cugcgaCfaUfUfCfuugaguguga | 3596 | PuCfacaCfucaagaaUfgUfcgcagua | 4696 |
| AD-2138173.1 | ugcgacAfuUfCfUfugagugugaa | 3597 | PuUfcacAfcucaagaAfuGfucgcagu | 4697 |
| AD-2138174.1 | gcgacaUfuCfUfUfgagugugaaa | 3598 | PuUfucaCfacucaagAfaUfgucgcag | 4698 |
| AD-2138175.1 | cgacauUfcUfUfGfagugugaaga | 3599 | PuCfuucAfcacucaaGfaAfugucgca | 4699 |
| AD-2138176.1 | gacauuCfuUfGfAfgugugaagaa | 3600 | PuUfcuuCfacacucaAfgAfaugucgc | 4700 |
| AD-2138177.1 | acauucUfuGfAfGfugugaagaga | 3601 | PuCfucuUfcacacucAfaGfaaugucg | 4701 |
| AD-2138178.1 | auucuuGfaGfUfGfugaagaggaa | 3602 | PuUfccuCfuucacacUfcAfagaaugu | 4702 |
| AD-2138179.1 | uucuugAfgUfGfUfgaagaggaaa | 3603 | PuUfuccUfcuucacaCfuCfaagaaug | 4703 |
| AD-2138180.1 | ucuugaGfuGfUfGfaagaggaaua | 3604 | PuAfuucCfucuucacAfcUfcaagaau | 4704 |
| AD-2138181.1 | cuugagUfgUfGfAfagaggaauga | 3605 | PuCfauuCfcucuucaCfaCfucaagaa | 4705 |
| AD-2138182.1 | uugaguGfuGfAfAfgaggaaugua | 3606 | PuAfcauUfccucuucAfcAfcucaaga | 4706 |
| AD-2138183.1 | ugagugUfgAfAfGfaggaauguaa | 3607 | PuUfacaUfuccucuuCfaCfacucaag | 4707 |
| AD-2138184.1 | gaguguGfaAfGfAfggaauguaua | 3608 | PuAfuacAfuuccucuUfcAfcacucaa | 4708 |
| AD-2138185.1 | agugugAfaGfAfGfgaauguauga | 3609 | PuCfauaCfauuccucUfuCfacacuca | 4709 |
| AD-2138186.1 | gugugaAfgAfGfGfaauguaugca | 3610 | PuGfcauAfcauuccuCfuUfcacacuc | 4710 |
| AD-2138187.1 | ugugaaGfaGfGfAfauguaugcaa | 3611 | PuUfgcaUfacauuccUfcUfucacacu | 4711 |
| AD-2138188.1 | gugaagAfgGfAfAfuguaugcaua | 3612 | PuAfugcAfuacauucCfuCfuucacac | 4712 |
| AD-2138189.1 | ugaagaGfgAfAfUfguaugcauua | 3613 | PuAfaugCfauacauuCfcUfcuucaca | 4713 |
| AD-2138190.1 | gaagagGfaAfUfGfuaugcauuga | 3614 | PuCfaauGfcauacauUfcCfucuucac | 4714 |
| AD-2138191.1 | aagaggAfaUfGfUfaugcauugca | 3615 | PuGfcaaUfgcauacaUfuCfcucuuca | 4715 |
| AD-2138192.1 | agaggaAfuGfUfAfugcauugcaa | 3616 | PuUfgcaAfugcauacAfuUfccucuuc | 4716 |
| AD-2138193.1 | gaggaaUfgUfAfUfgcauugcaga | 3617 | PuCfugcAfaugcauaCfaUfuccucuu | 4717 |
| AD-2138195.1 | ggaaugUfaUfGfCfauugcaguga | 3618 | PuCfacuGfcaaugcaUfaCfauuccuc | 4718 |
| AD-2138196.1 | gaauguAfuGfCfAfuugcagugga | 3619 | PuCfcacUfgcaaugcAfuAfcauuccu | 4719 |
| AD-2138197.1 | aauguaUfgCfAfUfugcaguggaa | 3620 | PuUfccaCfugcaaugCfaUfacauucc | 4720 |
| AD-2138198.1 | auguauGfcAfUfUfgcaguggaga | 3621 | PuCfuccAfcugcaauGfcAfuacauuc | 4721 |
| AD-2138199.1 | uguaugCfaUfUfGfcaguggagaa | 3622 | PuUfcucCfacugcaaUfgCfauacauu | 4722 |
| AD-2138200.1 | guaugcAfuUfGfCfaguggagaaa | 3623 | PuUfucuCfcacugcaAfuGfcauacau | 4723 |
| AD-2138201.1 | uaugcaUfuGfCfAfguggagaaaa | 3624 | PuUfuucUfccacugcAfaUfgcauaca | 4724 |
| AD-2138202.1 | augcauUfgCfAfGfuggagaaaaa | 3625 | PuUfuuuCfuccacugCfaAfugcauac | 4725 |
| AD-2138203.1 | ugcauuGfcAfGfUfggagaaaaca | 3626 | PuGfuuuUfcuccacuGfcAfaugcaua | 4726 |
| AD-2138204.1 | gcauugCfaGfUfGfgagaaaacua | 3627 | PuAfguuUfucuccacUfgCfaaugcau | 4727 |
| AD-2138205.1 | cauugcAfgUfGfGfagaaaacuaa | 3628 | PuUfaguUfuucuccaCfuGfcaaugca | 4728 |
| AD-2138206.1 | auugcaGfuGfGfAfgaaaacuaua | 3629 | PuAfuagUfuuucuccAfcUfgcaaugc | 4729 |
| AD-2138207.1 | uugcagUfgGfAfGfaaaacuauga | 3630 | PuCfauaGfuuuucucCfaCfugcaaug | 4730 |
| AD-2138208.1 | ugcaguGfgAfGfAfaaacuaugaa | 3631 | PuUfcauAfguuuucuCfcAfcugcaau | 4731 |
| AD-2138209.1 | acggcaAfaAfUfUfuccaagacca | 3632 | PuGfgucUfuggaaauUfuUfgccguca | 4732 |
| AD-2138210.1 | cggcaaAfaUfUfUfccaagaccaa | 3633 | PuUfgguCfuuggaaaUfuUfugccguc | 4733 |
| AD-2138211.1 | ggcaaaAfuUfUfCfcaagaccaua | 3634 | PuAfuggUfcuuggaaAfuUfuugccgu | 4734 |
| AD-2138212.1 | gcaaaaUfuUfCfCfaagaccauga | 3635 | PuCfaugGfucuuggaAfaUfuuugccg | 4735 |
| AD-2138213.1 | caaaauUfuCfCfAfagaccaugua | 3636 | PuAfcauGfgucuuggAfaAfuuuugcc | 4736 |
| AD-2138214.1 | aaaauuUfcCfAfAfgaccauguca | 3637 | PuGfacaUfggucuugGfaAfauuuugc | 4737 |
| AD-2138215.1 | aaauuuCfcAfAfGfaccaugucua | 3638 | PuAfgacAfuggucuuGfgAfaauuuug | 4738 |
| AD-2138216.1 | aauuucCfaAfGfAfccaugucuga | 3639 | PuCfagaCfauggucuUfgGfaaauuuu | 4739 |
| AD-2138217.1 | auuuccAfaGfAfCfcaugucugga | 3640 | PuCfcagAfcauggucUfuGfgaaauuu | 4740 |
| AD-2138218.1 | uuuccaAfgAfCfCfaugucuggaa | 3641 | PuUfccaGfacaugguCfuUfggaaauu | 4741 |
| AD-2138219.1 | aaugccAfgGfCfCfugggacucua | 3642 | PuAfgagUfcccaggcCfuGfgcauucc | 4742 |
| AD-2138220.1 | gccaggCfcUfGfGfgacucucaga | 3643 | PuCfugaGfagucccaGfgCfcuggcau | 4743 |
| AD-2138221.1 | ccaggcCfuGfGfGfacucucagaa | 3644 | PuUfcugAfgagucccAfgGfccuggca | 4744 |
| AD-2138222.1 | agcccaCfaCfGfCfucauggauaa | 3645 | PuUfaucCfaugagcgUfgUfgggcucu | 4745 |
| AD-2138223.1 | ccacacGfcUfCfAfuggauacaua | 3646 | PuAfuguAfuccaugaGfcGfugugggc | 4746 |
| AD-2138224.1 | cacacgCfuCfAfUfggauacauua | 3647 | PuAfaugUfauccaugAfgCfguguggg | 4747 |
| AD-2138225.1 | acgcucAfuGfGfAfuacauuccua | 3648 | PuAfggaAfuguauccAfuGfagcgugu | 4748 |
| AD-2138226.1 | cgcucaUfgGfAfUfacauuccuua | 3649 | PuAfaggAfauguaucCfaUfgagcgug | 4749 |
| AD-2138227.1 | gcucauGfgAfUfAfcauuccuuca | 3650 | PuGfaagGfaauguauCfcAfugagcgu | 4750 |
| AD-2138228.1 | cucaugGfaUfAfCfauuccuucca | 3651 | PuGfgaaGfgaauguaUfcCfaugagcg | 4751 |
| AD-2138229.1 | ucauggAfuAfCfAfuuccuuccaa | 3652 | PuUfggaAfggaauguAfuCfcaugagc | 4752 |
| AD-2138230.1 | cauggaUfaCfAfUfuccuuccaaa | 3653 | PuUfuggAfaggaaugUfaUfccaugag | 4753 |
| AD-2138231.1 | auggauAfcAfUfUfccuuccaaaa | 3654 | PuUfuugGfaaggaauGfuAfuccauga | 4754 |
| AD-2138232.1 | uggauaCfaUfUfCfcuuccaaaua | 3655 | PuAfuuuGfgaaggaaUfgUfauccaug | 4755 |
| AD-2138233.1 | ggauacAfuUfCfCfuuccaaauua | 3656 | PuAfauuUfggaaggaAfuGfuauccau | 4756 |
| AD-2138234.1 | gauacaUfuCfCfUfuccaaauuua | 3657 | PuAfaauUfuggaaggAfaUfguaucca | 4757 |
| AD-2138235.1 | auacauUfcCfUfUfccaaauuuca | 3658 | PuGfaaaUfuuggaagGfaAfuguaucc | 4758 |
| AD-2138236.1 | uacauuCfcUfUfCfcaaauuucca | 3659 | PuGfgaaAfuuuggaaGfgAfauguauc | 4759 |
| AD-2138237.1 | acauucCfuUfCfCfaaauuuccaa | 3660 | PuUfggaAfauuuggaAfgGfaauguau | 4760 |
| AD-2138238.1 | cauuccUfuCfCfAfaauuuccaaa | 3661 | PuUfuggAfaauuuggAfaGfgaaugua | 4761 |
| AD-2138239.1 | auuccuUfcCfAfAfauuuccaaaa | 3662 | PuUfuugGfaaauuugGfaAfggaaugu | 4762 |
| AD-2138240.1 | uuccuuCfcAfAfAfuuuccaaaca | 3663 | PuGfuuuGfgaaauuuGfgAfaggaaug | 4763 |
| AD-2138241.1 | uccuucCfaAfAfUfuuccaaacaa | 3664 | PuUfguuUfggaaauuUfgGfaaggaau | 4764 |
| AD-2138242.1 | ccuuccAfaAfUfUfuccaaacaaa | 3665 | PuUfuguUfuggaaauUfuGfgaaggaa | 4765 |
| AD-2138243.1 | cuuccaAfaUfUfUfccaaacaaga | 3666 | PuCfuugUfuuggaaaUfuUfggaagga | 4766 |
| AD-2138244.1 | uuccaaAfuUfUfCfcaaacaagaa | 3667 | PuUfcuuGfuuuggaaAfuUfuggaagg | 4767 |
| AD-2138245.1 | uccaaaUfuUfCfCfaaacaagaaa | 3668 | PuUfucuUfguuuggaAfaUfuuggaag | 4768 |
| AD-2138246.1 | ccaaauUfuCfCfAfaacaagaaca | 3669 | PuGfuucUfuguuuggAfaAfuuuggaa | 4769 |
| AD-2138247.1 | caaauuUfcCfAfAfacaagaacca | 3670 | PuGfguuCfuuguuugGfaAfauuugga | 4770 |
| AD-2138248.1 | aaauuuCfcAfAfAfcaagaaccua | 3671 | PuAfgguUfcuuguuuGfgAfaauuugg | 4771 |
| AD-2138249.1 | aauuucCfaAfAfCfaagaaccuga | 3672 | PuCfaggUfucuuguuUfgGfaaauuug | 4772 |
| AD-2138250.1 | auuuccAfaAfCfAfagaaccugaa | 3673 | PuUfcagGfuucuuguUfuGfgaaauuu | 4773 |
| AD-2138251.1 | uuuccaAfaCfAfAfgaaccugaaa | 3674 | PuUfucaGfguucuugUfuUfggaaauu | 4774 |
| AD-2138252.1 | uuccaaAfcAfAfGfaaccugaaga | 3675 | PuCfuucAfgguucuuGfuUfuggaaau | 4775 |
| AD-2138253.1 | uccaaaCfaAfGfAfaccugaagaa | 3676 | PuUfcuuCfagguucuUfgUfuuggaaa | 4776 |
| AD-2138254.1 | ccaaacAfaGfAfAfccugaagaaa | 3677 | PuUfucuUfcagguucUfuGfuuuggaa | 4777 |
| AD-2138255.1 | caaacaAfgAfAfCfcugaagaaga | 3678 | PuCfuucUfucagguuCfuUfguuugga | 4778 |
| AD-2138256.1 | aaacaaGfaAfCfCfugaagaagaa | 3679 | PuUfcuuCfuucagguUfcUfuguuugg | 4779 |
| AD-2138257.1 | aacaagAfaCfCfUfgaagaagaaa | 3680 | PuUfucuUfcuucaggUfuCfuuguuug | 4780 |
| AD-2138258.1 | acaagaAfcCfUfGfaagaagaaua | 3681 | PuAfuucUfucuucagGfuUfcuuguuu | 4781 |
| AD-2138259.1 | caagaaCfcUfGfAfagaagaauua | 3682 | PuAfauuCfuucuucaGfgUfucuuguu | 4782 |
| AD-2138260.1 | aagaacCfuGfAfAfgaagaauuaa | 3683 | PuUfaauUfcuucuucAfgGfuucuugu | 4783 |
| AD-2138261.1 | agaaccUfgAfAfGfaagaauuaca | 3684 | PuGfuaaUfucuucuuCfaGfguucuug | 4784 |
| AD-2138262.1 | gaaccuGfaAfGfAfagaauuacua | 3685 | PuAfguaAfuucuucuUfcAfgguucuu | 4785 |
| AD-2138263.1 | aaccugAfaGfAfAfgaauuacuga | 3686 | PuCfaguAfauucuucUfuCfagguucu | 4786 |
| AD-2138264.1 | accugaAfgAfAfGfaauuacugua | 3687 | PuAfcagUfaauucuuCfuUfcagguuc | 4787 |
| AD-2138265.1 | ccugaaGfaAfGfAfauuacuguca | 3688 | PuGfacaGfuaauucuUfcUfucagguu | 4788 |
| AD-2138266.1 | cugaagAfaGfAfAfuuacugucga | 3689 | PuCfgacAfguaauucUfuCfuucaggu | 4789 |
| AD-2138267.1 | ugaagaAfgAfAfUfuacugucgua | 3690 | PuAfcgaCfaguaauuCfuUfcuucagg | 4790 |
| AD-2138268.1 | gaagaaGfaAfUfUfacugucguaa | 3691 | PuUfacgAfcaguaauUfcUfucuucag | 4791 |
| AD-2138269.1 | aagaagAfaUfUfAfcugucguaaa | 3692 | PuUfuacGfacaguaaUfuCfuucuuca | 4792 |
| AD-2138270.1 | agggagCfuGfCfGfgccuugguga | 3693 | PuCfaccAfaggccgcAfgCfucccuau | 4793 |
| AD-2138271.1 | ggagcuGfcGfGfCfcuugguguua | 3694 | PuAfacaCfcaaggccGfcAfgcucccu | 4794 |
| AD-2138272.1 | gagcugCfgGfCfCfuugguguuua | 3695 | PuAfaacAfccaaggcCfgCfagcuccc | 4795 |
| AD-2138273.1 | agcugcGfgCfCfUfugguguuuca | 3696 | PuGfaaaCfaccaaggCfcGfcagcucc | 4796 |
| AD-2138274.1 | ugcggcCfuUfGfGfuguuucacca | 3697 | PuGfgugAfaacaccaAfgGfccgcagc | 4797 |
| AD-2138275.1 | cggccuUfgGfUfGfuuucaccaca | 3698 | PuGfuggUfgaaacacCfaAfggccgca | 4798 |
| AD-2138276.1 | ggccuuGfgUfGfUfuucaccacca | 3699 | PuGfgugGfugaaacaCfcAfaggccgc | 4799 |
| AD-2138277.1 | gccuugGfuGfUfUfucaccaccga | 3700 | PuCfgguGfgugaaacAfcCfaaggccg | 4800 |
| AD-2138278.1 | caacaaGfcGfCfUfgggaacuuua | 3701 | PuAfaagUfucccagcGfcUfuguuggg | 4801 |
| AD-2138279.1 | aacaagCfgCfUfGfggaacuuuga | 3702 | PuCfaaaGfuucccagCfgCfuuguugg | 4802 |
| AD-2138280.1 | gcugcaCfaAfCfAfccuccaccaa | 3703 | PuUfgguGfgagguguUfgUfgcagcgg | 4803 |
| AD-2138281.1 | cugcacAfaCfAfCfcuccaccaua | 3704 | PuAfuggUfggaggugUfuGfugcagcg | 4804 |
| AD-2138282.1 | ugcacaAfcAfCfCfuccaccauca | 3705 | PuGfaugGfuggagguGfuUfgugcagc | 4805 |
| AD-2138283.1 | gcacaaCfaCfCfUfccaccaucua | 3706 | PuAfgauGfguggaggUfgUfugugcag | 4806 |
| AD-2138284.1 | cacaacAfcCfUfCfcaccaucuua | 3707 | PuAfagaUfgguggagGfuGfuugugca | 4807 |
| AD-2138285.1 | acaacaCfcUfCfCfaccaucuuca | 3708 | PuGfaagAfugguggaGfgUfguugugc | 4808 |
| AD-2138286.1 | caacacCfuCfCfAfccaucuucua | 3709 | PuAfgaaGfaugguggAfgGfuguugug | 4809 |
| AD-2138287.1 | caccucCfaCfCfAfucuucuggua | 3710 | PuAfccaGfaagauggUfgGfagguguu | 4810 |
| AD-2138288.1 | accuccAfcCfAfUfcuucugguca | 3711 | PuGfaccAfgaagaugGfuGfgaggugu | 4811 |
| AD-2138289.1 | ccuccaCfcAfUfCfuucuggucca | 3712 | PuGfgacCfagaagauGfgUfggaggug | 4812 |
| AD-2138290.1 | cuccacCfaUfCfUfucugguccca | 3713 | PuGfggaCfcagaagaUfgGfuggaggu | 4813 |
| AD-2138291.1 | uccaccAfuCfUfUfcuggucccaa | 3714 | PuUfgggAfccagaagAfuGfguggagg | 4814 |
| AD-2138292.1 | ccaccaUfcUfUfCfuggucccaca | 3715 | PuGfuggGfaccagaaGfaUfgguggag | 4815 |
| AD-2138293.1 | caccauCfuUfCfUfggucccacca | 3716 | PuGfgugGfgaccagaAfgAfuggugga | 4816 |
| AD-2138295.1 | caucuuCfuGfGfUfcccaccuaca | 3717 | PuGfuagGfugggaccAfgAfagauggu | 4817 |
| AD-2138296.1 | uucuggUfcCfCfAfccuaccagua | 3718 | PuAfcugGfuagguggGfaCfcagaaga | 4818 |
| AD-2138297.1 | ucugguCfcCfAfCfcuaccaguga | 3719 | PuCfacuGfguaggugGfgAfccagaag | 4819 |
| AD-2138298.1 | cuggucCfcAfCfCfuaccagugua | 3720 | PuAfcacUfgguagguGfgGfaccagaa | 4820 |
| AD-2138299.1 | ugguccCfaCfCfUfaccaguguca | 3721 | PuGfacaCfugguaggUfgGfgaccaga | 4821 |
| AD-2138300.1 | cccaccUfaCfCfAfgugucugaaa | 3722 | PuUfucaGfacacuggUfaGfgugggac | 4822 |
| AD-2138301.1 | ccaccuAfcCfAfGfugucugaaga | 3723 | PuCfuucAfgacacugGfuAfgguggga | 4823 |
| AD-2138302.1 | accuacCfaGfUfGfucugaaggga | 3724 | PuCfccuUfcagacacUfgGfuaggugg | 4824 |
| AD-2138303.1 | ccuaccAfgUfGfUfcugaagggaa | 3725 | PuUfcccUfucagacaCfuGfguaggug | 4825 |
| AD-2138304.1 | cuaccaGfuGfUfCfugaagggaaa | 3726 | PuUfuccCfuucagacAfcUfgguaggu | 4826 |
| AD-2138305.1 | uaccagUfgUfCfUfgaagggaaca | 3727 | PuGfuucCfcuucagaCfaCfugguagg | 4827 |
| AD-2138306.1 | gugucuGfaAfGfGfgaacagguga | 3728 | PuCfaccUfguucccuUfcAfgacacug | 4828 |
| AD-2138307.1 | gucugaAfgGfGfAfacaggugaaa | 3729 | PuUfucaCfcuguuccCfuUfcagacac | 4829 |
| AD-2138308.1 | ucugaaGfgGfAfAfcaggugaaaa | 3730 | PuUfuucAfccuguucCfcUfucagaca | 4830 |
| AD-2138309.1 | cugaagGfgAfAfCfaggugaaaaa | 3731 | PuUfuuuCfaccuguuCfcCfuucagac | 4831 |
| AD-2138310.1 | ugaaggGfaAfCfAfggugaaaaca | 3732 | PuGfuuuUfcaccuguUfcCfcuucaga | 4832 |
| AD-2138311.1 | gaagggAfaCfAfGfgugaaaacua | 3733 | PuAfguuUfucaccugUfuCfccuucag | 4833 |
| AD-2138312.1 | aagggaAfcAfGfGfugaaaacuaa | 3734 | PuUfaguUfuucaccuGfuUfcccuuca | 4834 |
| AD-2138313.1 | agggaaCfaGfGfUfgaaaacuaua | 3735 | PuAfuagUfuuucaccUfgUfucccuuc | 4835 |
| AD-2138314.1 | gggaacAfgGfUfGfaaaacuauca | 3736 | PuGfauaGfuuuucacCfuGfuucccuu | 4836 |
| AD-2138315.1 | ggaacaGfgUfGfAfaaacuaucga | 3737 | PuCfgauAfguuuucaCfcUfguucccu | 4837 |
| AD-2138316.1 | gaacagGfuGfAfAfaacuaucgca | 3738 | PuGfcgaUfaguuuucAfcCfuguuccc | 4838 |
| AD-2138317.1 | gugaaaAfcUfAfUfcgcgggaaua | 3739 | PuAfuucCfcgcgauaGfuUfuucaccu | 4839 |
| AD-2138318.1 | gaaaacUfaUfCfGfcgggaaugua | 3740 | PuAfcauUfcccgcgaUfaGfuuuucac | 4840 |
| AD-2138319.1 | aaaacuAfuCfGfCfgggaauguga | 3741 | PuCfacaUfucccgcgAfuAfguuuuca | 4841 |
| AD-2138320.1 | uaucgcGfgGfAfAfuguggcugua | 3742 | PuAfcagCfcacauucCfcGfcgauagu | 4842 |
| AD-2138321.1 | aucgcgGfgAfAfUfguggcuguua | 3743 | PuAfacaGfccacauuCfcCfgcgauag | 4843 |
| AD-2138322.1 | ucgcggGfaAfUfGfuggcuguuaa | 3744 | PuUfaacAfgccacauUfcCfcgcgaua | 4844 |
| AD-2138323.1 | cgcgggAfaUfGfUfggcuguuaca | 3745 | PuGfuaaCfagccacaUfuCfccgcgau | 4845 |
| AD-2138324.1 | gggaauGfuGfGfCfuguuaccgua | 3746 | PuAfcggUfaacagccAfcAfuucccgc | 4846 |
| AD-2138325.1 | gaauguGfgCfUfGfuuaccgugua | 3747 | PuAfcacGfguaacagCfcAfcauuccc | 4847 |
| AD-2138326.1 | aaugugGfcUfGfUfuaccguguca | 3748 | PuGfacaCfgguaacaGfcCfacauucc | 4848 |
| AD-2138327.1 | ccguguCfcGfGfGfcacaccugua | 3749 | PuAfcagGfugugcccGfgAfcacggua | 4849 |
| AD-2138328.1 | uccgggCfaCfAfCfcugucagcaa | 3750 | PuUfgcuGfacaggugUfgCfccggaca | 4850 |
| AD-2138329.1 | cgggcaCfaCfCfUfgucagcacua | 3751 | PuAfgugCfugacaggUfgUfgcccgga | 4851 |
| AD-2138330.1 | gcacacCfuGfUfCfagcacuggaa | 3752 | PuUfccaGfugcugacAfgGfugugccc | 4852 |
| AD-2138331.1 | cacaccUfgUfCfAfgcacuggaga | 3753 | PuCfuccAfgugcugaCfaGfgugugcc | 4853 |
| AD-2138332.1 | acaccuGfuCfAfGfcacuggagua | 3754 | PuAfcucCfagugcugAfcAfggugugc | 4854 |
| AD-2138333.1 | ccugucAfgCfAfCfuggagugcaa | 3755 | PuUfgcaCfuccagugCfuGfacaggug | 4855 |
| AD-2138334.1 | ugucagCfaCfUfGfgagugcacaa | 3756 | PuUfgugCfacuccagUfgCfugacagg | 4856 |
| AD-2138335.1 | ucagcaCfuGfGfAfgugcacagaa | 3757 | PuUfcugUfgcacuccAfgUfgcugaca | 4857 |
| AD-2138336.1 | cagcacUfgGfAfGfugcacagaca | 3758 | PuGfucuGfugcacucCfaGfugcugac | 4858 |
| AD-2138337.1 | agcacuGfgAfGfUfgcacagacca | 3759 | PuGfgucUfgugcacuCfcAfgugcuga | 4859 |
| AD-2138338.1 | cucacaCfaCfAfUfaacaggacaa | 3760 | PuUfgucCfuguuaugUfgUfgugaggg | 4860 |
| AD-2138339.1 | cacacaCfaUfAfAfcaggacacca | 3761 | PuGfgugUfccuguuaUfgUfgugugag | 4861 |
| AD-2138340.1 | acacacAfuAfAfCfaggacaccaa | 3762 | PuUfgguGfuccuguuAfuGfuguguga | 4862 |
| AD-2138341.1 | cacacaUfaAfCfAfggacaccaga | 3763 | PuCfuggUfguccuguUfaUfgugugug | 4863 |
| AD-2138342.1 | acacauAfaCfAfGfgacaccagaa | 3764 | PuUfcugGfuguccugUfuAfugugugu | 4864 |
| AD-2138343.1 | cacauaAfcAfGfGfacaccagaaa | 3765 | PuUfucuGfguguccuGfuUfaugugug | 4865 |
| AD-2138344.1 | acauaaCfaGfGfAfcaccagaaaa | 3766 | PuUfuucUfgguguccUfgUfuaugugu | 4866 |
| AD-2138345.1 | cauaacAfgGfAfCfaccagaaaaa | 3767 | PuUfuuuCfuggugucCfuGfuuaugug | 4867 |
| AD-2138346.1 | auaacaGfgAfCfAfccagaaaaca | 3768 | PuGfuuuUfcugguguCfcUfguuaugu | 4868 |
| AD-2138347.1 | uaacagGfaCfAfCfcagaaaacua | 3769 | PuAfguuUfucuggugUfcCfuguuaug | 4869 |
| AD-2138348.1 | aacaggAfcAfCfCfagaaaacuua | 3770 | PuAfaguUfuucugguGfuCfcuguuau | 4870 |
| AD-2138349.1 | ccugcaAfaAfAfUfuuggaugaaa | 3771 | PuUfucaUfccaaauuUfuUfgcagggg | 4871 |
| AD-2138350.1 | cugcaaAfaAfUfUfuggaugaaaa | 3772 | PuUfuucAfuccaaauUfuUfugcaggg | 4872 |
| AD-2138351.1 | ugcaaaAfaUfUfUfggaugaaaaa | 3773 | PuUfuuuCfauccaaaUfuUfuugcagg | 4873 |
| AD-2138352.1 | gcaaaaAfuUfUfGfgaugaaaaca | 3774 | PuGfuuuUfcauccaaAfuUfuuugcag | 4874 |
| AD-2138353.1 | caaaaaUfuUfGfGfaugaaaacua | 3775 | PuAfguuUfucauccaAfaUfuuuugca | 4875 |
| AD-2138354.1 | aaaaauUfuGfGfAfugaaaacuaa | 3776 | PuUfaguUfuucauccAfaAfuuuuugc | 4876 |
| AD-2138355.1 | aaaauuUfgGfAfUfgaaaacuaca | 3777 | PuGfuagUfuuucaucCfaAfauuuuug | 4877 |
| AD-2138356.1 | aaauuuGfgAfUfGfaaaacuacua | 3778 | PuAfguaGfuuuucauCfcAfaauuuuu | 4878 |
| AD-2138357.1 | aauuugGfaUfGfAfaaacuacuga | 3779 | PuCfaguAfguuuucaUfcCfaaauuuu | 4879 |
| AD-2138358.1 | auuuggAfuGfAfAfaacuacugca | 3780 | PuGfcagUfaguuuucAfuCfcaaauuu | 4880 |
| AD-2138359.1 | uuuggaUfgAfAfAfacuacugcca | 3781 | PuGfgcaGfuaguuuuCfaUfccaaauu | 4881 |
| AD-2138360.1 | uuggauGfaAfAfAfcuacugccga | 3782 | PuCfggcAfguaguuuUfcAfuccaaau | 4882 |
| AD-2138361.1 | uggaugAfaAfAfCfuacugccgca | 3783 | PuGfcggCfaguaguuUfuCfauccaaa | 4883 |
| AD-2138362.1 | ggaugaAfaAfCfUfacugccgcaa | 3784 | PuUfgcgGfcaguaguUfuUfcauccaa | 4884 |
| AD-2138363.1 | gaugaaAfaCfUfAfcugccgcaaa | 3785 | PuUfugcGfgcaguagUfuUfucaucca | 4885 |
| AD-2138364.1 | augaaaAfcUfAfCfugccgcaaua | 3786 | PuAfuugCfggcaguaGfuUfuucaucc | 4886 |
| AD-2138365.1 | ugaaaaCfuAfCfUfgccgcaauca | 3787 | PuGfauuGfcggcaguAfgUfuuucauc | 4887 |
| AD-2138366.1 | gaaaacUfaCfUfGfccgcaaucca | 3788 | PuGfgauUfgcggcagUfaGfuuuucau | 4888 |
| AD-2138367.1 | aaaacuAfcUfGfCfcgcaauccua | 3789 | PuAfggaUfugcggcaGfuAfguuuuca | 4889 |
| AD-2138368.1 | aaacuaCfuGfCfCfgcaauccuga | 3790 | PuCfaggAfuugcggcAfgUfaguuuuc | 4890 |
| AD-2138369.1 | aacuacUfgCfCfGfcaauccugaa | 3791 | PuUfcagGfauugcggCfaGfuaguuuu | 4891 |
| AD-2138370.1 | uacugcCfgCfAfAfuccugacgga | 3792 | PuCfcguCfaggauugCfgGfcaguagu | 4892 |
| AD-2138371.1 | acugccGfcAfAfUfccugacggaa | 3793 | PuUfccgUfcaggauuGfcGfgcaguag | 4893 |
| AD-2138372.1 | cugccgCfaAfUfCfcugacggaaa | 3794 | PuUfuccGfucaggauUfgCfggcagua | 4894 |
| AD-2138373.1 | ugccgcAfaUfCfCfugacggaaaa | 3795 | PuUfuucCfgucaggaUfuGfcggcagu | 4895 |
| AD-2138374.1 | gccgcaAfuCfCfUfgacggaaaaa | 3796 | PuUfuuuCfcgucaggAfuUfgcggcag | 4896 |
| AD-2138375.1 | ccgcaaUfcCfUfGfacggaaaaaa | 3797 | PuUfuuuUfccgucagGfaUfugcggca | 4897 |
| AD-2138376.1 | cgcaauCfcUfGfAfcggaaaaaga | 3798 | PuCfuuuUfuccgucaGfgAfuugcggc | 4898 |
| AD-2138377.1 | gcaaucCfuGfAfCfggaaaaagga | 3799 | PuCfcuuUfuuccgucAfgGfauugcgg | 4899 |
| AD-2138378.1 | caauccUfgAfCfGfgaaaaaggga | 3800 | PuCfccuUfuuuccguCfaGfgauugcg | 4900 |
| AD-2138379.1 | aauccuGfaCfGfGfaaaaagggca | 3801 | PuGfcccUfuuuuccgUfcAfggauugc | 4901 |
| AD-2138380.1 | auccugAfcGfGfAfaaaagggcca | 3802 | PuGfgccCfuuuuuccGfuCfaggauug | 4902 |
| AD-2138381.1 | caugguGfcCfAfUfacaaccaaca | 3803 | PuGfuugGfuuguaugGfcAfccauggg | 4903 |
| AD-2138383.1 | uggugcCfaUfAfCfaaccaacaga | 3804 | PuCfuguUfgguuguaUfgGfcaccaug | 4904 |
| AD-2138384.1 | gugccaUfaCfAfAfccaacagcca | 3805 | PuGfgcuGfuugguugUfaUfggcacca | 4905 |
| AD-2138385.1 | gccauaCfaAfCfCfaacagccaaa | 3806 | PuUfuggCfuguugguUfgUfauggcac | 4906 |
| AD-2138386.1 | ccauacAfaCfCfAfacagccaaga | 3807 | PuCfuugGfcuguuggUfuGfuauggca | 4907 |
| AD-2138387.1 | cauacaAfcCfAfAfcagccaagua | 3808 | PuAfcuuGfgcuguugGfuUfguauggc | 4908 |
| AD-2138388.1 | auacaaCfcAfAfCfagccaaguga | 3809 | PuCfacuUfggcuguuGfgUfuguaugg | 4909 |
| AD-2138389.1 | uacaacCfaAfCfAfgccaagugca | 3810 | PuGfcacUfuggcuguUfgGfuuguaug | 4910 |
| AD-2138390.1 | acaaccAfaCfAfGfccaagugcga | 3811 | PuCfgcaCfuuggcugUfuGfguuguau | 4911 |
| AD-2138391.1 | gccaagUfgCfGfGfugggaguaca | 3812 | PuGfuacUfcccaccgCfaCfuuggcug | 4912 |
| AD-2138392.1 | aagugcGfgUfGfGfgaguacugua | 3813 | PuAfcagUfacucccaCfcGfcacuugg | 4913 |
| AD-2138393.1 | agugcgGfuGfGfGfaguacuguaa | 3814 | PuUfacaGfuacucccAfcCfgcacuug | 4914 |
| AD-2138394.1 | gugcggUfgGfGfAfguacuguaaa | 3815 | PuUfuacAfguacuccCfaCfcgcacuu | 4915 |
| AD-2138395.1 | ugcgguGfgGfAfGfuacuguaaga | 3816 | PuCfuuaCfaguacucCfcAfccgcacu | 4916 |
| AD-2138396.1 | gcggugGfgAfGfUfacuguaagaa | 3817 | PuUfcuuAfcaguacuCfcCfaccgcac | 4917 |
| AD-2138397.1 | cgguggGfaGfUfAfcuguaagaua | 3818 | PuAfucuUfacaguacUfcCfcaccgca | 4918 |
| AD-2138398.1 | ggugggAfgUfAfCfuguaagauaa | 3819 | PuUfaucUfuacaguaCfuCfccaccgc | 4919 |
| AD-2138399.1 | gugggaGfuAfCfUfguaagauaca | 3820 | PuGfuauCfuuacaguAfcUfcccaccg | 4920 |
| AD-2138400.1 | ugggagUfaCfUfGfuaagauacca | 3821 | PuGfguaUfcuuacagUfaCfucccacc | 4921 |
| AD-2138401.1 | ggaguaCfuGfUfAfagauaccgua | 3822 | PuAfcggUfaucuuacAfgUfacuccca | 4922 |
| AD-2138402.1 | gaguacUfgUfAfAfgauaccguca | 3823 | PuGfacgGfuaucuuaCfaGfuacuccc | 4923 |
| AD-2138403.1 | aguacuGfuAfAfGfauaccgucca | 3824 | PuGfgacGfguaucuuAfcAfguacucc | 4924 |
| AD-2138405.1 | acuguaAfgAfUfAfccguccugua | 3825 | PuAfcagGfacgguauCfuUfacaguac | 4925 |
| AD-2138406.1 | cuguaaGfaUfAfCfcguccuguga | 3826 | PuCfacaGfgacgguaUfcUfuacagua | 4926 |
| AD-2138407.1 | guaagaUfaCfCfGfuccugugaca | 3827 | PuGfucaCfaggacggUfaUfcuuacag | 4927 |
| AD-2138408.1 | uuggcuCfcCfAfCfagcaccacca | 3828 | PuGfgugGfugcugugGfgAfgccaauu | 4928 |
| AD-2138409.1 | ggcuccCfaCfAfGfcaccaccuga | 3829 | PuCfaggUfggugcugUfgGfgagccaa | 4929 |
| AD-2138410.1 | gcucccAfcAfGfCfaccaccugaa | 3830 | PuUfcagGfuggugcuGfuGfggagcca | 4930 |
| AD-2138412.1 | acagcaCfcAfCfCfugagcuaaca | 3831 | PuGfuuaGfcucagguGfgUfgcugugg | 4931 |
| AD-2138413.1 | cagcacCfaCfCfUfgagcuaacca | 3832 | PuGfguuAfgcucaggUfgGfugcugug | 4932 |
| AD-2138414.1 | caugguGfaUfGfGfacagagcuaa | 3833 | PuUfagcUfcuguccaUfcAfccauggu | 4933 |
| AD-2138415.1 | gacagaGfcUfAfCfcgaggcacaa | 3834 | PuUfgugCfcucgguaGfcUfcugucca | 4934 |
| AD-2138416.1 | acagagCfuAfCfCfgaggcacaua | 3835 | PuAfuguGfccucgguAfgCfucugucc | 4935 |
| AD-2138417.1 | cagagcUfaCfCfGfaggcacauca | 3836 | PuGfaugUfgccucggUfaGfcucuguc | 4936 |
| AD-2138418.1 | gagcuaCfcGfAfGfgcacauccua | 3837 | PuAfggaUfgugccucGfgUfagcucug | 4937 |
| AD-2138419.1 | accgagGfcAfCfAfuccuccacca | 3838 | PuGfgugGfaggauguGfcCfucgguag | 4938 |
| AD-2138420.1 | cgaggcAfcAfUfCfcuccaccaca | 3839 | PuGfuggUfggaggauGfuGfccucggu | 4939 |
| AD-2138421.1 | aggcacAfuCfCfUfccaccaccaa | 3840 | PuUfgguGfguggaggAfuGfugccucg | 4940 |
| AD-2138422.1 | gcacauCfcUfCfCfaccaccacca | 3841 | PuGfgugGfugguggaGfgAfugugccu | 4941 |
| AD-2138423.1 | cauccuCfcAfCfCfaccaccacaa | 3842 | PuUfgugGfuggugguGfgAfggaugug | 4942 |
| AD-2138424.1 | auccucCfaCfCfAfccaccacaga | 3843 | PuCfuguGfgugguggUfgGfaggaugu | 4943 |
| AD-2138425.1 | uccuccAfcCfAfCfcaccacagga | 3844 | PuCfcugUfgguggugGfuGfgaggaug | 4944 |
| AD-2138426.1 | ccuccaCfcAfCfCfaccacaggaa | 3845 | PuUfccuGfuggugguGfgUfggaggau | 4945 |
| AD-2138427.1 | cuccacCfaCfCfAfccacaggaaa | 3846 | PuUfuccUfgugguggUfgGfuggagga | 4946 |
| AD-2138428.1 | uccaccAfcCfAfCfcacaggaaaa | 3847 | PuUfuucCfuguggugGfuGfguggagg | 4947 |
| AD-2138429.1 | ccaccaCfcAfCfCfacaggaaaga | 3848 | PuCfuuuCfcugugguGfgUfgguggag | 4948 |
| AD-2138430.1 | caccacCfaCfCfAfcaggaaagaa | 3849 | PuUfcuuUfccuguggUfgGfuggugga | 4949 |
| AD-2138431.1 | accaccAfcCfAfCfaggaaagaaa | 3850 | PuUfucuUfuccugugGfuGfguggugg | 4950 |
| AD-2138432.1 | ccaccaCfcAfCfAfggaaagaaga | 3851 | PuCfuucUfuuccuguGfgUfgguggug | 4951 |
| AD-2138433.1 | caccacCfaCfAfGfgaaagaagua | 3852 | PuAfcuuCfuuuccugUfgGfugguggu | 4952 |
| AD-2138434.1 | ccaccaCfaGfGfAfaagaagugua | 3853 | PuAfcacUfucuuuccUfgUfgguggug | 4953 |
| AD-2138435.1 | caccacAfgGfAfAfagaaguguca | 3854 | PuGfacaCfuucuuucCfuGfugguggu | 4954 |
| AD-2138436.1 | accacaGfgAfAfAfgaagugucaa | 3855 | PuUfgacAfcuucuuuCfcUfguggugg | 4955 |
| AD-2138437.1 | ccacagGfaAfAfGfaagugucaga | 3856 | PuCfugaCfacuucuuUfcCfuguggug | 4956 |
| AD-2138438.1 | cacaggAfaAfGfAfagugucagua | 3857 | PuAfcugAfcacuucuUfuCfcuguggu | 4957 |
| AD-2138439.1 | acaggaAfaGfAfAfgugucaguca | 3858 | PuGfacuGfacacuucUfuUfccugugg | 4958 |
| AD-2138440.1 | caggaaAfgAfAfGfugucagucua | 3859 | PuAfgacUfgacacuuCfuUfuccugug | 4959 |
| AD-2138441.1 | aggaaaGfaAfGfUfgucagucuua | 3860 | PuAfagaCfugacacuUfcUfuuccugu | 4960 |
| AD-2138442.1 | ggaaagAfaGfUfGfucagucuuga | 3861 | PuCfaagAfcugacacUfuCfuuuccug | 4961 |
| AD-2138443.1 | gaaagaAfgUfGfUfcagucuugga | 3862 | PuCfcaaGfacugacaCfuUfcuuuccu | 4962 |
| AD-2138444.1 | aaagaaGfuGfUfCfagucuuggua | 3863 | PuAfccaAfgacugacAfcUfucuuucc | 4963 |
| AD-2138445.1 | agaaguGfuCfAfGfucuuggucaa | 3864 | PuUfgacCfaagacugAfcAfcuucuuu | 4964 |
| AD-2138446.1 | gaagugUfcAfGfUfcuuggucaua | 3865 | PuAfugaCfcaagacuGfaCfacuucuu | 4965 |
| AD-2138447.1 | aaguguCfaGfUfCfuuggucauca | 3866 | PuGfaugAfccaagacUfgAfcacuucu | 4966 |
| AD-2138448.1 | agugucAfgUfCfUfuggucaucua | 3867 | PuAfgauGfaccaagaCfuGfacacuuc | 4967 |
| AD-2138449.1 | gugucaGfuCfUfUfggucaucuaa | 3868 | PuUfagaUfgaccaagAfcUfgacacuu | 4968 |
| AD-2138450.1 | ugucagUfcUfUfGfgucaucuaua | 3869 | PuAfuagAfugaccaaGfaCfugacacu | 4969 |
| AD-2138451.1 | gucaguCfuUfGfGfucaucuauga | 3870 | PuCfauaGfaugaccaAfgAfcugacac | 4970 |
| AD-2138452.1 | ucagucUfuGfGfUfcaucuaugaa | 3871 | PuUfcauAfgaugaccAfaGfacugaca | 4971 |
| AD-2138453.1 | cagucuUfgGfUfCfaucuaugaca | 3872 | PuGfucaUfagaugacCfaAfgacugac | 4972 |
| AD-2138454.1 | agucuuGfgUfCfAfucuaugacaa | 3873 | PuUfgucAfuagaugaCfcAfagacuga | 4973 |
| AD-2138455.1 | ggaaucCfaGfAfUfgccgauaaaa | 3874 | PuUfuuaUfcggcaucUfgGfauuccug | 4974 |
| AD-2138456.1 | gaauccAfgAfUfGfccgauaaaga | 3875 | PuCfuuuAfucggcauCfuGfgauuccu | 4975 |
| AD-2138457.1 | ggugggAfgUfAfCfugcaaccuga | 3876 | PuCfaggUfugcaguaCfuCfccaccug | 4976 |
| AD-2138458.1 | gugggaGfuAfCfUfgcaaccugaa | 3877 | PuUfcagGfuugcaguAfcUfcccaccu | 4977 |
| AD-2138459.1 | ugggagUfaCfUfGfcaaccugaaa | 3878 | PuUfucaGfguugcagUfaCfucccacc | 4978 |
| AD-2138460.1 | gggaguAfcUfGfCfaaccugaaaa | 3879 | PuUfuucAfgguugcaGfuAfcucccac | 4979 |
| AD-2138461.1 | ggaguaCfuGfCfAfaccugaaaaa | 3880 | PuUfuuuCfagguugcAfgUfacuccca | 4980 |
| AD-2138462.1 | gaguacUfgCfAfAfccugaaaaaa | 3881 | PuUfuuuUfcagguugCfaGfuacuccc | 4981 |
| AD-2138463.1 | aguacuGfcAfAfCfcugaaaaaaa | 3882 | PuUfuuuUfucagguuGfcAfguacucc | 4982 |
| AD-2138464.1 | guacugCfaAfCfCfugaaaaaaua | 3883 | PuAfuuuUfuucagguUfgCfaguacuc | 4983 |
| AD-2138465.1 | uacugcAfaCfCfUfgaaaaaauga | 3884 | PuCfauuUfuuucaggUfuGfcaguacu | 4984 |
| AD-2138466.1 | acugcaAfcCfUfGfaaaaaaugca | 3885 | PuGfcauUfuuuucagGfuUfgcaguac | 4985 |
| AD-2138467.1 | cugcaaCfcUfGfAfaaaaaugcua | 3886 | PuAfgcaUfuuuuucaGfgUfugcagua | 4986 |
| AD-2138468.1 | ugcaacCfuGfAfAfaaaaugcuca | 3887 | PuGfagcAfuuuuuucAfgGfuugcagu | 4987 |
| AD-2138469.1 | gcaaccUfgAfAfAfaaaugcucaa | 3888 | PuUfgagCfauuuuuuCfaGfguugcag | 4988 |
| AD-2138470.1 | caaccuGfaAfAfAfaaugcucaga | 3889 | PuCfugaGfcauuuuuUfcAfgguugca | 4989 |
| AD-2138471.1 | aaccugAfaAfAfAfaugcucagga | 3890 | PuCfcugAfgcauuuuUfuCfagguugc | 4990 |
| AD-2138472.1 | accugaAfaAfAfAfugcucaggaa | 3891 | PuUfccuGfagcauuuUfuUfcagguug | 4991 |
| AD-2138473.1 | ccugaaAfaAfAfUfgcucaggaaa | 3892 | PuUfuccUfgagcauuUfuUfucagguu | 4992 |
| AD-2138474.1 | cugaaaAfaAfUfGfcucaggaaca | 3893 | PuGfuucCfugagcauUfuUfuucaggu | 4993 |
| AD-2138475.1 | ugaaaaAfaUfGfCfucaggaacaa | 3894 | PuUfguuCfcugagcaUfuUfuuucagg | 4994 |
| AD-2138476.1 | gaaaaaAfuGfCfUfcaggaacaga | 3895 | PuCfuguUfccugagcAfuUfuuuucag | 4995 |
| AD-2138477.1 | aaaaaaUfgCfUfCfaggaacagaa | 3896 | PuUfcugUfuccugagCfaUfuuuuuca | 4996 |
| AD-2138478.1 | aaaaauGfcUfCfAfggaacagaaa | 3897 | PuUfucuGfuuccugaGfcAfuuuuuuc | 4997 |
| AD-2138479.1 | aaaaugCfuCfAfGfgaacagaaga | 3898 | PuCfuucUfguuccugAfgCfauuuuuu | 4998 |
| AD-2138480.1 | aaaugcUfcAfGfGfaacagaagca | 3899 | PuGfcuuCfuguuccuGfaGfcauuuuu | 4999 |
| AD-2138481.1 | gcaccuCfcGfCfCfuguuguccua | 3900 | PuAfggaCfaacaggcGfgAfggugcua | 5000 |
| AD-2138482.1 | caccucCfgCfCfUfguuguccuga | 3901 | PuCfaggAfcaacaggCfgGfaggugcu | 5001 |
| AD-2138483.1 | ccuccgCfcUfGfUfuguccugcua | 3902 | PuAfgcaGfgacaacaGfgCfggaggug | 5002 |
| AD-2138484.1 | cuccgcCfuGfUfUfguccugcuua | 3903 | PuAfagcAfggacaacAfgGfcggaggu | 5003 |
| AD-2138485.1 | uccgccUfgUfUfGfuccugcuuca | 3904 | PuGfaagCfaggacaaCfaGfgcggagg | 5004 |
| AD-2138486.1 | ccgccuGfuUfGfUfccugcuucca | 3905 | PuGfgaaGfcaggacaAfcAfggcggag | 5005 |
| AD-2138487.1 | cgccugUfuGfUfCfcugcuuccaa | 3906 | PuUfggaAfgcaggacAfaCfaggcgga | 5006 |
| AD-2138488.1 | ccgaagAfaGfAfCfuguauguuua | 3907 | PuAfaacAfuacagucUfuCfuucggaa | 5007 |
| AD-2138489.1 | cgaagaAfgAfCfUfguauguuuga | 3908 | PuCfaaaCfauacaguCfuUfcuucgga | 5008 |
| AD-2138490.1 | gaagaaGfaCfUfGfuauguuugga | 3909 | PuCfcaaAfcauacagUfcUfucuucgg | 5009 |
| AD-2138491.1 | aagaagAfcUfGfUfauguuuggga | 3910 | PuCfccaAfacauacaGfuCfuucuucg | 5010 |
| AD-2138492.1 | gogaccAfcUfGfUfuacugggaca | 3911 | PuGfuccCfaguaacaGfuGfgucgccc | 5011 |
| AD-2138493.1 | cugggaCfgCfCfAfugccaggaca | 3912 | PuGfuccUfggcauggCfgUfcccagua | 5012 |
| AD-2138494.1 | ugggacGfcCfAfUfgccaggacua | 3913 | PuAfgucCfuggcaugGfcGfucccagu | 5013 |
| AD-2138495.1 | cauagaCfaCfAfGfcauuuucaca | 3914 | PuGfugaAfaaugcugUfgUfcuauggg | 5014 |
| AD-2138496.1 | auagacAfcAfGfCfauuuucacua | 3915 | PuAfgugAfaaaugcuGfuGfucuaugg | 5015 |
| AD-2138497.1 | uagacaCfaGfCfAfuuuucacuca | 3916 | PuGfaguGfaaaaugcUfgUfgucuaug | 5016 |
| AD-2138498.1 | agacacAfgCfAfUfuuucacucca | 3917 | PuGfgagUfgaaaaugCfuGfugucuau | 5017 |
| AD-2138499.1 | gacacaGfcAfUfUfuucacuccaa | 3918 | PuUfggaGfugaaaauGfcUfgugucua | 5018 |
| AD-2138500.1 | acacagCfaUfUfUfucacuccaga | 3919 | PuCfuggAfgugaaaaUfgCfugugucu | 5019 |
| AD-2138501.1 | cacagcAfuUfUfUfcacuccagaa | 3920 | PuUfcugGfagugaaaAfuGfcuguguc | 5020 |
| AD-2138502.1 | acagcaUfuUfUfCfacuccagaga | 3921 | PuCfucuGfgagugaaAfaUfgcugugu | 5021 |
| AD-2138503.1 | cagcauUfuUfCfAfcuccagagaa | 3922 | PuUfcucUfggagugaAfaAfugcugug | 5022 |
| AD-2138504.1 | agcauuUfuCfAfCfuccagagaca | 3923 | PuGfucuCfuggagugAfaAfaugcugu | 5023 |
| AD-2138505.1 | gcauuuUfcAfCfUfccagagacaa | 3924 | PuUfgucUfcuggaguGfaAfaaugcug | 5024 |
| AD-2138506.1 | cauuuuCfaCfUfCfcagagacaaa | 3925 | PuUfuguCfucuggagUfgAfaaaugcu | 5025 |
| AD-2138507.1 | auuuucAfcUfCfCfagagacaaaa | 3926 | PuUfuugUfcucuggaGfuGfaaaaugc | 5026 |
| AD-2138508.1 | uuuucaCfuCfCfAfgagacaaaua | 3927 | PuAfuuuGfucucuggAfgUfgaaaaug | 5027 |
| AD-2138509.1 | uuucacUfcCfAfGfagacaaauca | 3928 | PuGfauuUfgucucugGfaGfugaaaau | 5028 |
| AD-2138510.1 | uucacuCfcAfGfAfgacaaaucca | 3929 | PuGfgauUfugucucuGfgAfgugaaaa | 5029 |
| AD-2138511.1 | ucacucCfaGfAfGfacaaauccaa | 3930 | PuUfggaUfuugucucUfgGfagugaaa | 5030 |
| AD-2138512.1 | acgggcGfgGfUfCfuggaaaaaaa | 3931 | PuUfuuuUfuccagacCfcGfcccgugg | 5031 |
| AD-2138513.1 | cgggcgGfgUfCfUfggaaaaaaaa | 3932 | PuUfuuuUfuuccagaCfcCfgcccgug | 5032 |
| AD-2138514.1 | gggcggGfuCfUfGfgaaaaaaaua | 3933 | PuAfuuuUfuuuccagAfcCfcgcccgu | 5033 |
| AD-2138515.1 | ggcgggUfcUfGfGfaaaaaaauua | 3934 | PuAfauuUfuuuuccaGfaCfccgcccg | 5034 |
| AD-2138516.1 | gcggguCfuGfGfAfaaaaaauuaa | 3935 | PuUfaauUfuuuuuccAfgAfcccgccc | 5035 |
| AD-2138517.1 | cgggucUfgGfAfAfaaaaauuaca | 3936 | PuGfuaaUfuuuuuucCfaGfacccgcc | 5036 |
| AD-2138518.1 | gggucuGfgAfAfAfaaaauuacua | 3937 | PuAfguaAfuuuuuuuCfcAfgacccgc | 5037 |
| AD-2138519.1 | ggucugGfaAfAfAfaaauuacuga | 3938 | PuCfaguAfauuuuuuUfcCfagacccg | 5038 |
| AD-2138520.1 | gucuggAfaAfAfAfaauuacugca | 3939 | PuGfcagUfaauuuuuUfuCfcagaccc | 5039 |
| AD-2138521.1 | ucuggaAfaAfAfAfauuacugcca | 3940 | PuGfgcaGfuaauuuuUfuUfccagacc | 5040 |
| AD-2138522.1 | cuggaaAfaAfAfAfuuacugccga | 3941 | PuCfggcAfguaauuuUfuUfuccagac | 5041 |
| AD-2138523.1 | uggaaaAfaAfAfUfuacugccgua | 3942 | PuAfcggCfaguaauuUfuUfuuccaga | 5042 |
| AD-2138524.1 | cguaacCfcUfGfAfuggugaugua | 3943 | PuAfcauCfaccaucaGfgGfuuacggc | 5043 |
| AD-2138525.1 | aacccuGfaUfGfGfugauguagga | 3944 | PuCfcuaCfaucaccaUfcAfggguuac | 5044 |
| AD-2138526.1 | cccugaUfgGfUfGfauguagguga | 3945 | PuCfaccUfacaucacCfaUfcaggguu | 5045 |
| AD-2138527.1 | ccugauGfgUfGfAfuguaggugga | 3946 | PuCfcacCfuacaucaCfcAfucagggu | 5046 |
| AD-2138528.1 | uaggugGfuCfCfCfuggugcuaca | 3947 | PuGfuagCfaccagggAfcCfaccuaca | 5047 |
| AD-2138529.1 | agguggUfcCfCfUfggugcuacaa | 3948 | PuUfguaGfcaccaggGfaCfcaccuac | 5048 |
| AD-2138530.1 | guggucCfcUfGfGfugcuacacga | 3949 | PuCfgugUfagcaccaGfgGfaccaccu | 5049 |
| AD-2138531.1 | cuggugCfuAfCfAfcgacaaauca | 3950 | PuGfauuUfgucguguAfgCfaccaggg | 5050 |
| AD-2138532.1 | ggugcuAfcAfCfGfacaaauccaa | 3951 | PuUfggaUfuugucguGfuAfgcaccag | 5051 |
| AD-2138533.1 | gugcuaCfaCfGfAfcaaauccaaa | 3952 | PuUfuggAfuuugucgUfgUfagcacca | 5052 |
| AD-2138534.1 | ugcuacAfcGfAfCfaaauccaaga | 3953 | PuCfuugGfauuugucGfuGfuagcacc | 5053 |
| AD-2138535.1 | gcuacaCfgAfCfAfaauccaagaa | 3954 | PuUfcuuGfgauuuguCfgUfguagcac | 5054 |
| AD-2138536.1 | cuacacGfaCfAfAfauccaagaaa | 3955 | PuUfucuUfggauuugUfcGfuguagca | 5055 |
| AD-2138537.1 | uacacgAfcAfAfAfuccaagaaaa | 3956 | PuUfuucUfuggauuuGfuCfguguagc | 5056 |
| AD-2138538.1 | acacgaCfaAfAfUfccaagaaaaa | 3957 | PuUfuuuCfuuggauuUfgUfcguguag | 5057 |
| AD-2138539.1 | cacgacAfaAfUfCfcaagaaaaca | 3958 | PuGfuuuUfcuuggauUfuGfucgugua | 5058 |
| AD-2138540.1 | acgacaAfaUfCfCfaagaaaacua | 3959 | PuAfguuUfucuuggaUfuUfgucgugu | 5059 |
| AD-2138541.1 | cgacaaAfuCfCfAfagaaaacuua | 3960 | PuAfaguUfuucuuggAfuUfugucgug | 5060 |
| AD-2138542.1 | gacaaaUfcCfAfAfgaaaacuuua | 3961 | PuAfaagUfuuucuugGfaUfuugucgu | 5061 |
| AD-2138543.1 | acaaauCfcAfAfGfaaaacuuuaa | 3962 | PuUfaaaGfuuuucuuGfgAfuuugucg | 5062 |
| AD-2138544.1 | caaaucCfaAfGfAfaaacuuuaca | 3963 | PuGfuaaAfguuuucuUfgGfauuuguc | 5063 |
| AD-2138545.1 | aaauccAfaGfAfAfaacuuuacga | 3964 | PuCfguaAfaguuuucUfuGfgauuugu | 5064 |
| AD-2138546.1 | aauccaAfgAfAfAfacuuuacgaa | 3965 | PuUfcguAfaaguuuuCfuUfggauuug | 5065 |
| AD-2138547.1 | auccaaGfaAfAfAfcuuuacgaca | 3966 | PuGfucgUfaaaguuuUfcUfuggauuu | 5066 |
| AD-2138548.1 | uccaagAfaAfAfCfuuuacgacua | 3967 | PuAfgucGfuaaaguuUfuCfuuggauu | 5067 |
| AD-2138549.1 | ccaagaAfaAfCfUfuuacgacuaa | 3968 | PuUfaguCfguaaaguUfuUfcuuggau | 5068 |
| AD-2138550.1 | aagaaaAfcUfUfUfacgacuacua | 3969 | PuAfguaGfucguaaaGfuUfuucuugg | 5069 |
| AD-2138551.1 | agaaaaCfuUfUfAfcgacuacuga | 3970 | PuCfaguAfgucguaaAfgUfuuucuug | 5070 |
| AD-2138552.1 | gaaaacUfuUfAfCfgacuacugua | 3971 | PuAfcagUfagucguaAfaGfuuuucuu | 5071 |
| AD-2138553.1 | aaaacuUfuAfCfGfacuacuguga | 3972 | PuCfacaGfuagucguAfaAfguuuucu | 5072 |
| AD-2138554.1 | aaacuuUfaCfGfAfcuacugugaa | 3973 | PuUfcacAfguagucgUfaAfaguuuuc | 5073 |
| AD-2138555.1 | aacuuuAfcGfAfCfuacugugaua | 3974 | PuAfucaCfaguagucGfuAfaaguuuu | 5074 |
| AD-2138556.1 | acuuuaCfgAfCfUfacugugauga | 3975 | PuCfaucAfcaguaguCfgUfaaaguuu | 5075 |
| AD-2138557.1 | cuuuacGfaCfUfAfcugugaugua | 3976 | PuAfcauCfacaguagUfcGfuaaaguu | 5076 |
| AD-2138558.1 | uuuacgAfcUfAfCfugugauguca | 3977 | PuGfacaUfcacaguaGfuCfguaaagu | 5077 |
| AD-2138559.1 | gacuacUfgUfGfAfugucccucaa | 3978 | PuUfgagGfgacaucaCfaGfuagucgu | 5078 |
| AD-2138560.1 | cugugaUfgUfCfCfcucaguguga | 3979 | PuCfacaCfugagggaCfaUfcacagua | 5079 |
| AD-2138561.1 | auguccCfuCfAfGfugugcggcca | 3980 | PuGfgccGfcacacugAfgGfgacauca | 5080 |
| AD-2138562.1 | aagaaaUfgUfCfCfuggaagggua | 3981 | PuAfcccUfuccaggaCfaUfuucuucg | 5081 |
| AD-2138563.1 | gcccugGfcAfAfGfucagucuuaa | 3982 | PuUfaagAfcugacuuGfcCfagggcca | 5082 |
| AD-2138564.1 | ccuggcAfaGfUfCfagucuuagaa | 3983 | PuUfcuaAfgacugacUfuGfccagggc | 5083 |
| AD-2138565.1 | cuggcaAfgUfCfAfgucuuagaaa | 3984 | PuUfucuAfagacugaCfuUfgccaggg | 5084 |
| AD-2138566.1 | uggcaaGfuCfAfGfucuuagaaca | 3985 | PuGfuucUfaagacugAfcUfugccagg | 5085 |
| AD-2138567.1 | ggcaagUfcAfGfUfcuuagaacaa | 3986 | PuUfguuCfuaagacuGfaCfuugccag | 5086 |
| AD-2138568.1 | gcaaguCfaGfUfCfuuagaacaaa | 3987 | PuUfuguUfcuaagacUfgAfcuugcca | 5087 |
| AD-2138569.1 | caagucAfgUfCfUfuagaacaaga | 3988 | PuCfuugUfucuaagaCfuGfacuugcc | 5088 |
| AD-2138570.1 | aagucaGfuCfUfUfagaacaagga | 3989 | PuCfcuuGfuucuaagAfcUfgacuugc | 5089 |
| AD-2138571.1 | agucagUfcUfUfAfgaacaaggua | 3990 | PuAfccuUfguucuaaGfaCfugacuug | 5090 |
| AD-2138572.1 | gucaguCfuUfAfGfaacaagguua | 3991 | PuAfaccUfuguucuaAfgAfcugacuu | 5091 |
| AD-2138573.1 | ucagucUfuAfGfAfacaagguuua | 3992 | PuAfaacCfuuguucuAfaGfacugacu | 5092 |
| AD-2138574.1 | cagucuUfaGfAfAfcaagguuuga | 3993 | PuCfaaaCfcuuguucUfaAfgacugac | 5093 |
| AD-2138575.1 | agucuuAfgAfAfCfaagguuugga | 3994 | PuCfcaaAfccuuguuCfuAfagacuga | 5094 |
| AD-2138576.1 | gucuuaGfaAfCfAfagguuuggaa | 3995 | PuUfccaAfaccuuguUfcUfaagacug | 5095 |
| AD-2138577.1 | ucuuagAfaCfAfAfgguuuggaaa | 3996 | PuUfuccAfaaccuugUfuCfuaagacu | 5096 |
| AD-2138578.1 | cuuagaAfcAfAfGfguuuggaaua | 3997 | PuAfuucCfaaaccuuGfuUfcuaagac | 5097 |
| AD-2138579.1 | uuagaaCfaAfGfGfuuuggaauga | 3998 | PuCfauuCfcaaaccuUfgUfucuaaga | 5098 |
| AD-2138580.1 | uagaacAfaGfGfUfuuggaaugca | 3999 | PuGfcauUfccaaaccUfuGfuucuaag | 5099 |
| AD-2138581.1 | agaacaAfgGfUfUfuggaaugcaa | 4000 | PuUfgcaUfuccaaacCfuUfguucuaa | 5100 |
| AD-2138582.1 | gaacaaGfgUfUfUfggaaugcaca | 4001 | PuGfugcAfuuccaaaCfcUfuguucua | 5101 |
| AD-2138583.1 | aacaagGfuUfUfGfgaaugcacua | 4002 | PuAfgugCfauuccaaAfcCfuuguucu | 5102 |
| AD-2138584.1 | acaaggUfuUfGfGfaaugcacuua | 4003 | PuAfaguGfcauuccaAfaCfcuuguuc | 5103 |
| AD-2138585.1 | caagguUfuGfGfAfaugcacuuca | 4004 | PuGfaagUfgcauuccAfaAfccuuguu | 5104 |
| AD-2138586.1 | aagguuUfgGfAfAfugcacuucua | 4005 | PuAfgaaGfugcauucCfaAfaccuugu | 5105 |
| AD-2138587.1 | agguuuGfgAfAfUfgcacuucuga | 4006 | PuCfagaAfgugcauuCfcAfaaccuug | 5106 |
| AD-2138588.1 | gguuugGfaAfUfGfcacuucugua | 4007 | PuAfcagAfagugcauUfcCfaaaccuu | 5107 |
| AD-2138589.1 | uuggaaUfgCfAfCfuucuguggaa | 4008 | PuUfccaCfagaagugCfaUfuccaaac | 5108 |
| AD-2138590.1 | uggaauGfcAfCfUfucuguggaga | 4009 | PuCfuccAfcagaaguGfcAfuuccaaa | 5109 |
| AD-2138591.1 | gaaugcAfcUfUfCfuguggaggca | 4010 | PuGfccuCfcacagaaGfuGfcauucca | 5110 |
| AD-2138592.1 | cuguggAfgGfCfAfccuugauaua | 4011 | PuAfuauCfaaggugcCfuCfcacagaa | 5111 |
| AD-2138593.1 | uguggaGfgCfAfCfcuugauauca | 4012 | PuGfauaUfcaaggugCfcUfccacaga | 5112 |
| AD-2138594.1 | guggagGfcAfCfCfuugauaucca | 4013 | PuGfgauAfucaagguGfcCfuccacag | 5113 |
| AD-2138595.1 | uugacuGfcUfGfCfccacugcuua | 4014 | PuAfagcAfgugggcaGfcAfgucaaca | 5114 |
| AD-2138596.1 | ugacugCfuGfCfCfcacugcuuga | 4015 | PuCfaagCfagugggcAfgCfagucaac | 5115 |
| AD-2138597.1 | acugcuGfcCfCfAfcugcuuggaa | 4016 | PuUfccaAfgcaguggGfcAfgcaguca | 5116 |
| AD-2138598.1 | cugcugCfcCfAfCfugcuuggaga | 4017 | PuCfuccAfagcagugGfgCfagcaguc | 5117 |
| AD-2138599.1 | ugcugcCfcAfCfUfgcuuggagaa | 4018 | PuUfcucCfaagcaguGfgGfcagcagu | 5118 |
| AD-2138600.1 | cugcccAfcUfGfCfuuggagaaga | 4019 | PuCfuucUfccaagcaGfuGfggcagca | 5119 |
| AD-2138601.1 | ugcccaCfuGfCfUfuggagaagua | 4020 | PuAfcuuCfuccaagcAfgUfgggcagc | 5120 |
| AD-2138602.1 | cccacuGfcUfUfGfgagaagucca | 4021 | PuGfgacUfucuccaaGfcAfgugggca | 5121 |
| AD-2138603.1 | gugcacAfcCfAfAfgaagugaaua | 4022 | PuAfuucAfcuucuugGfuGfugcaccc | 5122 |
| AD-2138604.1 | gcacacCfaAfGfAfagugaaucua | 4023 | PuAfgauUfcacuucuUfgGfugugcac | 5123 |
| AD-2138605.1 | acaccaAfgAfAfGfugaaucucga | 4024 | PuCfgagAfuucacuuCfuUfggugugc | 5124 |
| AD-2138606.1 | caccaaGfaAfGfUfgaaucucgaa | 4025 | PuUfcgaGfauucacuUfcUfuggugug | 5125 |
| AD-2138607.1 | accaagAfaGfUfGfaaucucgaaa | 4026 | PuUfucgAfgauucacUfuCfuuggugu | 5126 |
| AD-2138608.1 | ugaaucUfcGfAfAfccgcauguua | 4027 | PuAfacaUfgcgguucGfaGfauucacu | 5127 |
| AD-2138609.1 | aaucucGfaAfCfCfgcauguucaa | 4028 | PuUfgaaCfaugcgguUfcGfagauuca | 5128 |
| AD-2138610.1 | cgaaccGfcAfUfGfuucaggaaaa | 4029 | PuUfuucCfugaacauGfcGfguucgag | 5129 |
| AD-2138611.1 | gaaccgCfaUfGfUfucaggaaaua | 4030 | PuAfuuuCfcugaacaUfgCfgguucga | 5130 |
| AD-2138612.1 | aaccgcAfuGfUfUfcaggaaauaa | 4031 | PuUfauuUfccugaacAfuGfcgguucg | 5131 |
| AD-2138613.1 | accgcaUfgUfUfCfaggaaauaga | 4032 | PuCfuauUfuccugaaCfaUfgcgguuc | 5132 |
| AD-2138614.1 | ccgcauGfuUfCfAfggaaauagaa | 4033 | PuUfcuaUfuuccugaAfcAfugcgguu | 5133 |
| AD-2138615.1 | uuggagCfcCfAfCfacgaaaagaa | 4034 | PuUfcuuUfucgugugGfgCfuccaaga | 5134 |
| AD-2138616.1 | uggagcCfcAfCfAfcgaaaagaua | 4035 | PuAfucuUfuucguguGfgGfcuccaag | 5135 |
| AD-2138617.1 | gagcccAfcAfCfGfaaaagauaua | 4036 | PuAfuauCfuuuucguGfuGfggcucca | 5136 |
| AD-2138618.1 | agcccaCfaCfGfAfaaagauauua | 4037 | PuAfauaUfcuuuucgUfgUfgggcucc | 5137 |
| AD-2138619.1 | gcccacAfcGfAfAfaagauauuga | 4038 | PuCfaauAfucuuuucGfuGfugggcuc | 5138 |
| AD-2138620.1 | cccacaCfgAfAfAfagauauugca | 4039 | PuGfcaaUfaucuuuuCfgUfgugggcu | 5139 |
| AD-2138621.1 | ccacacGfaAfAfAfgauauugcca | 4040 | PuGfgcaAfuaucuuuUfcGfugugggc | 5140 |
| AD-2138622.1 | cacacgAfaAfAfGfauauugccua | 4041 | PuAfggcAfauaucuuUfuCfguguggg | 5141 |
| AD-2138623.1 | acacgaAfaAfGfAfuauugccuua | 4042 | PuAfaggCfaauaucuUfuUfcgugugg | 5142 |
| AD-2138624.1 | cacgaaAfaGfAfUfauugccuuga | 4043 | PuCfaagGfcaauaucUfuUfucgugug | 5143 |
| AD-2138625.1 | acgaaaAfgAfUfAfuugccuugca | 4044 | PuGfcaaGfgcaauauCfuUfuucgugu | 5144 |
| AD-2138626.1 | cgaaaaGfaUfAfUfugccuugcua | 4045 | PuAfgcaAfggcaauaUfcUfuuucgug | 5145 |
| AD-2138627.1 | gaaaagAfuAfUfUfgccuugcuaa | 4046 | PuUfagcAfaggcaauAfuCfuuuucgu | 5146 |
| AD-2138628.1 | aaaagaUfaUfUfGfccuugcuaaa | 4047 | PuUfuagCfaaggcaaUfaUfcuuuucg | 5147 |
| AD-2138629.1 | aaagauAfuUfGfCfcuugcuaaaa | 4048 | PuUfuuaGfcaaggcaAfuAfucuuuuc | 5148 |
| AD-2138630.1 | aagauaUfuGfCfCfuugcuaaaga | 4049 | PuCfuuuAfgcaaggcAfaUfaucuuuu | 5149 |
| AD-2138631.1 | agauauUfgCfCfUfugcuaaagca | 4050 | PuGfcuuUfagcaaggCfaAfuaucuuu | 5150 |
| AD-2138632.1 | gauauuGfcCfUfUfgcuaaagcua | 4051 | PuAfgcuUfuagcaagGfcAfauaucuu | 5151 |
| AD-2138633.1 | auauugCfcUfUfGfcuaaagcuaa | 4052 | PuUfagcUfuuagcaaGfgCfaauaucu | 5152 |
| AD-2138634.1 | uauugcCfuUfGfCfuaaagcuaaa | 4053 | PuUfuagCfuuuagcaAfgGfcaauauc | 5153 |
| AD-2138635.1 | ccuugcUfaAfAfGfcuaagcagua | 4054 | PuAfcugCfuuagcuuUfaGfcaaggca | 5154 |
| AD-2138636.1 | cuugcuAfaAfGfCfuaagcaguca | 4055 | PuGfacuGfcuuagcuUfuAfgcaaggc | 5155 |
| AD-2138637.1 | ugcuaaAfgCfUfAfagcaguccua | 4056 | PuAfggaCfugcuuagCfuUfuagcaag | 5156 |
| AD-2138638.1 | cuaagcAfgUfCfCfugccgucaua | 4057 | PuAfugaCfggcaggaCfuGfcuuagcu | 5157 |
| AD-2138639.1 | agcaguCfcUfGfCfcgucaucaca | 4058 | PuGfugaUfgacggcaGfgAfcugcuua | 5158 |
| AD-2138640.1 | gcagucCfuGfCfCfgucaucacua | 4059 | PuAfgugAfugacggcAfgGfacugcuu | 5159 |
| AD-2138641.1 | caguccUfgCfCfGfucaucacuga | 4060 | PuCfaguGfaugacggCfaGfgacugcu | 5160 |
| AD-2138642.1 | ucaucaCfuGfAfCfaaaguaauca | 4061 | PuGfauuAfcuuugucAfgUfgaugacg | 5161 |
| AD-2138643.1 | caucacUfgAfCfAfaaguaaucca | 4062 | PuGfgauUfacuuuguCfaGfugaugac | 5162 |
| AD-2138644.1 | aucacuGfaCfAfAfaguaauccca | 4063 | PuGfggaUfuacuuugUfcAfgugauga | 5163 |
| AD-2138645.1 | ucacugAfcAfAfAfguaaucccaa | 4064 | PuUfgggAfuuacuuuGfuCfagugaug | 5164 |
| AD-2138646.1 | cacugaCfaAfAfGfuaaucccaga | 4065 | PuCfuggGfauuacuuUfgUfcagugau | 5165 |
| AD-2138647.1 | acugacAfaAfGfUfaaucccagca | 4066 | PuGfcugGfgauuacuUfuGfucaguga | 5166 |
| AD-2138648.1 | cugacaAfaGfUfAfaucccagcua | 4067 | PuAfgcuGfggauuacUfuUfgucagug | 5167 |
| AD-2138649.1 | ugacaaAfgUfAfAfucccagcuua | 4068 | PuAfagcUfgggauuaCfuUfugucagu | 5168 |
| AD-2138650.1 | gacaaaGfuAfAfUfcccagcuuga | 4069 | PuCfaagCfugggauuAfcUfuugucag | 5169 |
| AD-2138651.1 | acaaagUfaAfUfCfccagcuugua | 4070 | PuAfcaaGfcugggauUfaCfuuuguca | 5170 |
| AD-2138652.1 | caaaguAfaUfCfCfcagcuuguca | 4071 | PuGfacaAfgcugggaUfuAfcuuuguc | 5171 |
| AD-2138653.1 | aaaguaAfuCfCfCfagcuugucua | 4072 | PuAfgacAfagcugggAfuUfacuuugu | 5172 |
| AD-2138654.1 | uaauccCfaGfCfUfugucugccaa | 4073 | PuUfggcAfgacaagcUfgGfgauuacu | 5173 |
| AD-2138655.1 | aucccaGfcUfUfGfucugccauca | 4074 | PuGfaugGfcagacaaGfcUfgggauua | 5174 |
| AD-2138656.1 | cugaccGfgAfCfCfgaauguuuca | 4075 | PuGfaaaCfauucgguCfcGfgucagcg | 5175 |
| AD-2138657.1 | gaccggAfcCfGfAfauguuucaua | 4076 | PuAfugaAfacauucgGfuCfcggucag | 5176 |
| AD-2138658.1 | accggaCfcGfAfAfuguuucauca | 4077 | PuGfaugAfaacauucGfgUfccgguca | 5177 |
| AD-2138659.1 | ccggacCfgAfAfUfguuucaucaa | 4078 | PuUfgauGfaaacauuCfgGfuccgguc | 5178 |
| AD-2138660.1 | cggaccGfaAfUfGfuuucaucaca | 4079 | PuGfugaUfgaaacauUfcGfguccggu | 5179 |
| AD-2138661.1 | ggaccgAfaUfGfUfuucaucacua | 4080 | PuAfgugAfugaaacaUfuCfgguccgg | 5180 |
| AD-2138662.1 | gaccgaAfuGfUfUfucaucacuga | 4081 | PuCfaguGfaugaaacAfuUfcgguccg | 5181 |
| AD-2138663.1 | cgaaugUfuUfCfAfucacuggcua | 4082 | PuAfgccAfgugaugaAfaCfauucggu | 5182 |
| AD-2138664.1 | gagaaaCfcCfAfAfgguacuuuua | 4083 | PuAfaaaGfuaccuugGfgUfuucuccc | 5183 |
| AD-2138665.1 | agaaacCfcAfAfGfguacuuuuga | 4084 | PuCfaaaAfguaccuuGfgGfuuucucc | 5184 |
| AD-2138666.1 | gaaaccCfaAfGfGfuacuuuugga | 4085 | PuCfcaaAfaguaccuUfgGfguuucuc | 5185 |
| AD-2138667.1 | aaacccAfaGfGfUfacuuuuggaa | 4086 | PuUfccaAfaaguaccUfuGfgguuucu | 5186 |
| AD-2138668.1 | aacccaAfgGfUfAfcuuuuggaga | 4087 | PuCfuccAfaaaguacCfuUfggguuuc | 5187 |
| AD-2138669.1 | acccaaGfgUfAfCfuuuuggagca | 4088 | PuGfcucCfaaaaguaCfcUfuggguuu | 5188 |
| AD-2138670.1 | cccaagGfuAfCfUfuuuggagcua | 4089 | PuAfgcuCfcaaaaguAfcCfuuggguu | 5189 |
| AD-2138671.1 | caagguAfcUfUfUfuggagcugga | 4090 | PuCfcagCfuccaaaaGfuAfccuuggg | 5190 |
| AD-2138672.1 | acuuuuGfgAfGfCfuggccuucua | 4091 | PuAfgaaGfgccagcuCfcAfaaaguac | 5191 |
| AD-2138673.1 | uuuggaGfcUfGfGfccuucucaaa | 4092 | PuUfugaGfaaggccaGfcUfccaaaag | 5192 |
| AD-2138674.1 | uuggagCfuGfGfCfcuucucaaga | 4093 | PuCfuugAfgaaggccAfgCfuccaaaa | 5193 |
| AD-2138675.1 | uggagcUfgGfCfCfuucucaagga | 4094 | PuCfcuuGfagaaggcCfaGfcuccaaa | 5194 |
| AD-2138676.1 | ggagcuGfgCfCfUfucucaaggaa | 4095 | PuUfccuUfgagaaggCfcAfgcuccaa | 5195 |
| AD-2138677.1 | ggaagcCfcAfGfCfucccugugaa | 4096 | PuUfcacAfgggagcuGfgGfcuuccuu | 5196 |
| AD-2138678.1 | gaagccCfaGfCfUfcccugugaua | 4097 | PuAfucaCfagggagcUfgGfgcuuccu | 5197 |
| AD-2138679.1 | aagcccAfgCfUfCfccugugauua | 4098 | PuAfaucAfcagggagCfuGfggcuucc | 5198 |
| AD-2138680.1 | agcccaGfcUfCfCfcugugauuga | 4099 | PuCfaauCfacagggaGfcUfgggcuuc | 5199 |
| AD-2138681.1 | gcccagCfuCfCfCfugugauugaa | 4100 | PuUfcaaUfcacagggAfgCfugggcuu | 5200 |
| AD-2138682.1 | cccagcUfcCfCfUfgugauugaga | 4101 | PuCfucaAfucacaggGfaGfcugggcu | 5201 |
| AD-2138683.1 | ccagcuCfcCfUfGfugauugagaa | 4102 | PuUfcucAfaucacagGfgAfgcugggc | 5202 |
| AD-2138684.1 | cagcucCfcUfGfUfgauugagaaa | 4103 | PuUfucuCfaaucacaGfgGfagcuggg | 5203 |
| AD-2138685.1 | agcuccCfuGfUfGfauugagaaua | 4104 | PuAfuucUfcaaucacAfgGfgagcugg | 5204 |
| AD-2138686.1 | gcucccUfgUfGfAfuugagaauaa | 4105 | PuUfauuCfucaaucaCfaGfggagcug | 5205 |
| AD-2138687.1 | cucccuGfuGfAfUfugagaauaaa | 4106 | PuUfuauUfcucaaucAfcAfgggagcu | 5206 |
| AD-2138688.1 | ucccugUfgAfUfUfgagaauaaaa | 4107 | PuUfuuaUfucucaauCfaCfagggagc | 5207 |
| AD-2138689.1 | cccuguGfaUfUfGfagaauaaaga | 4108 | PuCfuuuAfuucucaaUfcAfcagggag | 5208 |
| AD-2138690.1 | ccugugAfuUfGfAfgaauaaagua | 4109 | PuAfcuuUfauucucaAfuCfacaggga | 5209 |
| AD-2138691.1 | cugugaUfuGfAfGfaauaaaguga | 4110 | PuCfacuUfuauucucAfaUfcacaggg | 5210 |
| AD-2138692.1 | ugugauUfgAfGfAfauaaagugua | 4111 | PuAfcacUfuuauucuCfaAfucacagg | 5211 |
| AD-2138693.1 | gugauuGfaGfAfAfuaaaguguga | 4112 | PuCfacaCfuuuauucUfcAfaucacag | 5212 |
| AD-2138694.1 | ugauugAfgAfAfUfaaagugugca | 4113 | PuGfcacAfcuuuauuCfuCfaaucaca | 5213 |
| AD-2138695.1 | gauugaGfaAfUfAfaagugugcaa | 4114 | PuUfgcaCfacuuuauUfcUfcaaucac | 5214 |
| AD-2138696.1 | auugagAfaUfAfAfagugugcaaa | 4115 | PuUfugcAfcacuuuaUfuCfucaauca | 5215 |
| AD-2138697.1 | uugagaAfuAfAfAfgugugcaaua | 4116 | PuAfuugCfacacuuuAfuUfcucaauc | 5216 |
| AD-2138698.1 | ugagaaUfaAfAfGfugugcaauca | 4117 | PuGfauuGfcacacuuUfaUfucucaau | 5217 |
| AD-2138699.1 | gagaauAfaAfGfUfgugcaaucga | 4118 | PuCfgauUfgcacacuUfuAfuucucaa | 5218 |
| AD-2138700.1 | gaauaaAfgUfGfUfgcaaucgcua | 4119 | PuAfgcgAfuugcacaCfuUfuauucuc | 5219 |
| AD-2138701.1 | aauaaaGfuGfUfGfcaaucgcuaa | 4120 | PuUfagcGfauugcacAfcUfuuauucu | 5220 |
| AD-2138702.1 | auaaagUfgUfGfCfaaucgcuaua | 4121 | PuAfuagCfgauugcaCfaCfuuuauuc | 5221 |
| AD-2138703.1 | uaaaguGfuGfCfAfaucgcuauga | 4122 | PuCfauaGfcgauugcAfcAfcuuuauu | 5222 |
| AD-2138704.1 | aaagugUfgCfAfAfucgcuaugaa | 4123 | PuUfcauAfgcgauugCfaCfacuuuau | 5223 |
| AD-2138705.1 | aaguguGfcAfAfUfcgcuaugaga | 4124 | PuCfucaUfagcgauuGfcAfcacuuua | 5224 |
| AD-2138706.1 | agugugCfaAfUfCfgcuaugagua | 4125 | PuAfcucAfuagcgauUfgCfacacuuu | 5225 |
| AD-2138707.1 | gugugcAfaUfCfGfcuaugaguua | 4126 | PuAfacuCfauagcgaUfuGfcacacuu | 5226 |
| AD-2138708.1 | ugugcaAfuCfGfCfuaugaguuua | 4127 | PuAfaacUfcauagcgAfuUfgcacacu | 5227 |
| AD-2138709.1 | gugcaaUfcGfCfUfaugaguuuca | 4128 | PuGfaaaCfucauagcGfaUfugcacac | 5228 |
| AD-2138710.1 | ugcaauCfgCfUfAfugaguuucua | 4129 | PuAfgaaAfcucauagCfgAfuugcaca | 5229 |
| AD-2138711.1 | caaucgCfuAfUfGfaguuucugaa | 4130 | PuUfcagAfaacucauAfgCfgauugca | 5230 |
| AD-2138712.1 | aaucgcUfaUfGfAfguuucugaaa | 4131 | PuUfucaGfaaacucaUfaGfcgauugc | 5231 |
| AD-2138713.1 | aucgcuAfuGfAfGfuuucugaaua | 4132 | PuAfuucAfgaaacucAfuAfgcgauug | 5232 |
| AD-2138714.1 | ucgcuaUfgAfGfUfuucugaauga | 4133 | PuCfauuCfagaaacuCfaUfagcgauu | 5233 |
| AD-2138715.1 | cgcuauGfaGfUfUfucugaaugga | 4134 | PuCfcauUfcagaaacUfcAfuagcgau | 5234 |
| AD-2138716.1 | gcuaugAfgUfUfUfcugaauggaa | 4135 | PuUfccaUfucagaaaCfuCfauagcga | 5235 |
| AD-2138717.1 | cuaugaGfuUfUfCfugaauggaaa | 4136 | PuUfuccAfuucagaaAfcUfcauagcg | 5236 |
| AD-2138718.1 | uaugagUfuUfCfUfgaauggaaga | 4137 | PuCfuucCfauucagaAfaCfucauagc | 5237 |
| AD-2138719.1 | augaguUfuCfUfGfaauggaagaa | 4138 | PuUfcuuCfcauucagAfaAfcucauag | 5238 |
| AD-2138720.1 | ugaguuUfcUfGfAfauggaagaga | 4139 | PuCfucuUfccauucaGfaAfacucaua | 5239 |
| AD-2138721.1 | gaguuuCfuGfAfAfuggaagagua | 4140 | PuAfcucUfuccauucAfgAfaacucau | 5240 |
| AD-2138722.1 | guuucuGfaAfUfGfgaagagucca | 4141 | PuGfgacUfcuuccauUfcAfgaaacuc | 5241 |
| AD-2138723.1 | uuucugAfaUfGfGfaagaguccaa | 4142 | PuUfggaCfucuuccaUfuCfagaaacu | 5242 |
| AD-2138724.1 | uucugaAfuGfGfAfagaguccaaa | 4143 | PuUfuggAfcucuuccAfuUfcagaaac | 5243 |
| AD-2138725.1 | ucugaaUfgGfAfAfgaguccaaua | 4144 | PuAfuugGfacucuucCfaUfucagaaa | 5244 |
| AD-2138726.1 | cugaauGfgAfAfGfaguccaauca | 4145 | PuGfauuGfgacucuuCfcAfuucagaa | 5245 |
| AD-2138727.1 | gaauggAfaGfAfGfuccaauccaa | 4146 | PuUfggaUfuggacucUfuCfcauucag | 5246 |
| AD-2138728.1 | gaacucUfgUfGfCfugggcauuua | 4147 | PuAfaauGfcccagcaCfaGfaguucgg | 5247 |
| AD-2138729.1 | aacucuGfuGfCfUfgggcauuuga | 4148 | PuCfaaaUfgcccagcAfcAfgaguucg | 5248 |
| AD-2138730.1 | cucuguGfcUfGfGfgcauuuggca | 4149 | PuGfccaAfaugcccaGfcAfcagaguu | 5249 |
| AD-2138731.1 | ucugugCfuGfGfGfcauuuggcca | 4150 | PuGfgccAfaaugcccAfgCfacagagu | 5250 |
| AD-2138732.1 | ugugcuGfgGfCfAfuuuggccgga | 4151 | PuCfcggCfcaaaugcCfcAfgcacaga | 5251 |
| AD-2138733.1 | gugcugGfgCfAfUfuuggccggaa | 4152 | PuUfccgGfccaaaugCfcCfagcacag | 5252 |
| AD-2138734.1 | ugcuggGfcAfUfUfuggccggaga | 4153 | PuCfuccGfgccaaauGfcCfcagcaca | 5253 |
| AD-2138735.1 | cuucgaGfaAfGfGfacaaauacaa | 4154 | PuUfguaUfuuguccuUfcUfcgaagca | 5254 |
| AD-2138736.1 | uucgagAfaGfGfAfcaaauacaua | 4155 | PuAfuguAfuuuguccUfuCfucgaagc | 5255 |
| AD-2138737.1 | ucgagaAfgGfAfCfaaauacauua | 4156 | PuAfaugUfauuugucCfuUfcucgaag | 5256 |
| AD-2138738.1 | cgagaaGfgAfCfAfaauacauuua | 4157 | PuAfaauGfuauuuguCfcUfucucgaa | 5257 |
| AD-2138739.1 | gagaagGfaCfAfAfauacauuuua | 4158 | PuAfaaaUfguauuugUfcCfuucucga | 5258 |
| AD-2138740.1 | agaaggAfcAfAfAfuacauuuuaa | 4159 | PuUfaaaAfuguauuuGfuCfcuucucg | 5259 |
| AD-2138741.1 | gaaggaCfaAfAfUfacauuuuaca | 4160 | PuGfuaaAfauguauuUfgUfccuucuc | 5260 |
| AD-2138742.1 | aaggacAfaAfUfAfcauuuuacaa | 4161 | PuUfguaAfaauguauUfuGfuccuucu | 5261 |
| AD-2138743.1 | aggacaAfaUfAfCfauuuuacaaa | 4162 | PuUfuguAfaaauguaUfuUfguccuuc | 5262 |
| AD-2138744.1 | ggacaaAfuAfCfAfuuuuacaaga | 4163 | PuCfuugUfaaaauguAfuUfuguccuu | 5263 |
| AD-2138745.1 | gacaaaUfaCfAfUfuuuacaagga | 4164 | PuCfcuuGfuaaaaugUfaUfuuguccu | 5264 |
| AD-2138746.1 | acaaauAfcAfUfUfuuacaaggaa | 4165 | PuUfccuUfguaaaauGfuAfuuugucc | 5265 |
| AD-2138747.1 | aauaagCfcUfGfGfugucuaugua | 4166 | PuAfcauAfgacaccaGfgCfuuauugg | 5266 |
| AD-2138748.1 | auaagcCfuGfGfUfgucuauguua | 4167 | PuAfacaUfagacaccAfgGfcuuauug | 5267 |
| AD-2138749.1 | uaagccUfgGfUfGfucuauguuca | 4168 | PuGfaacAfuagacacCfaGfgcuuauu | 5268 |
| AD-2138750.1 | agccugGfuGfUfCfuauguucgua | 4169 | PuAfcgaAfcauagacAfcCfaggcuua | 5269 |
| AD-2138751.1 | ccugguGfuCfUfAfuguucgugua | 4170 | PuAfcacGfaacauagAfcAfccaggcu | 5270 |
| AD-2138752.1 | cuggugUfcUfAfUfguucguguua | 4171 | PuAfacaCfgaacauaGfaCfaccaggc | 5271 |
| AD-2138753.1 | ugguguCfuAfUfGfuucguguuua | 4172 | PuAfaacAfcgaacauAfgAfcaccagg | 5272 |
| AD-2138754.1 | ggugucUfaUfGfUfucguguuuca | 4173 | PuGfaaaCfacgaacaUfaGfacaccag | 5273 |
| AD-2138755.1 | gugucuAfuGfUfUfcguguuucaa | 4174 | PuUfgaaAfcacgaacAfuAfgacacca | 5274 |
| AD-2138756.1 | ugucuaUfgUfUfCfguguuucaaa | 4175 | PuUfugaAfacacgaaCfaUfagacacc | 5275 |
| AD-2138757.1 | gucuauGfuUfCfGfuguuucaaga | 4176 | PuCfuugAfaacacgaAfcAfuagacac | 5276 |
| AD-2138758.1 | ucuaugUfuCfGfUfguuucaagga | 4177 | PuCfcuuGfaaacacgAfaCfauagaca | 5277 |
| AD-2138759.1 | cuauguUfcGfUfGfuuucaaggua | 4178 | PuAfccuUfgaaacacGfaAfcauagac | 5278 |
| AD-2138760.1 | uauguuCfgUfGfUfuucaagguua | 4179 | PuAfaccUfugaaacaCfgAfacauaga | 5279 |
| AD-2138761.1 | auguucGfuGfUfUfucaagguuua | 4180 | PuAfaacCfuugaaacAfcGfaacauag | 5280 |
| AD-2138762.1 | uguucgUfgUfUfUfcaagguuuga | 4181 | PuCfaaaCfcuugaaaCfaCfgaacaua | 5281 |
| AD-2138763.1 | guucguGfuUfUfCfaagguuugua | 4182 | PuAfcaaAfccuugaaAfcAfcgaacau | 5282 |
| AD-2138764.1 | uucgugUfuUfCfAfagguuuguua | 4183 | PuAfacaAfaccuugaAfaCfacgaaca | 5283 |
| AD-2138765.1 | ucguguUfuCfAfAfgguuuguuaa | 4184 | PuUfaacAfaaccuugAfaAfcacgaac | 5284 |
| AD-2138766.1 | cguguuUfcAfAfGfguuuguuaca | 4185 | PuGfuaaCfaaaccuuGfaAfacacgaa | 5285 |
| AD-2138767.1 | guguuuCfaAfGfGfuuuguuacua | 4186 | PuAfguaAfcaaaccuUfgAfaacacga | 5286 |
| AD-2138768.1 | uguuucAfaGfGfUfuuguuacuua | 4187 | PuAfaguAfacaaaccUfuGfaaacacg | 5287 |
| AD-2138769.1 | guuucaAfgGfUfUfuguuacuuga | 4188 | PuCfaagUfaacaaacCfuUfgaaacac | 5288 |
| AD-2138770.1 | uuucaaGfgUfUfUfguuacuugga | 4189 | PuCfcaaGfuaacaaaCfcUfugaaaca | 5289 |
| AD-2138771.1 | uucaagGfuUfUfGfuuacuuggaa | 4190 | PuUfccaAfguaacaaAfcCfuugaaac | 5290 |
| AD-2138772.1 | ucaaggUfuUfGfUfuacuuggaua | 4191 | PuAfuccAfaguaacaAfaCfcuugaaa | 5291 |
| AD-2138773.1 | uguuacUfuGfGfAfuugagggaga | 4192 | PuCfuccCfucaauccAfaGfuaacaaa | 5292 |
| AD-2138774.1 | guuacuUfgGfAfUfugagggagua | 4193 | PuAfcucCfcucaaucCfaAfguaacaa | 5293 |
| AD-2138775.1 | uacuugGfaUfUfGfagggagugaa | 4194 | PuUfcacUfcccucaaUfcCfaaguaac | 5294 |
| AD-2138776.1 | acuuggAfuUfGfAfgggagugaua | 4195 | PuAfucaCfucccucaAfuCfcaaguaa | 5295 |
| AD-2138777.1 | cuuggaUfuGfAfGfggagugauga | 4196 | PuCfaucAfcucccucAfaUfccaagua | 5296 |
| AD-2138778.1 | uuggauUfgAfGfGfgagugaugaa | 4197 | PuUfcauCfacucccuCfaAfuccaagu | 5297 |
| AD-2138779.1 | uggauuGfaGfGfGfagugaugaga | 4198 | PuCfucaUfcacucccUfcAfauccaag | 5298 |
| AD-2138780.1 | ggauugAfgGfGfAfgugaugagaa | 4199 | PuUfcucAfucacuccCfuCfaauccaa | 5299 |
| AD-2138781.1 | gauugaGfgGfAfGfugaugagaaa | 4200 | PuUfucuCfaucacucCfcUfcaaucca | 5300 |
| AD-2138782.1 | auugagGfgAfGfUfgaugagaaaa | 4201 | PuUfuucUfcaucacuCfcCfucaaucc | 5301 |
| AD-2138783.1 | uugaggGfaGfUfGfaugagaaaua | 4202 | PuAfuuuCfucaucacUfcCfcucaauc | 5302 |
| AD-2138784.2 | ugagggAfgUfGfAfugagaaauaa | 4203 | PuUfauuUfcucaucaCfuCfccucaau | 5303 |
| AD-2138785.2 | gagggaGfuGfAfUfgagaaauaaa | 4204 | PuUfuauUfucucaucAfcUfcccucaa | 5304 |
| AD-2138787.2 | gggaguGfaUfGfAfgaaauaauua | 4205 | PuAfauuAfuuucucaUfcAfcucccuc | 5305 |
| AD-2138789.2 | gagugaUfgAfGfAfaauaauuaaa | 4206 | PuUfuaaUfuauuucuCfaUfcacuccc | 5306 |
| AD-2138790.2 | agugauGfaGfAfAfauaauuaaua | 4207 | PuAfuuaAfuuauuucUfcAfucacucc | 5307 |
| AD-2138791.2 | gugaugAfgAfAfAfuaauuaauua | 4208 | PuAfauuAfauuauuuCfuCfaucacuc | 5308 |
| AD-2138792.2 | ugaugaGfaAfAfUfaauuaauuga | 4209 | PuCfaauUfaauuauuUfcUfcaucacu | 5309 |
| AD-2138793.2 | gaugagAfaAfUfAfauuaauugga | 4210 | PuCfcaaUfuaauuauUfuCfucaucac | 5310 |
| AD-2138794.2 | augagaAfaUfAfAfuuaauuggaa | 4211 | PuUfccaAfuuaauuaUfuUfcucauca | 5311 |
| AD-2138795.2 | uggacgGfgAfGfAfcagagugaca | 4212 | PuGfucaCfucugucuCfcCfguccaau | 5312 |
| AD-2138796.2 | ggacggGfaGfAfCfagagugacga | 4213 | PuCfgucAfcucugucUfcCfcguccaa | 5313 |
| AD-2138797.2 | gacgggAfgAfCfAfgagugacgca | 4214 | PuGfcguCfacucuguCfuCfccgucca | 5314 |
| AD-2138798.2 | acgggaGfaCfAfGfagugacgcaa | 4215 | PuUfgcgUfcacucugUfcUfcccgucc | 5315 |
| AD-2138800.2 | agacagAfgUfGfAfcgcacugaca | 4216 | PuGfucaGfugcgucaCfuCfugucucc | 5316 |
| AD-2138802.2 | acagagUfgAfCfGfcacugacuca | 4217 | PuGfaguCfagugcguCfaCfucugucu | 5317 |
| AD-2138804.2 | agagugAfcGfCfAfcugacucaca | 4218 | PuGfugaGfucagugcGfuCfacucugu | 5318 |
| AD-2138805.2 | gagugaCfgCfAfCfugacucacca | 4219 | PuGfgugAfgucagugCfgUfcacucug | 5319 |
| AD-2138806.2 | agugacGfcAfCfUfgacucaccua | 4220 | PuAfgguGfagucaguGfcGfucacucu | 5320 |
| AD-2138807.2 | ugacgcAfcUfGfAfcucaccuaga | 4221 | PuCfuagGfugagucaGfuGfcgucacu | 5321 |
| AD-2138808.2 | gacgcaCfuGfAfCfucaccuagaa | 4222 | PuUfcuaGfgugagucAfgUfgcgucac | 5322 |
| AD-2138809.2 | acgcacUfgAfCfUfcaccuagaga | 4223 | PuCfucuAfggugaguCfaGfugcguca | 5323 |
| AD-2138810.2 | cgcacuGfaCfUfCfaccuagagga | 4224 | PuCfcucUfaggugagUfcAfgugcguc | 5324 |
| AD-2138811.2 | gcacugAfcUfCfAfccuagaggca | 4225 | PuGfccuCfuaggugaGfuCfagugcgu | 5325 |
| AD-2138812.2 | cacugaCfuCfAfCfcuagaggcua | 4226 | PuAfgccUfcuaggugAfgUfcagugcg | 5326 |
| AD-2138813.2 | acugacUfcAfCfCfuagaggcuga | 4227 | PuCfagcCfucuagguGfaGfucagugc | 5327 |
| AD-2138814.2 | gaacguGfgGfUfAfgggauuuaga | 4228 | PuCfuaaAfucccuacCfcAfcguucca | 5328 |
| AD-2138816.2 | acguggGfuAfGfGfgauuuagcaa | 4229 | PuUfgcuAfaaucccuAfcCfcacguuc | 5329 |
| AD-2138819.2 | uggguaGfgGfAfUfuuagcaugca | 4230 | PuGfcauGfcuaaaucCfcUfacccacg | 5330 |
| AD-2138820.2 | ggguagGfgAfUfUfuagcaugcua | 4231 | PuAfgcaUfgcuaaauCfcCfuacccac | 5331 |
| AD-2138821.2 | gguaggGfaUfUfUfagcaugcuga | 4232 | PuCfagcAfugcuaaaUfcCfcuaccca | 5332 |
| AD-2138822.2 | guagggAfuUfUfAfgcaugcugga | 4233 | PuCfcagCfaugcuaaAfuCfccuaccc | 5333 |
| AD-2138823.2 | uagggaUfuUfAfGfcaugcuggaa | 4234 | PuUfccaGfcaugcuaAfaUfcccuacc | 5334 |
| AD-2138824.2 | uuuagcAfuGfCfUfggaaauaaca | 4235 | PuGfuuaUfuuccagcAfuGfcuaaauc | 5335 |
| AD-2138825.2 | uuagcaUfgCfUfGfgaaauaacua | 4236 | PuAfguuAfuuuccagCfaUfgcuaaau | 5336 |
| AD-2138826.2 | uagcauGfcUfGfGfaaauaacuga | 4237 | PuCfaguUfauuuccaGfcAfugcuaaa | 5337 |
| AD-2138827.2 | agcaugCfuGfGfAfaauaacugga | 4238 | PuCfcagUfuauuuccAfgCfaugcuaa | 5338 |
| AD-2138828.2 | gcaugcUfgGfAfAfauaacuggca | 4239 | PuGfccaGfuuauuucCfaGfcaugcua | 5339 |
| AD-2138829.2 | caugcuGfgAfAfAfuaacuggcaa | 4240 | PuUfgccAfguuauuuCfcAfgcaugcu | 5340 |
| AD-2138830.2 | augcugGfaAfAfUfaacuggcaga | 4241 | PuCfugcCfaguuauuUfcCfagcaugc | 5341 |
| AD-2138831.2 | ugcuggAfaAfUfAfacuggcagua | 4242 | PuAfcugCfcaguuauUfuCfcagcaug | 5342 |
| AD-2138832.2 | gcuggaAfaUfAfAfcuggcaguaa | 4243 | PuUfacuGfccaguuaUfuUfccagcau | 5343 |
| AD-2138833.2 | cuggaaAfuAfAfCfuggcaguaaa | 4244 | PuUfuacUfgccaguuAfuUfuccagca | 5344 |
| AD-2138834.2 | uggaaaUfaAfCfUfggcaguaaua | 4245 | PuAfuuaCfugccaguUfaUfuuccagc | 5345 |
| AD-2138835.2 | ggaaauAfaCfUfGfgcaguaauca | 4246 | PuGfauuAfcugccagUfuAfuuuccag | 5346 |
| AD-2138836.2 | gaaauaAfcUfGfGfcaguaaucaa | 4247 | PuUfgauUfacugccaGfuUfauuucca | 5347 |
| AD-2138837.2 | aaauaaCfuGfGfCfaguaaucaaa | 4248 | PuUfugaUfuacugccAfgUfuauuucc | 5348 |
| AD-2138838.2 | aauaacUfgGfCfAfguaaucaaaa | 4249 | PuUfuugAfuuacugcCfaGfuuauuuc | 5349 |
| AD-2138839.2 | auaacuGfgCfAfGfuaaucaaaca | 4250 | PuGfuuuGfauuacugCfcAfguuauuu | 5350 |
| AD-2138840.2 | aacuggCfaGfUfAfaucaaacgaa | 4251 | PuUfcguUfugauuacUfgCfcaguuau | 5351 |
| AD-2138841.2 | acuggcAfgUfAfAfucaaacgaaa | 4252 | PuUfucgUfuugauuaCfuGfccaguua | 5352 |
| AD-2138842.2 | cuggcaGfuAfAfUfcaaacgaaga | 4253 | PuCfuucGfuuugauuAfcUfgccaguu | 5353 |
| AD-2138843.2 | uggcagUfaAfUfCfaaacgaagaa | 4254 | PuUfcuuCfguuugauUfaCfugccagu | 5354 |
| AD-2138844.2 | ggcaguAfaUfCfAfaacgaagaca | 4255 | PuGfucuUfcguuugaUfuAfcugccag | 5355 |
| AD-2138845.2 | gcaguaAfuCfAfAfacgaagacaa | 4256 | PuUfgucUfucguuugAfuUfacugcca | 5356 |
| AD-2138847.2 | aguaauCfaAfAfCfgaagacacua | 4257 | PuAfgugUfcuucguuUfgAfuuacugc | 5357 |
| AD-2138848.2 | aaucaaAfcGfAfAfgacacuguca | 4258 | PuGfacaGfugucuucGfuUfugauuac | 5358 |
| AD-2138849.2 | aucaaaCfgAfAfGfacacugucca | 4259 | PuGfgacAfgugucuuCfgUfuugauua | 5359 |
| AD-2138850.2 | acgccaAfaCfCfUfcggcauuuua | 4260 | PuAfaaaUfgccgaggUfuUfggcguag | 5360 |
| AD-2138851.2 | cgccaaAfcCfUfCfggcauuuuua | 4261 | PuAfaaaAfugccgagGfuUfuggcgua | 5361 |
| AD-2138852.2 | gccaaaCfcUfCfGfgcauuuuuua | 4262 | PuAfaaaAfaugccgaGfgUfuuggcgu | 5362 |
| AD-2138853.2 | ccaaacCfuCfGfGfcauuuuuuga | 4263 | PuCfaaaAfaaugccgAfgGfuuuggcg | 5363 |
| AD-2138854.2 | caaaccUfcGfGfCfauuuuuugua | 4264 | PuAfcaaAfaaaugccGfaGfguuuggc | 5364 |
| AD-2138855.2 | aaaccuCfgGfCfAfuuuuuuguga | 4265 | PuCfacaAfaaaaugcCfgAfgguuugg | 5365 |
| AD-2138856.2 | aaccucGfgCfAfUfuuuuugugua | 4266 | PuAfcacAfaaaaaugCfcGfagguuug | 5366 |
| AD-2138857.2 | accucgGfcAfUfUfuuuuguguua | 4267 | PuAfacaCfaaaaaauGfcCfgagguuu | 5367 |
| AD-2138858.2 | ccucggCfaUfUfUfuuuguguuaa | 4268 | PuUfaacAfcaaaaaaUfgCfcgagguu | 5368 |
| AD-2138859.2 | cucggcAfuUfUfUfuuguguuaua | 4269 | PuAfuaaCfacaaaaaAfuGfccgaggu | 5369 |
| AD-2138860.2 | ucggcaUfuUfUfUfuguguuauua | 4270 | PuAfauaAfcacaaaaAfaUfgccgagg | 5370 |
| AD-2138861.2 | ggcauuUfuUfUfGfuguuauuuua | 4271 | PuAfaaaUfaacacaaAfaAfaugccga | 5371 |
| AD-2138862.2 | gcauuuUfuUfGfUfguuauuuuca | 4272 | PuGfaaaAfuaacacaAfaAfaaugccg | 5372 |
| AD-2138863.2 | cauuuuUfuGfUfGfuuauuuucua | 4273 | PuAfgaaAfauaacacAfaAfaaaugcc | 5373 |
| AD-2138864.2 | uuugugUfuAfUfUfuucugacuga | 4274 | PuCfaguCfagaaaauAfaCfacaaaaa | 5374 |
| AD-2138865.2 | uuguguUfaUfUfUfucugacugca | 4275 | PuGfcagUfcagaaaaUfaAfcacaaaa | 5375 |
| AD-2138866.2 | uguguuAfuUfUfUfcugacugcua | 4276 | PuAfgcaGfucagaaaAfuAfacacaaa | 5376 |
| AD-2138867.2 | guguuaUfuUfUfCfugacugcuga | 4277 | PuCfagcAfgucagaaAfaUfaacacaa | 5377 |
| AD-2138868.2 | uguuauUfuUfCfUfgacugcugga | 4278 | PuCfcagCfagucagaAfaAfuaacaca | 5378 |
| AD-2138869.2 | guuauuUfuCfUfGfacugcuggaa | 4279 | PuUfccaGfcagucagAfaAfauaacac | 5379 |
| AD-2138870.2 | uuauuuUfcUfGfAfcugcuggaua | 4280 | PuAfuccAfgcagucaGfaAfaauaaca | 5380 |
| AD-2138871.2 | uauuuuCfuGfAfCfugcuggauua | 4281 | PuAfaucCfagcagucAfgAfaaauaac | 5381 |
| AD-2138872.2 | auuuucUfgAfCfUfgcuggauuca | 4282 | PuGfaauCfcagcaguCfaGfaaaauaa | 5382 |
| AD-2138873.2 | ucugacUfgCfUfGfgauucuguaa | 4283 | PuUfacaGfaauccagCfaGfucagaaa | 5383 |
| AD-2138874.2 | aguaagGfuGfAfCfauagcuauga | 4284 | PuCfauaGfcuaugucAfcCfuuacuac | 5384 |
| AD-2138875.2 | guaaggUfgAfCfAfuagcuaugaa | 4285 | PuUfcauAfgcuauguCfaCfcuuacua | 5385 |
| AD-2138876.2 | uaagguGfaCfAfUfagcuaugaca | 4286 | PuGfucaUfagcuaugUfcAfccuuacu | 5386 |
| AD-2138877.2 | aaggugAfcAfUfAfgcuaugacaa | 4287 | PuUfgucAfuagcuauGfuCfaccuuac | 5387 |
| AD-2138878.2 | aggugaCfaUfAfGfcuaugacaua | 4288 | PuAfuguCfauagcuaUfgUfcaccuua | 5388 |
| AD-2138879.2 | ggugacAfuAfGfCfuaugacauua | 4289 | PuAfaugUfcauagcuAfuGfucaccuu | 5389 |
| AD-2138880.2 | gugacaUfaGfCfUfaugacauuua | 4290 | PuAfaauGfucauagcUfaUfgucaccu | 5390 |
| AD-2138881.2 | ugacauAfgCfUfAfugacauuuga | 4291 | PuCfaaaUfgucauagCfuAfugucacc | 5391 |
| AD-2138882.2 | acauagCfuAfUfGfacauuuguua | 4292 | PuAfacaAfaugucauAfgCfuauguca | 5392 |
| AD-2138883.2 | cauagcUfaUfGfAfcauuuguuaa | 4293 | PuUfaacAfaaugucaUfaGfcuauguc | 5393 |
| AD-2138884.2 | auagcuAfuGfAfCfauuuguuaaa | 4294 | PuUfuaaCfaaaugucAfuAfgcuaugu | 5394 |
| AD-2138885.2 | uagcuaUfgAfCfAfuuuguuaaaa | 4295 | PuUfuuaAfcaaauguCfaUfagcuaug | 5395 |
| AD-2138886.2 | agcuauGfaCfAfUfuuguuaaaaa | 4296 | PuUfuuuAfacaaaugUfcAfuagcuau | 5396 |
| AD-2138887.2 | gcuaugAfcAfUfUfuguuaaaaaa | 4297 | PuUfuuuUfaacaaauGfuCfauagcua | 5397 |
| AD-2138888.2 | cuaugaCfaUfUfUfguuaaaaaua | 4298 | PuAfuuuUfuaacaaaUfgUfcauagcu | 5398 |
| AD-2138889.2 | uaugacAfuUfUfGfuuaaaaauaa | 4299 | PuUfauuUfuuaacaaAfuGfucauagc | 5399 |
| AD-2138890.2 | augacaUfuUfGfUfuaaaaauaaa | 4300 | PuUfuauUfuuuaacaAfaUfgucauag | 5400 |
| AD-2138891.2 | ugacauUfuGfUfUfaaaaaaaaa | 4301 | PuUfuuaUfuuuuaacAfaAfugucaua | 5401 |
| AD-2138892.2 | gacauuUfgUfUfAfaaaauaaaca | 4302 | PuGfuuuAfuuuuuaaCfaAfaugucau | 5402 |
| AD-2138893.2 | acauuuGfuUfAfAfaaauaaacua | 4303 | PuAfguuUfauuuuuaAfcAfaauguca | 5403 |
| AD-2138894.2 | aauaaaCfuCfUfGfuacuuaacua | 4304 | PuAfguuAfaguacagAfgUfuuauuuu | 5404 |
| AD-2138895.2 | auaaacUfcUfGfUfacuuaacuua | 4305 | PuAfaguUfaaguacaGfaGfuuuauuu | 5405 |
| AD-2138896.2 | uaaacuCfuGfUfAfcuuaacuuua | 4306 | PuAfaagUfuaaguacAfgAfguuuauu | 5406 |
| AD-2138897.2 | aaacucUfgUfAfCfuuaacuuuga | 4307 | PuCfaaaGfuuaaguaCfaGfaguuuau | 5407 |
| AD-2138898.2 | aacucuGfuAfCfUfuaacuuugaa | 4308 | PuUfcaaAfguuaaguAfcAfgaguuua | 5408 |
| AD-2138899.2 | acucugUfaCfUfUfaacuuugaua | 4309 | PuAfucaAfaguuaagUfaCfagaguuu | 5409 |
| AD-2138900.2 | cucuguAfcUfUfAfacuuugauua | 4310 | PuAfaucAfaaguuaaGfuAfcagaguu | 5410 |
| AD-2138901.2 | ucuguaCfuUfAfAfcuuugauuua | 4311 | PuAfaauCfaaaguuaAfgUfacagagu | 5411 |
| AD-2138902.2 | cuguacUfuAfAfCfuuugauuuga | 4312 | PuCfaaaUfcaaaguuAfaGfuacagag | 5412 |
| AD-2138903.2 | uguacuUfaAfCfUfuugauuugaa | 4313 | PuUfcaaAfucaaaguUfaAfguacaga | 5413 |
| AD-2138904.2 | guacuuAfaCfUfUfugauuugaga | 4314 | PuCfucaAfaucaaagUfuAfaguacag | 5414 |
| AD-2138905.2 | uacuuaAfcUfUfUfgauuugagua | 4315 | PuAfcucAfaaucaaaGfuUfaaguaca | 5415 |
| AD-2138906.2 | acuuaaCfuUfUfGfauuugaguaa | 4316 | PuUfacuCfaaaucaaAfgUfuaaguac | 5416 |
| AD-2138907.2 | uugauuUfgAfGfUfaaauuuugga | 4317 | PuCfcaaAfauuuacuCfaAfaucaaag | 5417 |
| AD-2138908.2 | ugaguaAfaUfUfUfugguuuugga | 4318 | PuCfcaaAfaccaaaaUfuUfacucaaa | 5418 |
| AD-2138909.2 | gaguaaAfuUfUfUfgguuuuggua | 4319 | PuAfccaAfaaccaaaAfuUfuacucaa | 5419 |
| AD-2138910.2 | aguaaaUfuUfUfGfguuuugguca | 4320 | PuGfaccAfaaaccaaAfaUfuuacuca | 5420 |
| AD-2138911.2 | guaaauUfuUfGfGfuuuuggucua | 4321 | PuAfgacCfaaaaccaAfaAfuuuacuc | 5421 |
| AD-2138912.2 | uaaauuUfuGfGfUfuuuggucuua | 4322 | PuAfagaCfcaaaaccAfaAfauuuacu | 5422 |
| AD-2138913.2 | aaauuuUfgGfUfUfuuggucuuca | 4323 | PuGfaagAfccaaaacCfaAfaauuuac | 5423 |
| AD-2138914.2 | auuuugGfuUfUfUfggucuucaaa | 4324 | PuUfugaAfgaccaaaAfcCfaaaauuu | 5424 |
| AD-2138915.2 | uuugguUfuUfGfGfucuucaacaa | 4325 | PuUfguuGfaagaccaAfaAfccaaaau | 5425 |
| AD-2138916.2 | uugguuUfuGfGfUfcuucaacaua | 4326 | PuAfuguUfgaagaccAfaAfaccaaaa | 5426 |
| AD-2138917.2 | ugguuuUfgGfUfCfuucaacauua | 4327 | PuAfaugUfugaagacCfaAfaaccaaa | 5427 |
| AD-2138918.2 | gguuuuGfgUfCfUfucaacauuua | 4328 | PuAfaauGfuugaagaCfcAfaaaccaa | 5428 |
| AD-2138919.2 | guuuugGfuCfUfUfcaacauuuua | 4329 | PuAfaaaUfguugaagAfcCfaaaacca | 5429 |
| AD-2138920.2 | uuuuggUfcUfUfCfaacauuuuca | 4330 | PuGfaaaAfuguugaaGfaCfcaaaacc | 5430 |
| AD-2138921.2 | uuugguCfuUfCfAfacauuuucaa | 4331 | PuUfgaaAfauguugaAfgAfccaaaac | 5431 |
| AD-2138922.2 | uuggucUfuCfAfAfcauuuucaua | 4332 | PuAfugaAfaauguugAfaGfaccaaaa | 5432 |
| AD-2138923.2 | uggucuUfcAfAfCfauuuucauga | 4333 | PuCfaugAfaaauguuGfaAfgaccaaa | 5433 |
| AD-2138924.2 | ggucuuCfaAfCfAfuuuucaugca | 4334 | PuGfcauGfaaaauguUfgAfagaccaa | 5434 |
| AD-2138925.2 | gucuucAfaCfAfUfuuucaugcua | 4335 | PuAfgcaUfgaaaaugUfuGfaagacca | 5435 |
| AD-2138926.2 | cuucaaCfaUfUfUfucaugcucua | 4336 | PuAfgagCfaugaaaaUfgUfugaagac | 5436 |
| AD-2138927.2 | uucaacAfuUfUfUfcaugcucuua | 4337 | PuAfagaGfcaugaaaAfuGfuugaaga | 5437 |
| AD-2138928.2 | ucaacaUfuUfUfCfaugcucuuua | 4338 | PuAfaagAfgcaugaaAfaUfguugaag | 5438 |
| AD-2138929.2 | caacauUfuUfCfAfugcucuuuga | 4339 | PuCfaaaGfagcaugaAfaAfuguugaa | 5439 |
| AD-2138930.2 | aacauuUfuCfAfUfgcucuuugua | 4340 | PuAfcaaAfgagcaugAfaAfauguuga | 5440 |
| AD-2138931.2 | acauuuUfcAfUfGfcucuuuguua | 4341 | PuAfacaAfagagcauGfaAfaauguug | 5441 |
| AD-2138932.2 | cauuuuCfaUfGfCfucuuuguuca | 4342 | PuGfaacAfaagagcaUfgAfaaauguu | 5442 |
| AD-2138933.2 | auuuucAfuGfCfUfcuuuguucaa | 4343 | PuUfgaaCfaaagagcAfuGfaaaaugu | 5443 |
| AD-2138934.2 | uuuucaUfgCfUfCfuuuguucaca | 4344 | PuGfugaAfcaaagagCfaUfgaaaaug | 5444 |
| AD-2138935.2 | uuucauGfcUfCfUfuuguucacca | 4345 | PuGfgugAfacaaagaGfcAfugaaaau | 5445 |
| AD-2138936.2 | gauuuaGfcUfGfCfuuuugauaaa | 4346 | PuUfuauCfaaaagcaGfcUfaaauccc | 5446 |
| AD-2138937.2 | auuuagCfuGfCfUfuuugauaaga | 4347 | PuCfuuaUfcaaaagcAfgCfuaaaucc | 5447 |
| AD-2138938.2 | uuagcuGfcUfUfUfugauaaggaa | 4348 | PuUfccuUfaucaaaaGfcAfgcuaaau | 5448 |
| AD-2138939.2 | uagcugCfuUfUfUfgauaaggaaa | 4349 | PuUfuccUfuaucaaaAfgCfagcuaaa | 5449 |
| AD-2138940.2 | agcugcUfuUfUfGfauaaggaaca | 4350 | PuGfuucCfuuaucaaAfaGfcagcuaa | 5450 |
| AD-2138941.2 | gcugcuUfuUfGfAfuaaggaacaa | 4351 | PuUfguuCfcuuaucaAfaAfgcagcua | 5451 |
| AD-2138942.2 | auaaggAfaCfAfGfcugcacaaaa | 4352 | PuUfuugUfgcagcugUfuCfcuuauca | 5452 |
| AD-2138943.2 | cgcauuUfaCfCfUfcaucagcuaa | 4353 | PuUfagcUfgaugaggUfaAfaugcgug | 5453 |
| AD-2138944.2 | gcauuuAfcCfUfCfaucagcuaaa | 4354 | PuUfuagCfugaugagGfuAfaaugcgu | 5454 |
| AD-2138945.2 | cauuuaCfcUfCfAfucagcuaaca | 4355 | PuGfuuaGfcugaugaGfgUfaaaugcg | 5455 |
| AD-2138946.2 | gcuugaCfaUfGfCfauuuuuacua | 4356 | PuAfguaAfaaaugcaUfgUfcaagccc | 5456 |
| AD-2138947.2 | cuugacAfuGfCfAfuuuuuacuga | 4357 | PuCfaguAfaaaaugcAfuGfucaagcc | 5457 |
| AD-2138948.2 | uugacaUfgCfAfUfuuuuacugua | 4358 | PuAfcagUfaaaaaugCfaUfgucaagc | 5458 |
| AD-2138949.2 | ugacauGfcAfUfUfuuuacuguca | 4359 | PuGfacaGfuaaaaauGfcAfugucaag | 5459 |
| AD-2138950.2 | gacaugCfaUfUfUfuuacugucua | 4360 | PuAfgacAfguaaaaaUfgCfaugucaa | 5460 |
| AD-2138951.2 | acaugcAfuUfUfUfuacugucuua | 4361 | PuAfagaCfaguaaaaAfuGfcauguca | 5461 |
| AD-2138952.2 | caugcaUfuUfUfUfacugucuuua | 4362 | PuAfaagAfcaguaaaAfaUfgcauguc | 5462 |
| AD-2138953.2 | augcauUfuUfUfAfcugucuuuaa | 4363 | PuUfaaaGfacaguaaAfaAfugcaugu | 5463 |
| AD-2138954.2 | ugcauuUfuUfAfCfugucuuuaua | 4364 | PuAfuaaAfgacaguaAfaAfaugcaug | 5464 |
| AD-2138955.2 | gcauuuUfuAfCfUfgucuuuauua | 4365 | PuAfauaAfagacaguAfaAfaaugcau | 5465 |
| AD-2138956.2 | cauuuuUfaCfUfGfucuuuauuca | 4366 | PuGfaauAfaagacagUfaAfaaaugca | 5466 |
| AD-2138957.2 | auuuuuAfcUfGfUfcuuuauucca | 4367 | PuGfgaaUfaaagacaGfuAfaaaaugc | 5467 |
| AD-2138958.2 | uuuuuaCfuGfUfCfuuuauuccua | 4368 | PuAfggaAfuaaagacAfgUfaaaaaug | 5468 |
| AD-2138959.2 | uuuuacUfgUfCfUfuuauuccuga | 4369 | PuCfaggAfauaaagaCfaGfuaaaaau | 5469 |
| AD-2138960.2 | uuuacuGfuCfUfUfuauuccugaa | 4370 | PuUfcagGfaauaaagAfcAfguaaaaa | 5470 |
| AD-2138961.2 | uacuguCfuUfUfAfuuccugacaa | 4371 | PuUfgucAfggaauaaAfgAfcaguaaa | 5471 |
| AD-2138962.2 | acugucUfuUfAfUfuccugacaca | 4372 | PuGfuguCfaggaauaAfaGfacaguaa | 5472 |
| AD-2138963.2 | cugucuUfuAfUfUfccugacacua | 4373 | PuAfgugUfcaggaauAfaAfgacagua | 5473 |
| AD-2138964.2 | gucuuuAfuUfCfCfugacacugaa | 4374 | PuUfcagUfgucaggaAfuAfaagacag | 5474 |
| AD-2138965.2 | gacacuGfaGfAfUfgaauguuuua | 4375 | PuAfaaaCfauucaucUfcAfgugucag | 5475 |
| AD-2138966.2 | acacugAfgAfUfGfaauguuuuca | 4376 | PuGfaaaAfcauucauCfuCfaguguca | 5476 |
| AD-2138967.2 | cacugaGfaUfGfAfauguuuucaa | 4377 | PuUfgaaAfacauucaUfcUfcaguguc | 5477 |
| AD-2138968.2 | acugagAfuGfAfAfuguuuucaaa | 4378 | PuUfugaAfaacauucAfuCfucagugu | 5478 |
| AD-2138969.2 | cugagaUfgAfAfUfguuuucaaaa | 4379 | PuUfuugAfaaacauuCfaUfcucagug | 5479 |
| AD-2138970.2 | ugagauGfaAfUfGfuuuucaaaga | 4380 | PuCfuuuGfaaaacauUfcAfucucagu | 5480 |
| AD-2138971.2 | gagaugAfaUfGfUfuuucaaagca | 4381 | PuGfcuuUfgaaaacaUfuCfaucucag | 5481 |
| AD-2138972.2 | agaugaAfuGfUfUfuucaaagcua | 4382 | PuAfgcuUfugaaaacAfuUfcaucuca | 5482 |
| AD-2138973.2 | aauguuUfuCfAfAfagcugcaaca | 4383 | PuGfuugCfagcuuugAfaAfacauuca | 5483 |
| AD-2138974.2 | auguuuUfcAfAfAfgcugcaacaa | 4384 | PuUfguuGfcagcuuuGfaAfaacauuc | 5484 |
| AD-2138975.2 | uguuuuCfaAfAfGfcugcaacaua | 4385 | PuAfuguUfgcagcuuUfgAfaaacauu | 5485 |
| AD-2138976.2 | guuuucAfaAfGfCfugcaacauga | 4386 | PuCfaugUfugcagcuUfuGfaaaacau | 5486 |
| AD-2138977.2 | aaccgaUfuCfUfGfuuauugggaa | 4387 | PuUfcccAfauaacagAfaUfcgguuug | 5487 |
| AD-2138978.2 | accgauUfcUfGfUfuauugggaaa | 4388 | PuUfuccCfaauaacaGfaAfucgguuu | 5488 |
| AD-2138979.2 | ccgauuCfuGfUfUfauugggaaua | 4389 | PuAfuucCfcaauaacAfgAfaucgguu | 5489 |
| AD-2138980.2 | cgauucUfgUfUfAfuugggaauga | 4390 | PuCfauuCfccaauaaCfaGfaaucggu | 5490 |
| AD-2138981.2 | gauucuGfuUfAfUfugggaaugaa | 4391 | PuUfcauUfcccaauaAfcAfgaaucgg | 5491 |
| AD-2138982.2 | auucugUfuAfUfUfgggaaugaaa | 4392 | PuUfucaUfucccaauAfaCfagaaucg | 5492 |
| AD-2138983.2 | uucuguUfaUfUfGfggaaugaaaa | 4393 | PuUfuucAfuucccaaUfaAfcagaauc | 5493 |
| AD-2138984.2 | ucuguuAfuUfGfGfgaaugaaaua | 4394 | PuAfuuuCfauucccaAfuAfacagaau | 5494 |
| AD-2138985.2 | cuguuaUfuGfGfGfaaugaaauca | 4395 | PuGfauuUfcauucccAfaUfaacagaa | 5495 |
| AD-2138986.2 | uguuauUfgGfGfAfaugaaaucua | 4396 | PuAfgauUfucauuccCfaAfuaacaga | 5496 |
| AD-2138987.2 | guuauuGfgGfAfAfugaaaucuga | 4397 | PuCfagaUfuucauucCfcAfauaacag | 5497 |
| AD-2138988.2 | uuauugGfgAfAfUfgaaaucugua | 4398 | PuAfcagAfuuucauuCfcCfaauaaca | 5498 |
| AD-2138989.2 | auugggAfaUfGfAfaaucugucaa | 4399 | PuUfgacAfgauuucaUfuCfccaauaa | 5499 |
| AD-2138990.2 | agagcuGfuAfUfAfugauggagua | 4400 | PuAfcucCfaucauauAfcAfgcucucu | 5500 |
| AD-2138991.2 | gcuguaUfaUfGfAfuggagugaaa | 4401 | PuUfucaCfuccaucaUfaUfacagcuc | 5501 |
| AD-2138992.2 | ggauguGfuAfAfCfacaagaccaa | 4402 | PuUfgguCfuuguguuAfcAfcauccau | 5502 |
| AD-2138993.2 | gaugugUfaAfCfAfcaagaccaaa | 4403 | PuUfuggUfcuuguguUfaCfacaucca | 5503 |
| AD-2138994.2 | guguaaCfaCfAfAfgaccaacuga | 4404 | PuCfaguUfggucuugUfgUfuacacau | 5504 |
| AD-2138995.2 | uguaacAfcAfAfGfaccaacugaa | 4405 | PuUfcagUfuggucuuGfuGfuuacaca | 5505 |
| AD-2138996.2 | uaacacAfaGfAfCfcaacugagaa | 4406 | PuUfcucAfguuggucUfuGfuguuaca | 5506 |
| AD-2138997.2 | aacugaGfaGfUfCfugaauguuaa | 4407 | PuUfaacAfuucagacUfcUfcaguugg | 5507 |
| AD-2138998.2 | acugagAfgUfCfUfgaauguuaua | 4408 | PuAfuaaCfauucagaCfuCfucaguug | 5508 |
| AD-2138999.2 | cugagaGfuCfUfGfaauguuauua | 4409 | PuAfauaAfcauucagAfcUfcucaguu | 5509 |
| AD-2139000.2 | gagaguCfuGfAfAfuguuauucua | 4410 | PuAfgaaUfaacauucAfgAfcucucag | 5510 |
| AD-2139001.2 | gagucuGfaAfUfGfuuauucugga | 4411 | PuCfcagAfauaacauUfcAfgacucuc | 5511 |
| AD-2139002.2 | ugccaaGfaGfCfAfuguaaaugaa | 4412 | PuUfcauUfuacaugcUfcUfuggcacc | 5512 |
| AD-2139003.2 | gccaagAfgCfAfUfguaaaugaaa | 4413 | PuUfucaUfuuacaugCfuCfuuggcac | 5513 |
| AD-2139004.2 | ccaagaGfcAfUfGfuaaaugaaca | 4414 | PuGfuucAfuuuacauGfcUfcuuggca | 5514 |
| AD-2139005.2 | caagagCfaUfGfUfaaaugaacaa | 4415 | PuUfguuCfauuuacaUfgCfucuuggc | 5515 |
| AD-2139006.2 | aagagcAfuGfUfAfaaugaacaaa | 4416 | PuUfuguUfcauuuacAfuGfcucuugg | 5516 |
| AD-2139007.2 | agagcaUfgUfAfAfaugaacaaca | 4417 | PuGfuugUfucauuuaCfaUfgcucuug | 5517 |
| AD-2139008.2 | gagcauGfuAfAfAfugaacaacaa | 4418 | PuUfguuGfuucauuuAfcAfugcucuu | 5518 |
| AD-2139009.2 | agcaugUfaAfAfUfgaacaacaaa | 4419 | PuUfuguUfguucauuUfaCfaugcucu | 5519 |
| AD-2139010.2 | gcauguAfaAfUfGfaacaacaaga | 4420 | PuCfuugUfuguucauUfuAfcaugcuc | 5520 |
| AD-2139011.2 | cauguaAfaUfGfAfacaacaagca | 4421 | PuGfcuuGfuuguucaUfuUfacaugcu | 5521 |
| AD-2139012.2 | auguaaAfuGfAfAfcaacaagcaa | 4422 | PuUfgcuUfguuguucAfuUfuacaugc | 5522 |
| AD-2139013.2 | uguaaaUfgAfAfCfaacaagcaaa | 4423 | PuUfugcUfuguuguuCfaUfuuacaug | 5523 |
| AD-2139014.2 | guaaauGfaAfCfAfacaagcaaaa | 4424 | PuUfuugCfuuguuguUfcAfuuuacau | 5524 |
| AD-2139015.2 | uaaaugAfaCfAfAfcaagcaaaua | 4425 | PuAfuuuGfcuuguugUfuCfauuuaca | 5525 |
| AD-2139016.2 | aaaugaAfcAfAfCfaagcaaauaa | 4426 | PuUfauuUfgcuuguuGfuUfcauuuac | 5526 |
| AD-2139017.2 | aaugaaCfaAfCfAfagcaaauaua | 4427 | PuAfuauUfugcuuguUfgUfucauuua | 5527 |
| AD-2139018.2 | augaacAfaCfAfAfgcaaauauua | 4428 | PuAfauaUfuugcuugUfuGfuucauuu | 5528 |
| AD-2139019.2 | ugaacaAfcAfAfGfcaaauauuga | 4429 | PuCfaauAfuuugcuuGfuUfguucauu | 5529 |
| AD-2139020.2 | gaacaaCfaAfGfCfaaauauugaa | 4430 | PuUfcaaUfauuugcuUfgUfuguucau | 5530 |
| AD-2139021.2 | aacaacAfaGfCfAfaauauugaaa | 4431 | PuUfucaAfuauuugcUfuGfuuguuca | 5531 |
| AD-2139022.2 | acaacaAfgCfAfAfauauugaaga | 4432 | PuCfuucAfauauuugCfuUfguuguuc | 5532 |
| AD-2139023.2 | caacaaGfcAfAfAfuauugaagga | 4433 | PuCfcuuCfaauauuuGfcUfuguuguu | 5533 |
| AD-2139024.2 | aacaagCfaAfAfUfauugaaggua | 4434 | PuAfccuUfcaauauuUfgCfuuguugu | 5534 |
| AD-2139025.2 | acaagcAfaAfUfAfuugaagguga | 4435 | PuCfaccUfucaauauUfuGfcuuguug | 5535 |
| AD-2139026.2 | cacuuaUfuUfCfCfcauugcuaaa | 4436 | PuUfuagCfaaugggaAfaUfaaguggu | 5536 |
| AD-2139027.2 | acuuauUfuCfCfCfauugcuaaua | 4437 | PuAfuuaGfcaaugggAfaAfuaagugg | 5537 |
| AD-2139028.2 | cuuauuUfcCfCfAfuugcuaauua | 4438 | PuAfauuAfgcaauggGfaAfauaagug | 5538 |
| AD-2139029.2 | uuauuuCfcCfAfUfugcuaauuga | 4439 | PuCfaauUfagcaaugGfgAfaauaagu | 5539 |
| AD-2139030.2 | auuuccCfaUfUfGfcuaauugcca | 4440 | PuGfgcaAfuuagcaaUfgGfgaaauaa | 5540 |
| AD-2139031.2 | gccugcCfcGfGfUfuuugaaacaa | 4441 | PuUfguuUfcaaaaccGfgGfcaggcaa | 5541 |
| AD-2139032.2 | uuuugaAfaCfAfGfucugcaguaa | 4442 | PuUfacuGfcagacugUfuUfcaaaacc | 5542 |
| AD-2139033.2 | uugaaaCfaGfUfCfugcaguacaa | 4443 | PuUfguaCfugcagacUfgUfuucaaaa | 5543 |
| AD-2139034.2 | gugggaGfaGfAfUfacauguuuaa | 4444 | PuUfaaaCfauguaucUfcUfcccacag | 5544 |
| AD-2139035.2 | gggagaGfaUfAfCfauguuuagaa | 4445 | PuUfcuaAfacauguaUfcUfcucccac | 5545 |
| AD-2139036.2 | ggagagAfuAfCfAfuguuuagaaa | 4446 | PuUfucuAfaacauguAfuCfucuccca | 5546 |
| AD-2139037.2 | gagagaUfaCfAfUfguuuagaaga | 4447 | PuCfuucUfaaacaugUfaUfcucuccc | 5547 |
| AD-2139038.2 | gagauaCfaUfGfUfuuagaaggaa | 4448 | PuUfccuUfcuaaacaUfgUfaucucuc | 5548 |
| AD-2139039.2 | agauacAfuGfUfUfuagaaggaaa | 4449 | PuUfuccUfucuaaacAfuGfuaucucu | 5549 |
| AD-2139040.2 | gauacaUfgUfUfUfagaaggaaga | 4450 | PuCfuucCfuucuaaaCfaUfguaucuc | 5550 |
| AD-2139041.2 | auacauGfuUfUfAfgaaggaagaa | 4451 | PuUfcuuCfcuucuaaAfcAfuguaucu | 5551 |
| AD-2139042.2 | cauguuUfaGfAfAfggaagagaaa | 4452 | PuUfucuCfuuccuucUfaAfacaugua | 5552 |
| AD-2139043.2 | uguuuaGfaAfGfGfaagagaaaga | 4453 | PuCfuuuCfucuuccuUfcUfaaacaug | 5553 |
| AD-2139044.2 | guuuagAfaGfGfAfagagaaagga | 4454 | PuCfcuuUfcucuuccUfuCfuaaacau | 5554 |
| AD-2139045.2 | uuagaaGfgAfAfGfagaaaggaca | 4455 | PuGfuccUfuucucuuCfcUfucuaaac | 5555 |
| AD-2139046.2 | uagaagGfaAfGfAfgaaaggacaa | 4456 | PuUfgucCfuuucucuUfcCfuucuaaa | 5556 |
| AD-2139047.2 | agaaggAfaGfAfGfaaaggacaaa | 4457 | PuUfuguCfcuuucucUfuCfcuucuaa | 5557 |
| AD-2139048.2 | gaaggaAfgAfGfAfaaggacaaaa | 4458 | PuUfuugUfccuuucuCfuUfccuucua | 5558 |
| AD-2139049.2 | aaggcaCfaCfGfUfuuuaccauua | 4459 | PuAfaugGfuaaaacgUfgUfgccuuug | 5559 |
| AD-2139050.2 | aggcacAfcGfUfUfuuaccauuua | 4460 | PuAfaauGfguaaaacGfuGfugccuuu | 5560 |
| AD-2139051.2 | ggcacaCfgUfUfUfuaccauuuaa | 4461 | PuUfaaaUfgguaaaaCfgUfgugccuu | 5561 |
| AD-2139052.2 | gcacacGfuUfUfUfaccauuuaaa | 4462 | PuUfuaaAfugguaaaAfcGfugugccu | 5562 |
| AD-2139053.2 | cacacgUfuUfUfAfccauuuaaaa | 4463 | PuUfuuaAfaugguaaAfaCfgugugcc | 5563 |
| AD-2139054.2 | acacguUfuUfAfCfcauuuaaaaa | 4464 | PuUfuuuAfaaugguaAfaAfcgugugc | 5564 |
| AD-2139055.2 | cacguuUfuAfCfCfauuuaaaaua | 4465 | PuAfuuuUfaaaugguAfaAfacgugug | 5565 |
| AD-2139056.2 | acguuuUfaCfCfAfuuuaaaauaa | 4466 | PuUfauuUfuaaauggUfaAfaacgugu | 5566 |
| AD-2139057.2 | cguuuuAfcCfAfUfuuaaaauaua | 4467 | PuAfuauUfuuaaaugGfuAfaaacgug | 5567 |
| AD-2139058.2 | guuuuaCfcAfUfUfuaaaauauua | 4468 | PuAfauaUfuuuaaauGfgUfaaaacgu | 5568 |
| AD-2139059.2 | uuuuacCfaUfUfUfaaaauauuga | 4469 | PuCfaauAfuuuuaaaUfgGfuaaaacg | 5569 |
| AD-2139060.2 | uuuaccAfuUfUfAfaaauauugua | 4470 | PuAfcaaUfauuuuaaAfuGfguaaaac | 5570 |
| AD-2139061.2 | uuuaaaAfuAfUfUfguuaccaaaa | 4471 | PuUfuugGfuaacaauAfuUfuuaaaug | 5571 |
| AD-2139062.2 | uuaaaaUfaUfUfGfuuaccaaaca | 4472 | PuGfuuuGfguaacaaUfaUfuuuaaau | 5572 |
| AD-2139063.2 | uaaaauAfuUfGfUfuaccaaacaa | 4473 | PuUfguuUfgguaacaAfuAfuuuuaaa | 5573 |
| AD-2139064.2 | aaaauaUfuGfUfUfaccaaacaaa | 4474 | PuUfuguUfugguaacAfaUfauuuuaa | 5574 |
| AD-2139065.2 | aaauauUfgUfUfAfccaaacaaaa | 4475 | PuUfuugUfuugguaaCfaAfuauuuua | 5575 |
| AD-2139066.2 | aauauuGfuUfAfCfcaaacaaaaa | 4476 | PuUfuuuGfuuugguaAfcAfauauuuu | 5576 |
| AD-2139067.2 | auauugUfuAfCfCfaaacaaaaaa | 4477 | PuUfuuuUfguuugguAfaCfaauauuu | 5577 |
| AD-2139068.2 | uauuguUfaCfCfAfaacaaaaaua | 4478 | PuAfuuuUfuguuuggUfaAfcaauauu | 5578 |
| AD-2139069.2 | auuguuAfcCfAfAfacaaaaauaa | 4479 | PuUfauuUfuuguuugGfuAfacaauau | 5579 |
| AD-2139070.2 | uuguuaCfcAfAfAfcaaaaauaua | 4480 | PuAfuauUfuuuguuuGfgUfaacaaua | 5580 |
| AD-2139071.2 | uguuacCfaAfAfCfaaaaauauca | 4481 | PuGfauaUfuuuuguuUfgGfuaacaau | 5581 |
| AD-2139072.2 | guuaccAfaAfCfAfaaaauaucca | 4482 | PuGfgauAfuuuuuguUfuGfguaacaa | 5582 |
| AD-2139073.2 | uuaccaAfaCfAfAfaaauauccaa | 4483 | PuUfggaUfauuuuugUfuUfgguaaca | 5583 |
| AD-2139074.2 | uaccaaAfcAfAfAfaauauccaua | 4484 | PuAfuggAfuauuuuuGfuUfugguaac | 5584 |
| AD-2139075.2 | ccaaacAfaAfAfAfuauccauuca | 4485 | PuGfaauGfgauauuuUfuGfuuuggua | 5585 |
| AD-2139076.2 | caaacaAfaAfAfUfauccauucaa | 4486 | PuUfgaaUfggauauuUfuUfguuuggu | 5586 |
| AD-2139077.2 | aaacaaAfaAfUfAfuccauucaaa | 4487 | PuUfugaAfuggauauUfuUfuguuugg | 5587 |
| AD-2139078.2 | aaaauaUfcCfAfUfucaaaauaca | 4488 | PuGfuauUfuugaaugGfaUfauuuuug | 5588 |
| AD-2139079.2 | aaauauCfcAfUfUfcaaaauacaa | 4489 | PuUfguaUfuuugaauGfgAfuauuuuu | 5589 |
| AD-2139080.2 | aauaucCfaUfUfCfaaaauacaaa | 4490 | PuUfuguAfuuuugaaUfgGfauauuuu | 5590 |
| AD-2139081.2 | auauccAfuUfCfAfaaauacaaua | 4491 | PuAfuugUfauuuugaAfuGfgauauuu | 5591 |
| AD-2139082.2 | uauccaUfuCfAfAfaauacaauua | 4492 | PuAfauuGfuauuuugAfaUfggauauu | 5592 |
| AD-2139083.2 | auccauUfcAfAfAfauacaauuua | 4493 | PuAfaauUfguauuuuGfaAfuggauau | 5593 |
| AD-2139084.2 | uccauuCfaAfAfAfuacaauuuaa | 4494 | PuUfaaaUfuguauuuUfgAfauggaua | 5594 |
| AD-2139085.2 | ccauucAfaAfAfUfacaauuuaaa | 4495 | PuUfuaaAfuuguauuUfuGfaauggau | 5595 |
| AD-2139086.2 | cauucaAfaAfUfAfcaauuuaaca | 4496 | PuGfuuaAfauuguauUfuUfgaaugga | 5596 |
| AD-2139087.2 | auucaaAfaUfAfCfaauuuaacaa | 4497 | PuUfguuAfaauuguaUfuUfugaaugg | 5597 |
| AD-2139088.2 | uucaaaAfuAfCfAfauuuaacaaa | 4498 | PuUfuguUfaaauuguAfuUfuugaaug | 5598 |
| AD-2139089.2 | ucaaaaUfaCfAfAfuuuaacaaua | 4499 | PuAfuugUfuaaauugUfaUfuuugaau | 5599 |
| AD-2139090.2 | caauuuAfaCfAfAfugcaacagua | 4500 | PuAfcugUfugcauugUfuAfaauugua | 5600 |
| AD-2139091.2 | ucaucuUfaCfAfGfcagagaaaua | 4501 | PuAfuuuCfucugcugUfaAfgaugacu | 5601 |
| AD-2139092.2 | caucuuAfcAfGfCfagagaaauga | 4502 | PuCfauuUfcucugcuGfuAfagaugac | 5602 |
| AD-2139093.2 | aucuuaCfaGfCfAfgagaaaugca | 4503 | PuGfcauUfucucugcUfgUfaagauga | 5603 |
| AD-2139094.2 | ucuuacAfgCfAfGfagaaaugcaa | 4504 | PuUfgcaUfuucucugCfuGfuaagaug | 5604 |
| AD-2139095.2 | cuuacaGfcAfGfAfgaaaugcaga | 4505 | PuCfugcAfuuucucuGfcUfguaagau | 5605 |
| AD-2139096.2 | uuacagCfaGfAfGfaaaugcagaa | 4506 | PuUfcugCfauuucucUfgCfuguaaga | 5606 |
| AD-2139097.2 | uacagcAfgAfGfAfaaugcagaga | 4507 | PuCfucuGfcauuucuCfuGfcuguaag | 5607 |
| AD-2139098.2 | acagcaGfaGfAfAfaugcagagaa | 4508 | PuUfcucUfgcauuucUfcUfgcuguaa | 5608 |
| AD-2139099.2 | cagcagAfgAfAfAfugcagagaaa | 4509 | PuUfucuCfugcauuuCfuCfugcugua | 5609 |
| AD-2139100.2 | agcagaGfaAfAfUfgcagagaaaa | 4510 | PuUfuucUfcugcauuUfcUfcugcugu | 5610 |
| AD-2139101.2 | gcagagAfaAfUfGfcagagaaaaa | 4511 | PuUfuuuCfucugcauUfuCfucugcug | 5611 |
| AD-2139102.2 | cagagaAfaUfGfCfagagaaaaga | 4512 | PuCfuuuUfcucugcaUfuUfcucugcu | 5612 |
| AD-2139103.2 | agagaaAfuGfCfAfgagaaaagca | 4513 | PuGfcuuUfucucugcAfuUfucucugc | 5613 |
| AD-2139104.2 | gagaaaUfgCfAfGfagaaaagcaa | 4514 | PuUfgcuUfuucucugCfaUfuucucug | 5614 |
| AD-2139105.2 | agaaauGfcAfGfAfgaaaagcaaa | 4515 | PuUfugcUfuuucucuGfcAfuuucucu | 5615 |
| AD-2139106.2 | gaaaugCfaGfAfGfaaaagcaaaa | 4516 | PuUfuugCfuuuucucUfgCfauuucuc | 5616 |
| AD-2139107.2 | aaaugcAfgAfGfAfaaagcaaaaa | 4517 | PuUfuuuGfcuuuucuCfuGfcauuucu | 5617 |
| AD-2139108.2 | aaugcaGfaGfAfAfaagcaaaaca | 4518 | PuGfuuuUfgcuuuucUfcUfgcauuuc | 5618 |
| AD-2139109.2 | augcagAfgAfAfAfagcaaaacua | 4519 | PuAfguuUfugcuuuuCfuCfugcauuu | 5619 |
| AD-2139110.2 | ugcagaGfaAfAfAfgcaaaacuga | 4520 | PuCfaguUfuugcuuuUfcUfcugcauu | 5620 |
| AD-2139111.2 | gcagagAfaAfAfGfcaaaacugca | 4521 | PuGfcagUfuuugcuuUfuCfucugcau | 5621 |
| AD-2139112.2 | cagagaAfaAfGfCfaaaacugcaa | 4522 | PuUfgcaGfuuuugcuUfuUfcucugca | 5622 |
| AD-2139113.2 | agagaaAfaGfCfAfaaacugcaaa | 4523 | PuUfugcAfguuuugcUfuUfucucugc | 5623 |
| AD-2139114.2 | agaaaaGfcAfAfAfacugcaagua | 4524 | PuAfcuuGfcaguuuuGfcUfuuucucu | 5624 |
| AD-2139115.2 | aaaagcAfaAfAfCfugcaagugaa | 4525 | PuUfcacUfugcaguuUfuGfcuuuucu | 5625 |
| AD-2139116.2 | aaagcaAfaAfCfUfgcaagugaca | 4526 | PuGfucaCfuugcaguUfuUfgcuuuuc | 5626 |
| AD-2139117.2 | aagcaaAfaCfUfGfcaagugacua | 4527 | PuAfgucAfcuugcagUfuUfugcuuuu | 5627 |
| AD-2139118.2 | aaacugCfaAfGfUfgacugugaaa | 4528 | PuUfucaCfagucacuUfgCfaguuuug | 5628 |
| AD-2139119.2 | aacugcAfaGfUfGfacugugaaua | 4529 | PuAfuucAfcagucacUfuGfcaguuuu | 5629 |
| AD-2139120.2 | acugcaAfgUfGfAfcugugaauaa | 4530 | PuUfauuCfacagucaCfuUfgcaguuu | 5630 |
| AD-2139121.2 | cugcaaGfuGfAfCfugugaauaaa | 4531 | PuUfuauUfcacagucAfcUfugcaguu | 5631 |
| AD-2139122.2 | ugcaagUfgAfCfUfgugaauaaaa | 4532 | PuUfuuaUfucacaguCfaCfuugcagu | 5632 |
| AD-2139123.2 | gcaaguGfaCfUfGfugaauaaaga | 4533 | PuCfuuuAfuucacagUfcAfcuugcag | 5633 |
| AD-2139124.2 | caagugAfcUfGfUfgaauaaagga | 4534 | PuCfcuuUfauucacaGfuCfacuugca | 5634 |
| AD-2139125.2 | gacuguGfaAfUfAfaagggugaaa | 4535 | PuUfucaCfccuuuauUfcAfcagucac | 5635 |
| AD-2139126.2 | acugugAfaUfAfAfagggugaaua | 4536 | PuAfuucAfcccuuuaUfuCfacaguca | 5636 |
| AD-2139128.2 | gugaauAfaAfGfGfgugaauguaa | 4537 | PuUfacaUfucacccuUfuAfuucacag | 5637 |
| AD-2139129.2 | ugaauaAfaGfGfGfugaauguaga | 4538 | PuCfuacAfuucacccUfuUfauucaca | 5638 |
| AD-2139130.2 | gaauaaAfgGfGfUfgaauguagua | 4539 | PuAfcuaCfauucaccCfuUfuauucac | 5639 |
| AD-2139131.2 | uaaaggGfuGfAfAfuguagucuca | 4540 | PuGfagaCfuacauucAfcCfcuuuauu | 5640 |
| AD-2139132.2 | aaggguGfaAfUfGfuagucucaaa | 4541 | PuUfugaGfacuacauUfcAfcccuuua | 5641 |
| AD-2139133.2 | agggugAfaUfGfUfagucucaaaa | 4542 | PuUfuugAfgacuacaUfuCfacccuuu | 5642 |
| AD-2139134.2 | auccucAfaAfGfAfgcuguguuua | 4543 | PuAfaacAfcagcucuUfuGfaggauuu | 5643 |
| AD-2139135.2 | uccucaAfaGfAfGfcuguguuuaa | 4544 | PuUfaaaCfacagcucUfuUfgaggauu | 5644 |
| AD-2139136.2 | ccucaaAfgAfGfCfuguguuuaua | 4545 | PuAfuaaAfcacagcuCfuUfugaggau | 5645 |
| AD-2139137.2 | cucaaaGfaGfCfUfguguuuauua | 4546 | PuAfauaAfacacagcUfcUfuugagga | 5646 |
| AD-2139138.2 | ucaaagAfgCfUfGfuguuuauuua | 4547 | PuAfaauAfaacacagCfuCfuuugagg | 5647 |
| AD-2139139.2 | caaagaGfcUfGfUfguuuauuuca | 4548 | PuGfaaaUfaaacacaGfcUfcuuugag | 5648 |
| AD-2139140.2 | aaagagCfuGfUfGfuuuauuucaa | 4549 | PuUfgaaAfuaaacacAfgCfucuuuga | 5649 |
| AD-2139141.2 | agcuguGfuUfUfAfuuucauugaa | 4550 | PuUfcaaUfgaaauaaAfcAfcagcucu | 5650 |
| AD-2139142.2 | gcugugUfuUfAfUfuucauugaca | 4551 | PuGfucaAfugaaauaAfaCfacagcuc | 5651 |
| AD-2139143.2 | guguuuAfuUfUfCfauugacaaaa | 4552 | PuUfuugUfcaaugaaAfuAfaacacag | 5652 |
| AD-2139144.2 | auuucaUfuGfAfCfaaauagauua | 4553 | PuAfaucUfauuugucAfaUfgaaauaa | 5653 |
| AD-2139145.2 | uuucauUfgAfCfAfaauagauuaa | 4554 | PuUfaauCfuauuuguCfaAfugaaaua | 5654 |
| AD-2139146.2 | uucauuGfaCfAfAfauagauuaua | 4555 | PuAfuaaUfcuauuugUfcAfaugaaau | 5655 |
| AD-2139147.2 | ucauugAfcAfAfAfuagauuauua | 4556 | PuAfauaAfucuauuuGfuCfaaugaaa | 5656 |
| AD-2139148.2 | cauugaCfaAfAfUfagauuauuua | 4557 | PuAfaauAfaucuauuUfgUfcaaugaa | 5657 |
| AD-2139149.2 | auugacAfaAfUfAfgauuauuuga | 4558 | PuCfaaaUfaaucuauUfuGfucaauga | 5658 |
| AD-2139150.2 | uugacaAfaUfAfGfauuauuugua | 4559 | PuAfcaaAfuaaucuaUfuUfgucaaug | 5659 |
| AD-2139151.2 | ugacaaAfuAfGfAfuuauuuguaa | 4560 | PuUfacaAfauaaucuAfuUfugucaau | 5660 |
| AD-2139152.2 | gacaaaUfaGfAfUfuauuuguaua | 4561 | PuAfuacAfaauaaucUfaUfuugucaa | 5661 |
| AD-2139153.2 | acaaauAfgAfUfUfauuuguauua | 4562 | PuAfauaCfaaauaauCfuAfuuuguca | 5662 |
| AD-2139154.2 | caaauaGfaUfUfAfuuuguauuca | 4563 | PuGfaauAfcaaauaaUfcUfauuuguc | 5663 |
| AD-2139155.2 | aaauagAfuUfAfUfuuguauucaa | 4564 | PuUfgaaUfacaaauaAfuCfuauuugu | 5664 |

### Example 2. In vitro screening of PLG siRNA

### Experimental Methods

Cell culture and transfections:

[0906] Primary human hepatocytes (PHH) or primary cyno hepatocytes (PCH) were transfected by adding 4.9 d of Opti-MEM plus 0.1 1 of Lipofectamine RNAiMax per well (Invitrogen, Carlsbad CA. cat #13778-150) to 5 d of siRNA duplexes per well into a 384-well plate and incubated at room temperature for 15 minutes. 40 d of media containing 5×10³ cells was then added to the siRNA mixture. Cells were incubated for 24 hours prior to RNA purification. Dose response experiments were performed at various final duplex concentrations.

Free uptake:

[0907] Free uptake assay was performed similarly to the transfection assay without using Lipofectamine RNAimax and cells were incubated for 48 hours prior to the RNA purification. Dose response experiments were performed at various final duplex concentrations.

LogIC50 assay:

[0908] Free uptake assays or transfection assays of PHH or PCH cells were performed as described above, except various log concentrations of selected siRNA duplexes were used in the assays. The percent of message remaining was determined and the LogIC50 was calculated.

Total RNA isolation using DYNABEADS mRNA Isolation Kit:

[0909] RNA was isolated using an automated protocol on a BioTek-EL406 platform using DYNABEADs (Invitrogen, cat #61012). Briefly, 70 μl of Lysis/Binding Buffer and 10 μl of lysis buffer containing 3 μl of magnetic beads were added to the plate with cells. Plates were incubated on an electromagnetic shaker for 10 minutes at room temperature and then magnetic beads were captured and the supernatant was removed. Bead-bound RNA was then washed 2 times with 150 μl Wash Buffer A and once with Wash Buffer B. Beads were then washed with 150 μl Elution Buffer, re-captured and supernatant removed.

### Synthesis using ABI High-capacity cDNA reverse transcription kit (Applied Biosystems, Foster City, CA, Cat #4368813)

[0910] Ten μl of a master mix containing 1 μl 10× Buffer, 0.4 μl 25X dNTPs, 1 μl 1Ox Random primers, 0.5 μl Reverse Transcriptase, 0.5 μl RNase inhibitor and 6.6 μl of H20 per reaction was added to RNA isolated above. Plates were sealed, mixed, and incubated on an electromagnetic shaker for 10 minutes at room temperature, followed by 2 h 37° C.

Real time PCR:

[0911] Two μl of cDNA and 5 μl Lightcycler 480 probe master mix (Roche Cat #04887301001) were added to 0.5 μl of human GAPDH TaqMan Probe and 0.5 μl PLG human probe per well in a 384 well plates (Roche cat #04887301001). Real time PCR was done in a LightCycler480 Real Time PCR system (Roche). Each duplex was tested at least two times and data were normalized to cells transfected with a non-targeting control siRNA. To calculate relative fold change, real time data were analyzed using the ΔΔCt method and normalized to assays performed with cells transfected with a non-targeting control siRNA.

### Results

[0912] An initial in vitro screen with 1110 duplexes was performed in transfected PHH cells in a multi-dose assay at 10 nM, 1 nM, or 0.1 nM final duplex concentration. The duplexes were designed to cover approximately 80% of the bases in the human NM_000301 transcript. The data were expressed as percent message remaining relative to non-targeting control. The results are provided in Table 11. FIG. 1 presents the results as percent message remaining relative to the position of the duplex on the human transcript. Many duplexes caused greater than an 85% knockdown at 10 nM and greater than 70% knockdown at 0.1 nM.

[0913] The experiments were performed at various final duplex concentrations and the data were expressed as percent message remaining relative to non-targeting control. The results of the transfection assays are provided in Tables 9 and 10 and the LogIC50 results are provided in Tables 12A, 12B, 12C, and 13.

TABLE 9
PLG Multi-Dose Screens in Primary Human Hepatocytes (PHH)

| | 250 nM Dose | | 100 nM Dose | | 10 nM Dose | | 1 nM Dose | |
|---|---|---|---|---|---|---|---|---|
| | Avg % PLG | | Avg % PLG | | Avg % PLG | | Avg % PLG | |
| | mRNA | | mRNA | | mRNA | | mRNA | |
| Duplex | Remaining | SD | Remaining | SD | Remaining | SD | Remaining | SD |
| AD-2134523.1 | 7.0 | 1.1 | 8.8 | 0.7 | 25.3 | 5.1 | 56.7 | 10.8 |
| AD-2222854.1 | 9.8 | 1.1 | 11.0 | 1.0 | 26.3 | 14.7 | 57.9 | 8.6 |
| AD-2134574.1 | 6.4 | 0.5 | 10.5 | 2.3 | 19.1 | 2.5 | 55.5 | 6.8 |
| AD-2222855.1 | 14.0 | 2.9 | 15.8 | 1.3 | 31.4 | 2.3 | 60.8 | 7.8 |
| AD-2134577.1 | 21.0 | 3.4 | 24.4 | 3.0 | 48.5 | 5.8 | 80.0 | 7.0 |
| AD-2134687.1 | 4.4 | 0.2 | 5.9 | 0.8 | 12.1 | 1.2 | 33.5 | 2.5 |
| AD-2222856.1 | 7.1 | 0.9 | 10.8 | 2.0 | 27.3 | 2.2 | 55.1 | 2.9 |
| AD-2134898.1 | 3.5 | 0.6 | 3.8 | 0.8 | 6.5 | 1.0 | 24.7 | 0.5 |
| AD-2222857.1 | 5.3 | 0.8 | 4.7 | 1.0 | 15.3 | 1.3 | 39.7 | 6.5 |
| AD-2134900.1 | 7.4 | 1.4 | 9.1 | 0.7 | 24.0 | 3.3 | 51.0 | 3.2 |
| AD-2222858.1 | 32.7 | 3.3 | 32.9 | 3.5 | 61.1 | 7.4 | 83.8 | 5.5 |
| AD-2134906.1 | 13.7 | 0.7 | 15.0 | 1.6 | 31.0 | 2.1 | 67.9 | 7.7 |
| AD-2134907.1 | 8.6 | 1.2 | 9.7 | 0.8 | 23.2 | 1.7 | 58.0 | 3.8 |
| AD-2135487.1 | 7.0 | 1.4 | 9.3 | 1.4 | 19.4 | 1.5 | 38.5 | 3.9 |
| AD-2222859.1 | 13.8 | 2.0 | 18.3 | 1.1 | 40.3 | 2.1 | 68.9 | 6.5 |
| AD-2135518.1 | 21.6 | 1.4 | 24.0 | 3.2 | 49.2 | 1.7 | 80.7 | 6.0 |
| AD-2222860.1 | 57.2 | 9.3 | 65.2 | 5.7 | 89.4 | 5.8 | 102.9 | 5.0 |
| AD-2135519.1 | 14.3 | 2.5 | 16.9 | 1.8 | 36.5 | 5.5 | 67.4 | 2.8 |
| AD-2222861.1 | 16.5 | 1.9 | 16.1 | 0.8 | 43.9 | 2.5 | 74.6 | 7.3 |
| AD-2135520.1 | 14.2 | 3.1 | 17.5 | 1.7 | 42.7 | 6.4 | 72.5 | 7.5 |
| AD-2222862.1 | 40.4 | 2.3 | 37.9 | 3.3 | 79.6 | 4.5 | 93.7 | 4.4 |
| AD-2135708.1 | 4.7 | 1.6 | 6.3 | 1.3 | 16.7 | 2.2 | 39.5 | 5.5 |
| AD-2222863.1 | 9.9 | 1.4 | 12.5 | 1.7 | 30.2 | 2.5 | 62.6 | 4.1 |
| AD-2135712.1 | 8.3 | 1.2 | 9.9 | 1.1 | 28.3 | 1.9 | 56.0 | 2.2 |
| AD-2135713.1 | 7.9 | 0.7 | 8.3 | 1.6 | 24.4 | 3.3 | 54.6 | 7.4 |
| AD-2135716.1 | 6.5 | 0.4 | 6.8 | 0.5 | 19.3 | 3.3 | 44.7 | 5.6 |
| AD-2222864.1 | 9.1 | 0.8 | 8.3 | 0.8 | 23.4 | 5.2 | 46.9 | 3.2 |
| AD-2135717.1 | 9.5 | 2.0 | 12.4 | 1.6 | 29.3 | 0.6 | 58.2 | 2.1 |
| AD-2222865.1 | 40.9 | 7.5 | 49.2 | 3.9 | 73.4 | 4.8 | 96.1 | 3.8 |
| AD-2135718.1 | 8.0 | 0.9 | 10.2 | 1.1 | 26.1 | 2.8 | 58.9 | 6.8 |
| AD-2135719.1 | 9.9 | 0.7 | 12.7 | 1.4 | 33.6 | 3.9 | 69.5 | 11.0 |
| AD-2222866.1 | 40.5 | 7.3 | 42.2 | 5.7 | 62.9 | 7.9 | 88.3 | 14.4 |
| AD-2135721.1 | 9.8 | 0.7 | 10.6 | 1.5 | 32.9 | 3.2 | \|64.0 | 3.9 |
| AD-2222867.1 | 16.0 | 1.1 | 15.7 | 0.9 | 39.2 | 3.6 | 65.4 | 4.4 |
| AD-2135730.1 | 19.4 | 1.8 | 21.9 | 2.7 | 49.7 | 5.1 | 85.6 | 5.6 |
| AD-2135731.1 | 6.2 | 1.5 | 7.8 | 0.6 | 17.9 | 3.4 | 51.9 | 5.1 |
| AD-2222868.1 | 5.9 | 1.2 | 5.7 | 1.0 | 17.4 | 1.6 | 46.7 | 0.6 |
| AD-2135732.1 | 16.0 | 3.0 | 17.5 | 1.2 | 43.2 | 5.8 | 75.6 | 13.6 |
| AD-2222869.1 | 8.5 | 1.2 | 10.7 | 0.4 | 30.8 | 3.0 | 61.9 | 4.6 |
| AD-2135734.1 | 12.1 | 0.9 | 13.2 | 3.5 | 31.3 | 6.2 | 59.6 | 3.9 |
| AD-2222870.1 | 37.6 | 3.6 | 36.1 | 7.3 | 72.8 | 8.9 | \|97.9 | 6.1 |
| AD-2135736.1 | 11.4 | 1.3 | 10.9 | 0.8 | 30.1 | 3.6 | 64.4 | 5.7 |
| AD-2135737.1 | 9.3 | 1.6 | 8.6 | 1.3 | 24.7 | 3.7 | 51.6 | 14.9 |
| AD-2135738.1 | 8.9 | 1.2 | 9.4 | 2.0 | 26.2 | 3.4 | 55.9 | 5.5 |
| AD-2135786.1 | 8.4 | 0.4 | 13.0 | 1.8 | 33.9 | 2.4 | 67.8 | 5.8 |
| AD-2135788.1 | 74.9 | 8.0 | 68.9 | 7.3 | 75.4 | 8.8 | 88.7 | 13.9 |
| AD-2222871.1 | 77.6 | 7.8 | 67.2 | 7.9 | 78.4 | 6.9 | 88.4 | 6.0 |
| AD-2135789.1 | 24.7 | 3.4 | 25.8 | 4.8 | 48.0 | 13.4 | 74.9 | 6.5 |
| AD-2222872.1 | 13.6 | 1.0 | 18.0 | 1.9 | 41.3 | 3.5 | 62.3 | 4.0 |
| AD-2135821.1 | 17.9 | 3.6 | 19.8 | 0.9 | 39.3 | 4.2 | 79.2 | 3.9 |
| AD-2222873.1 | 43.5 | 1.8 | 44.7 | 3.1 | 71.7 | 5.3 | 92.4 | 6.3 |
| AD-2135896.1 | 13.7 | 0.9 | 16.0 | 2.2 | 36.8 | 5.9 | 76.7 | 2.4 |
| AD-2135897.1 | 86.5 | 4.5 | 87.7 | 6.5 | 99.4 | 10.3 | 105.3 | 8.7 |
| AD-2222874.1 | 9.4 | 1.9 | 10.2 | 2.4 | 27.0 | 3.0 | 53.9 | 0.7 |
| AD-2222875.1 | 4.7 | 0.5 | 4.9 | 0.5 | 11.1 | 1.2 | 35.4 | 3.9 |
| AD-2135900.1 | 6.4 | 1.5 | 5.9 | 0.3 | 14.1 | 1.8 | 45.2 | 1.6 |
| AD-2222876.1 | 10.4 | 1.3 | 10.9 | 0.5 | 26.8 | 4.3 | 57.0 | 5.6 |
| AD-2135901.1 | 11.3 | 1.6 | 11.2 | 2.0 | 34.7 | 2.7 | 68.1 | 5.5 |
| AD-2222877.1 | 36.2 | 2.7 | 34.1 | 5.2 | 67.7 | 3.8 | \|86.3 | 5.5 |
| AD-2135904.1 | 4.6 | 1.1 | 5.1 | 0.7 | 13. | 10.9 | 35.0 | 2.5 |
| AD-2135907.1 | 14.9 | 1.2 | 18.0 | 2.0 | 40.3 | 3.2 | 67.3 | 2.9 |
| AD-2135962.1 | 8.6 | 2.0 | 8.4 | 0.6 | 27.3 | 2.8 | 59.3 | 4.5 |
| AD-2135964.1 | 26.1 | 2.7 | 23.8 | 2.9 | 50.9 | 5.6 | 83.8 | 6.7 |
| AD-2222878.1 | 47.2 | 2.3 | 42.1 | 4.2 | 70.2 | 4.6 | 81.3 | 18.0 |
| AD-2135965.1 | 6.8 | 1.1 | 8.3 | 1.6 | 21.9 | 4.5 | 54.4 | 7.0 |
| AD-2222879.1 | 15.7 | 1.3 | 15.3 | 2.5 | 46.5 | 1.6 | 77.6 | 16.6 |
| AD-2135967.1 | 17.7 | 0.9 | 25.1 | 2.7 | 61.1 | 2.0 | 92.1 | 4.2 |
| AD-2135973.1 | 7.2 | 1.2 | 7.7 | 0.6 | 27.0 | 2.8 | 58.9 | 4.8 |
| AD-2136060.1 | 46.4 | 5.5 | 45.8 | 6.3 | 68.2 | 5.9 | 93.5 | 2.3 |
| AD-2222880.1 | 42.0 | 10.8 | 38.8 | 5.4 | 65.1 | 9.7 | 84.7 | 6.1 |
| AD-2136066.1 | 28.7 | 4.5 | 29.3 | 4.2 | 58.4 | 3.7 | 84.6 | 3.2 |
| AD-2222881.1 | 65.5 | 3.1 | 55.8 | 4.6 | 84.5 | 5.7 | 96.8 | 3.4 |
| AD-2136068.1 | 17.0 | 1.8 | 20.0 | 1.5 | 45.5 | 6.7 | 73.3 | 7.5 |
| AD-2136069.1 | 21.5 | 1.3 | 23.1 | 2.3 | \|51.0 | 9.2 | 76.6 | 6.8 |
| AD-2222882.1 | 47.9 | 5.1 | 51.9 | 2.6 | 89.4 | 5.1 | 112.1 | 3.7 |
| AD-2136072.1 | 12.6 | 2.1 | 14.1 | 1.2 | 35.3 | 4.6 | 61.7 | 10.8 |
| AD-2222883.1 | 30.2 | 3.4 | 34.7 | 3.4 | 58.4 | 13.5 | 83.6 | 12.7 |
| AD-2136073.1 | 4.7 | 1.1 | 6.4 | 0.8 | 18.9 | 4.5 | 40.2 | 0.8 |
| AD-2136074.1 | 42.0 | 1.2 | 44.9 | 1.3 | 83.0 | 18.0 | 98.6 | 3.0 |
| AD-2136075.1 | 34.7 | 4.9 | 44.1 | 3.8 | 76.4 | 6.7 | 87.6 | 7.3 |
| AD-2136077.1 | 6.7 | 1.2 | \|7.0 | 1.5 | 22.6 | 1.6 | 48.8 | 3.7 |
| AD-2136079.1 | 4.8 | 0.6 | 5.8 | 1.5 | 14.6 | 1.2 | 38.6 | 6.2 |
| AD-2222884.1 | 5.7 | 2.0 | 16.5 | 1.0 | 23.5 | 2.7 | 56.6 | 14.8 |
| AD-2136080.1 | 5.1 | 0.8 | 6.2 | 0.2 | 22.4 | 2.0 | 46.3 | 5.2 |
| AD-2222885.1 | 12.4 | 1.0 | 16.4 | 1.6 | 41.0 | 8.4 | 60.5 | 1.3 |
| AD-2136083.1 | 5.4 | 1.2 | 5.3 | 2.2 | 25.9 | 2.5 | 49.3 | 5.1 |
| AD-2136164.1 | 29.5 | 4.1 | 28.7 | 3.1 | 51.9 | 10.2 | 81.1 | 5.3 |
| AD-2136166.1 | 10.4 | 1.3 | 11.7 | 1.6 | 34.8 | 1.2 | 63.3 | 7.4 |
| AD-2222886.1 | 6.9 | 1.1 | 10.1 | 0.7 | 30.0 | 5.0 | 53.9 | 4.8 |
| AD-2136168.1 | 17.0 | 4.3 | 18.3 | 1.7 | 35.9 | 3.3 | 76.8 | 5.4 |
| AD-2222887.1 | 42.4 | 6.0 | 40.2 | 2.3 | 73.3 | 3.7 | 106.1 | 7.5 |
| AD-2136171.1 | 10.0 | 1.3 | 13.4 | 2.2 | 30.6 | 5.9 | 59.8 | 2.6 |
| AD-2136172.1 | 13.9 | 2.3 | 17.2 | 2.2 | 36.0 | 6.9 | 68.4 | 18.8 |
| AD-2136179.1 | 25.7 | 2.9 | 32.8 | \|6.9 | 52.0 | 3.9 | 82.4 | 1.4 |
| AD-2222888.1 | 36.8 | 4.2 | 46.3 | 7.5 | 69.0 | 3.9 | 85.5 | 5.6 |
| AD-2136183.1 | 33.0 | 4.6 | 38.2 | 5.6 | 48.9 | 4.5 | 83.8 | 8.1 |
| AD-2136263.1 | 55.4 | 1.0 | 51.7 | 3.6 | 80.7 | 11.4 | 97.7 | 12.4 |
| AD-2136347.1 | 12.8 | 0.7 | 13.7 | 2.7 | 33.9 | 5.2 | 66.6 | 10.7 |
| AD-2222889.1 | 11.8 | 2.6 | 13.8 | 3.4 | 24.4 | 2.6 | 45.6 | 6.8 |
| AD-2136348.1 | 9.8 | 1.2 | 13.7 | 1.1 | 26.2 | 2.8 | 54.7 | 3.9 |
| AD-2222890.1 | 20.2 | 1.7 | 23.9 | 1.8 | 45.0 | 8.1 | 80.7 | 2.9 |
| AD-2136349.1 | 35.1 | 4.6 | 50.2 | 7.7 | 68.4 | 9.8 | 78.6 | 14.2 |
| AD-2222891.1 | 35.8 | 1.6 | 40.5 | 4.5 | 60.5 | 9.2 | 91.5 | 6.9 |
| AD-2136355.1 | 9.3 | 0.9 | 12.4 | 1.2 | 31.5 | 5.6 | 57.0 | 9.4 |
| AD-2136421.1 | 6.0 | 0.4 | 7.4 | 0.2 | 23.4 | 3.4 | 45.7 | 7.4 |
| AD-2222892.1 | 14.3 | 1.7 | 19.4 | 2.4 | 46.2 | 5.5 | 72.3 | 5.0 |
| AD-2136431.1 | 10.2 | 0.7 | 13.8 | 3.9 | 31.1 | 2.9 | 71.2 | 7.3 |
| AD-2222893.1 | 10.6 | 0.8 | 14.5 | 3.8 | 24.4 | 3.7 | 56.9 | 7.4 |
| AD-2136433.1 | 57.3 | 2.8 | 67.4 | 8.8 | 82.9 | 4.4 | 107.7 | 4.5 |
| AD-2136434.1 | 10.5 | 1.0 | 11.6 | 2.5 | 23.7 | 2.4 | 73.4 | 7.8 |
| AD-2222894.1 | 28.5 | 5.4 | 34.5 | 3.4 | 68.1 | 8.8 | 97.7 | 9.5 |
| AD-2136437.1 | 7.0 | 1.2 | 9.3 | 1.9 | 24.5 | 3.0 | 44.6 | 4.4 |
| AD-2222895.1 | 9.0 | 0.7 | 13.6 | 2.6 | 21.4 | 2.8 | 67.4 | 12.0 |
| AD-2136438.1 | 13.7 | 1.7 | 16.3 | 2.8 | 40.3 | 3.0 | 69.5 | 2.8 |
| AD-2222896.1 | 47.8 | 5.9 | 48.0 | 9.6 | 66.3 | 7.5 | 91.4 | 4.2 |
| AD-2136439.1 | 10.0 | 1.0 | 10.9 | 1.4 | 28.2 | 3.1 | 57.0 | 2.3 |
| AD-2222897.1 | 31.0 | 2.7 | 34.5 | 3.6 | 61.3 | 11.3 | 91.0 | 6.1 |
| AD-2136440.1 | 9.9 | 0.7 | 9.9 | 0.9 | 19.9 | 3.3 | 58.2 | 4.1 |
| AD-2222898.1 | 8.5 | 0.8 | 9.5 | 1.4 | 23.6 | 4.6 | 54.5 | 5.9 |
| AD-2136442.1 | 6.8 | 1.6 | 8.2 | 1.9 | 15.8 | 3.2 | 34.4 | 2.2 |
| AD-2136443.1 | 14.1 | 1.0 | 12.3 | 2.6 | 30.6 | 2.4 | 66.2 | 6.7 |
| AD-2222899.1 | 39.3 | 6.1 | 44.3 | 3.0 | 69.7 | 6.3 | 81.0 | 3.2 |
| AD-2136465.1 | 16.2 | 1.6 | 21.6 | 2.8 | 43.4 | 6.7 | 83.0 | 4.1 |
| AD-2222900.1 | 11.6 | 1.0 | 16.7 | 5.2 | 26.9 | 5.9 | 67.6 | 7.9 |
| AD-2136470.1 | 10.4 | 0.9 | 12.2 | 1.1 | 34.6 | 2.3 | 61.2 | 4.2 |
| AD-2136571.1 | 12.3 | 1.0 | 15.7 | 3.3 | 43.3 | 14.8 | 65.8 | 5.0 |
| AD-2222901.1 | 14.7 | 1.7 | 24.9 | 2.2 | 48.7 | 8.2 | 85.4 | 7.2 |
| AD-2136606.1 | 40.1 | 1.2 | 44.6 | 3.7 | 70.3 | 12.1 | 95.3 | 5.7 |
| AD-2222902.1 | 63.5 | 7.1 | 76.8 | 7.3 | 101.6 | 9.6 | 100.3 | 19.7 |
| AD-2136716.1 | 6.6 | 1.1 | 6.9 | 0.6 | 16.1 | 1.9 | 35.0 | 2.7 |
| AD-2222903.1 | 11.6 | 0.6 | 15.7 | 2.2 | 37.4 | 1.4 | 71.4 | 5.2 |
| AD-2136717.1 | 7.6 | 1.0 | 8.2 | 1.5 | 15.4 | 2.1 | 41.5 | 3.0 |
| AD-2136718.3 | 7.6 | 0.2 | 9.2 | 1.3 | 14.0 | 1.7 | 34.9 | 4.5 |
| AD-2136721.1 | 8.0 | 0.6 | 9.8 | 2.2 | 16.9 | 3.0 | 41.0 | 5.3 |
| AD-2136726.1 | 12.5 | 1.3 | 15.2 | 2.4 | 27.0 | 1.0 | 67.2 | 5.3 |
| AD-2222905.1 | 39.8 | 8.4 | 36.4 | 7.8 | 55.0 | 6.0 | 77.0 | 5.3 |
| AD-2136729.1 | 24.5 | 1.8 | 28.9 | 0.3 | 61.1 | 7.7 | 81.1 | 3.6 |
| AD-2222906.1 | 37.3 | 4.6 | 39.4 | 1.5 | 53.4 | 6.7 | 81.4 | 4.1 |
| AD-2136753.1 | 19.8 | 3.0 | 25.9 | 2.7 | 51.6 | 9.0 | 78.3 | 5.5 |
| AD-2136754.1 | 17.4 | 1.4 | 18.5 | 1.6 | 34.9 | 5.0 | 78.9 | 8.0 |
| AD-2136755.1 | 9.2 | 1.2 | 11.8 | 0.2 | 20.9 | 4.4 | 55.3 | 2.2 |
| AD-2136756.1 | 20.6 | 1.4 | 28.5 | 5.1 | 49.2 | 6.5 | 76.0 | 7.9 |
| AD-2222907.1 | 79.9 | 1.1 | 79.6 | 7.6 | 107.1 | 8.6 | 103.9 | 14.7 |
| AD-2136757.1 | 7.2 | 0.5 | 9.4 | 1.6 | 20.4 | 2.4 | 54.7 | 2.9 |
| AD-2222908.1 | 12.5 | 1.7 | 16.0 | 2.0 | 43.4 | 3.5 | 68.0 | 7.2 |
| AD-2136758.1 | 48.7 | 3.5 | 52.1 | 3.9 | 87.2 | 13.8 | 96.1 | 7.8 |
| AD-2222909.1 | 28.6 | 1.3 | 33.9 | 2.2 | 66.7 | 4.4 | 101.6 | 2.4 |
| AD-2136760.1 | 11.7 | 1.8 | 16.7 | 1.7 | 32.7 | 0.8 | 67.3 | 2.4 |
| AD-2222910.1 | 9.9 | 0.6 | 13.0 | 1.6 | 25.1 | 3.4 | 55.0 | 1.5 |
| AD-2136761.1 | 14.7 | 1.5 | 18.6 | 1.1 | 35.1 | 3.4 | 61.5 | 4.6 |
| AD-2136762.1 | 11.0 | 2.5 | 15.5 | 3.8 | 30.7 | 5.0 | 54.6 | 4.3 |
| AD-2222911.1 | 11.6 | 1.1 | 15.5 | 2.3 | 31.2 | 4.9 | 59.8 | 8.9 |
| AD-2136763.1 | 7.9 | 0.5 | 8.4 | 0.9 | 18.1 | 1.3 | 44.0 | 0.9 |
| AD-2136764.1 | 9.7 | 1.7 | 13.8 | 1.6 | 34.4 | 7.6 | 66.7 | 4.0 |
| AD-2136787.1 | 8.5 | 1.5 | 10.3 | 1.3 | 24.7 | 3.3 | 45.7 | 14.4 |
| AD-2222912.1 | 23.4 | 0.9 | 31.6 | 2.7 | 59.2 | 3.8 | 86.6 | 8.8 |
| AD-2136790.1 | 9.9 | 1.3 | 12.2 | 2.7 | 36.2 | 7.1 | 61.8 | 5.2 |
| AD-2136791.1 | 26.2 | 3.4 | 29.7 | 4.9 | 60.0 | 9.8 | 78.1 | 11.9 |
| AD-2222913.1 | 34.7 | 4.9 | 37.9 | 3.8 | 59.7 | 8.3 | 78.2 | 8.5 |
| AD-2136792.1 | 5.9 | 0.7 | 6.4 | 0.8 | 15.8 | 1.9 | 36.1 | 2.4 |
| AD-2222914.1 | 10.0 | 2.0 | 12.2 | 1.7 | 33.8 | 5.4 | 59.3 | 4.8 |
| AD-2136793.1 | 9.6 | 1.5 | 12.3 | 2.6 | 31.0 | 5.6 | 66.0 | 4.0 |
| AD-2222915.1 | 29.9 | 3.8 | 37.4 | 4.1 | 65.1 | 5.4 | 84.7 | 10.2 |
| AD-2136794.1 | 10.1 | 2.5 | 9.8 | 0.7 | 34.1 | 5.4 | 49.5 | 10.4 |
| AD-2222916.1 | 31.6 | 2.7 | 40.0 | 6.3 | 72.9 | 9.4 | 87.1 | 8.4 |
| AD-2136797.1 | 14.0 | 1.7 | 22.2 | 1.3 | 39.2 | 4.2 | 67.2 | 2.8 |
| AD-2222917.1 | 12.1 | 0.8 | 15.7 | 1.6 | 37.7 | 2.6 | 69.3 | 2.4 |
| AD-2136851.1 | 6.6 | 1.2 | 7.8 | 1.4 | 16.4 | 1.5 | 42.4 | 1.9 |
| AD-2136852.1 | 6.6 | 1.3 | 8.7 | 0.6 | 25.9 | 3.7 | 48.9 | 8.7 |
| AD-2136853.1 | 4.1 | 0.8 | 5.6 | 1.2 | 8.7 | 3.4 | 23.8 | 5.8 |
| AD-2136854.1 | 17.1 | 5.3 | 22.1 | 3.8 | 45.1 | 3.6 | 82.7 | 0.6 |
| AD-2136855.1 | 6.1 | 0.8 | 6.8 | 1.0 | 17.2 | 3.5 | 28.2 | 0.2 |
| AD-2222918.1 | 37.4 | 6.6 | 42.0 | 4.0 | 72.2 | 3.4 | 84.9 | 6.0 |
| AD-2136857.1 | 6.8 | 0.4 | 7.7 | 0.8 | 18.8 | 2.0 | 45.9 | 2.1 |
| AD-2222919.1 | 25.6 | 2.4 | 31.1 | 1.4 | 54.7 | 7.0 | 69.8 | 5.0 |
| AD-2136859.1 | 8.3 | 0.9 | 11.0 | 1.6 | 25.1 | 1.8 | 47.1 | 3.3 |
| AD-2222920.1 | 23.9 | 4.8 | 29.8 | 2.4 | 52.3 | 4.1 | 73.5 | 5.9 |
| AD-2136861.1 | 8.3 | 1.7 | 10.9 | 3.3 | 27.5 | 4.5 | 43.8 | 5.1 |
| AD-2136862.1 | 10.0 | 2.7 | 9.6 | 1.7 | 26.5 | 2.2 | 51.2 | 5.3 |
| AD-2136864.1 | 6.7 | 0.1 | 10.4 | 1.0 | 22.8 | 1.6 | 55.9 | 3.0 |
| AD-2136865.1 | 12.6 | 3.3 | 12.5 | 1.1 | 27.5 | 4.8 | 53.3 | 1.7 |
| AD-2222921.1 | 9.2 | 0.9 | 11.7 | 1.0 | 23.6 | 2.9 | 56.1 | 3.2 |
| AD-2136866.1 | 26.1 | 4.0 | 31.7 | 1.6 | 48.8 | 2.3 | 88.6 | 6.7 |
| AD-2136867.1 | 17.2 | 1.7 | 22.7 | 1.2 | 44.7 | 5.6 | 73.6 | 4.7 |
| AD-2136868.1 | 7.9 | 1.0 | 8.0 | 1.2 | 15.1 | 1.7 | 43.4 | 3.7 |
| AD-2222922.1 | 12.6 | 0.8 | 14.2 | 4.4 | 30.4 | 3.2 | 70.9 | 7.9 |
| AD-2136869.1 | 8.2 | 1.8 | 14.1 | 1.2 | 29.3 | 3.7 | 54.9 | 3.0 |
| AD-2222923.1 | 27.0 | 5.4 | 31.0 | 1.5 | 64.3 | 2.8 | 81.7 | 4.9 |
| AD-2136870.1 | 17.9 | 1.4 | 22.5 | 2.6 | 45.2 | 0.9 | 67.4 | 5.9 |
| AD-2222924.1 | 66.3 | 4.2 | 80.0 | 4.6 | 99.7 | 2.9 | 111.5 | 3.3 |
| AD-2136871.1 | 8.9 | 1.2 | 11.6 | 1.2 | 15.6 | 2.9 | 39.0 | 2.3 |
| AD-2136873.1 | 10.5 | 1.3 | 12.3 | 1.9 | 26.9 | 1.4 | 60.2 | 8.6 |
| AD-2136874.1 | 10.7 | 0.9 | 14.2 | 1.9 | 26.1 | 3.2 | 63.2 | 4.1 |
| AD-2222925.1 | 31.9 | 4.3 | 44.0 | 3.2 | 67.7 | 3.9 | 100.3 | 8.7 |
| AD-2136875.1 | 8.6 | 1.7 | 8.7 | 1.5 | 19.2 | 2.2 | 45.4 | 5.4 |
| AD-2222926.1 | 10.1 | 0.6 | 11.2 | 1.4 | 22.1 | 4.3 | 47.7 | 4.0 |
| AD-2136876.1 | 10.8 | 1.3 | 12.7 | 1.2 | 22.7 | 3.0 | 50.2 | 1.5 |
| AD-2222927.1 | 23.7 | 4.0 | 29.3 | 2.8 | 54.2 | 3.7 | 88.8 | 5.2 |
| AD-2136877.1 | 10.0 | 0.9 | 9.8 | 1.3 | 18.0 | 2.9 | 47.6 | 2.6 |
| AD-2136878.1 | 11.5 | 1.5 | 14.2 | 0.6 | 29.2 | 3.5 | 63.9 | 4.5 |
| AD-2136879.1 | 10.1 | 0.4 | 10.1 | 0.9 | 18.0 | 1.5 | 45.3 | 3.6 |
| AD-2222928.1 | 11.5 | 1.8 | 14.3 | 2.3 | 24.9 | 2.0 | 60.6 | 6.2 |
| AD-2136880.1 | 14.2 | 1.6 | 17.2 | 1.5 | 41.9 | 1.6 | 70.1 | 3.8 |
| AD-2222929.1 | 14.5 | 3.5 | 18.3 | 1.3 | 40.2 | 1.6 | 68.3 | 6.9 |
| AD-2136882.1 | 33.0 | 3.4 | 42.6 | 3.3 | 72.0 | 7.8 | 91.7 | 9.9 |
| AD-2136883.1 | 9.8 | 0.8 | 9.2 | 0.4 | 20.2 | 1.5 | 47.7 | 1.8 |
| AD-2222930.1 | 16.2 | 1.3 | 16.3 | 2.5 | 36.1 | 4.1 | 62.4 | 6.1 |
| AD-2136992.1 | 13.8 | 0.5 | 13.1 | 3.4 | 25.8 | 1.8 | 68.9 | 5.5 |
| AD-2136993.1 | 8.6 | 2.0 | 8.0 | 1.4 | 15.7 | 3.1 | 39.8 | 5.3 |
| AD-2136994.1 | 28.0 | 2.7 | 32.1 | 1.8 | 57.8 | 3.1 | 87.1 | 2.5 |
| AD-2222931.1 | 62.9 | 1.3 | 67.6 | 7.5 | 85.6 | 8.8 | 102.6 | 4.4 |
| AD-2136995.1 | 15.1 | 0.8 | 16.7 | 2.1 | 30.4 | 2.2 | 62.2 | 3.1 |
| AD-2222932.1 | 49.9 | 4.8 | 53.6 | 2.3 | 71.6 | 2.6 | 95.3 | 2.2 |
| AD-2136996.1 | 8.6 | 1.4 | 7.2 | 0.8 | 14.1 | 1.0 | 32.9 | 4.9 |
| AD-2136997.1 | 8.0 | 1.4 | 7.6 | 0.5 | 15.2 | 1.9 | 36.7 | 3.6 |
| AD-2136998.1 | 13.5 | 1.6 | 11.6 | 1.5 | 24.6 | 2.8 | 45.0 | 4.1 |
| AD-2136999.1 | 6.5 | 1.6 | 8.3 | 1.1 | 13.0 | 0.9 | 28.9 | 2.8 |
| AD-2137000.1 | 13.6 | 1.2 | 15.7 | 1.5 | 36.8 | 14.8 | 64.2 | 9.8 |
| AD-2137001.1 | 18.8 | 2.2 | 23.4 | 0.5 | 45.8 | 2.5 | 83.9 | 7.9 |
| AD-2137002.1 | 15.1 | 2.7 | 15.5 | 1.1 | 31.1 | 2.6 | 54.6 | 3.9 |
| AD-2222933.1 | 44.9 | 2.6 | 44.1 | 3.3 | 74.6 | 9.8 | 87.3 | 2.8 |
| AD-2137016.3 | 12.8 | 3.0 | 13.3 | 1.5 | 29.1 | 1.8 | 57.7 | 7.3 |
| AD-2137017.3 | 5.9 | 1.7 | 6.8 | 1.3 | 10.4 | 2.4 | 33.3 | 3.2 |
| AD-2137018.5 | 5.5 | 2.3 | 5.6 | 1.1 | 9.4 | 0.5 | 17.6 | 3.1 |
| AD-2222934.1 | 14.4 | 2.1 | 18.6 | 1.7 | 30.6 | 4.2 | 65.1 | 4.3 |
| AD-2137019.1 | 12.0 | 2.2 | 12.7 | 1.3 | 29.1 | 3.6 | 54.1 | 3.5 |
| AD-2137020.1 | 13.9 | 0.7 | 17.3 | 1.4 | 35.4 | 2.9 | 56.5 | 3.8 |
| AD-2137021.1 | 13.0 | 2.3 | 10.6 | 1.8 | 25.6 | 3.8 | 46.9 | 1.2 |
| AD-2137022.1 | 14.1 | 1.3 | 15.0 | 1.6 | 41.2 | 5.2 | 58.4 | 6.4 |
| AD-2137023.1 | 43.1 | 5.1 | 51.4 | 3.5 | 81.5 | 2.4 | 101.3 | 1.9 |
| AD-2137024.1 | 9.5 | 1.4 | 9.5 | 0.8 | 14.9 | 1.7 | 44.2 | 3.1 |
| AD-2137025.1 | 9.3 | 1.9 | 18.4 | 1.5 | 10.8 | 1.3 | 22.3 | 3.8 |
| AD-2137026.1 | 20.9 | 4.0 | 25.1 | 4.2 | 54.9 | 6.3 | 77.5 | 7.0 |
| AD-2137027.1 | 11.9 | 2.2 | 12.3 | 1.3 | 24.4 | 3.1 | 49.4 | 14.4 |
| AD-2137055.1 | 18.1 | 1.9 | 15.5 | 1.4 | 33.0 | 3.3 | 68.1 | 14.3 |
| AD-2222935.1 | 21.6 | 3.1 | 28.3 | 4.9 | 53.7 | 4.4 | 72.9 | 3.1 |
| AD-2137056.1 | 13.5 | 1.2 | 12.4 | 3.0 | 20.4 | 2.8 | 45.8 | 5.1 |
| AD-2222936.1 | 15.4 | 1.4 | 14.3 | 1.3 | 31.4 | 4.7 | 63.6 | 6.7 |
| AD-2137057.1 | 22.5 | 3.3 | 22.8 | 5.0 | 33.3 | 3.6 | 66.3 | 6.2 |
| AD-2222937.1 | 32.0 | 3.6 | 31.9 | 4.3 | 55.2 | 1.1 | 90.6 | 8.5 |
| AD-2137059.1 | 5.5 | 2.5 | 7.7 | 1.5 | 13.0 | 1.0 | 21.8 | 2.6 |
| AD-2137061.1 | 10.7 | 0.7 | 12.9 | 1.6 | 23.3 | 4.8 | 37.0 | 1.0 |
| AD-2222939.1 | 11.3 | 3.4 | 10.0 | 2.3 | 14.1 | 2.3 | 27.4 | 4.2 |
| AD-2222940.1 | 16.9 | 2.8 | 15.9 | 1.9 | 26.4 | 3.0 | 50.1 | 3.7 |
| AD-2137062.1 | 31.6 | 5.5 | 40.1 | 3.1 | 64.0 | 5.9 | 90.2 | 8.0 |
| AD-2137063.1 | 17.2 | 2.7 | 17.7 | 1.4 | 23.4 | 2.3 | 45.1 | 7.3 |
| AD-2137101.1 | 45.3 | 6.5 | 48.2 | 2.8 | 71.7 | 3.8 | 87.1 | 7.0 |
| AD-2137128.1 | 21.4 | 3.6 | 26.2 | 4.4 | 57.4 | 2.9 | 82.3 | 7.4 |
| AD-2137130.1 | 16.7 | 1.9 | 17.9 | 3.4 | 41.5 | 3.0 | 69.4 | 6.0 |
| AD-2137138.1 | 25.8 | 3.4 | 31.5 | 2.9 | 57.5 | 6.6 | 99.6 | 9.2 |
| AD-2137196.1 | 10.5 | 1.2 | 12.5 | 2.8 | 25.4 | 2.8 | 44.6 | 3.7 |
| AD-2222942.1 | 21.1 | 3.8 | 32.5 | 3.0 | 50.6 | 4.5 | 82.8 | 12.6 |
| AD-2137197.1 | 9.6 | 0.9 | 14.1 | 1.7 | 24.7 | 4.3 | 45.9 | 6.4 |
| AD-2222943.1 | 16.6 | 0.4 | 19.6 | 3.8 | 39.3 | 1.7 | 59.3 | 6.5 |
| AD-2137198.1 | 12.0 | 2.2 | 12.0 | 0.8 | 24.6 | 4.0 | 52.1 | 4.2 |
| AD-2222944.1 | 9.5 | 2.1 | 12.4 | 1.9 | 22.8 | 2.9 | 40.5 | 5.0 |
| AD-2137199.1 | 7.4 | 0.5 | 5.9 | 0.6 | 12.0 | 2.1 | 28.7 | 2.3 |
| AD-2222945.1 | 12.6 | 1.5 | 12.1 | 1.7 | 19.3 | 6.3 | 34.8 | 2.1 |
| AD-2137200.1 | 9.4 | 1.6 | 11.5 | 2.8 | 23.4 | 0.8 | 46.4 | 7.7 |
| AD-2222946.1 | 15.3 | 0.9 | 16.4 | 1.6 | 32.5 | 2.8 | 58.0 | 4.5 |
| AD-2137204.1 | 6.3 | 1.4 | 5.7 | 0.7 | 11.7 | 0.4 | 23.5 | 2.1 |
| AD-2137223.1 | 5.9 | 1.6 | 5.5 | 1.1 | 10.5 | 0.6 | 20.4 | 1.3 |
| AD-2137224.1 | 16.8 | 3.6 | 18.0 | 3.4 | 25.9 | 3.6 | 54.5 | 2.7 |
| AD-2222947.1 | 11.2 | 2.7 | 8.9 | 3.3 | 20.4 | 3.0 | 37.4 | 3.5 |
| AD-2137225.1 | 6.3 | 1.0 | 6.3 | 1.1 | 7.5 | 2.1 | 18.4 | 1.6 |
| AD-2222949.1 | 11.7 | 2.5 | 10.2 | 2.6 | 17.0 | 2.8 | 33.1 | 4.1 |

TABLE 10
PLG Multi-Dose Screens in Primary Cyno Hepatocytes (PCH)

| | 250 nM Dose | | 100 nM Dose | | 10 nM Dose | | 1 nM Dose | |
|---|---|---|---|---|---|---|---|---|
| | Avg % | | Avg % | | Avg % | | Avg % | |
| | PLG | | PLG | | PLG | | PLG | |
| | mRNA | | mRNA | | mRNA | | mRNA | |
| Duplex | Remaining | SD | Remaining | SD | Remaining | SD | Remaining | SD |
| AD-2134523.1 | 3.8 | 0.5 | 3.1 | 0.3 | 6.6 | 1.2 | 20.7 | 3.5 |
| AD-2222854.1 | 5.1 | 0.9 | 3.5 | 0.6 | 7.6 | 1.6 | 23.7 | 4.0 |
| AD-2134574.1 | 3.2 | 0.4 | 2.7 | 0.4 | 7.0 | 0.7 | 16.8 | 5.0 |
| AD-2222855.1 | 8.2 | 0.8 | 6.8 | 1.0 | 15.4 | 1.2 | 29.2 | 6.1 |
| AD-2134577.1 | 6.1 | 0.2 | 4.9 | 0.2 | 11.2 | 3.0 | 28.2 | 2.4 |
| AD-2134687.1 | 1.4 | 0.2 | 0.9 | 0.2 | 2.3 | 0.4 | 6.3 | 0.3 |
| AD-2222856.1 | 3.5 | 0.4 | 2.9 | 0.3 | 7.3 | 0.8 | 21.1 | 1.5 |
| AD-2134898.1 | 1.9 | 0.3 | 1.7 | 0.2 | 3.8 | 0.4 | 8.2 | 10.7 |
| AD-2222857.1 | 3.2 | 0.4 | 3.1 | 0.7 | 6.8 | 0.6 | 14.0 | 2.5 |
| AD-2134900.1 | 8.8 | 1.4 | 7.7 | 0.8 | 17.4 | 1.8 | 26.3 | 3.8 |
| AD-2222858.1 | 22.7 | 2.4 | 24.6 | 3.1 | 34.1 | 6.0 | 35.8 | 5.2 |
| AD-2134906.1 | 7.4 | 0.9 | 7.1 | 0.2 | 13.3 | 0.8 | \|28.4 | 2.8 |
| AD-2134907.1 | 4.9 | 0.7 | 4.7 | 1.0 | 8.8 | 1.2 | 20.0 | 0.8 |
| AD-2135487.1 | 2.0 | 0.3 | 1.8 | 0.3 | 5.0 | 0.6 | 9.6 | 0.7 |
| AD-2222859.1 | 6.3 | 1.0 | 5.9 | 0.5 | 15.5 | 0.8 | 26.9 | 3.0 |
| AD-2135518.1 | 9.1 | 0.8 | 9.2 | 1.0 | 19.4 | 3.6 | 40.4 | 4.9 |
| AD-2222860.1 | 27.4 | 9.2 | 33.1 | 8.5 | 60.8 | 3.4 | 51.4 | 4.6 |
| AD-2135519.1 | 6.7 | 1.1 | 6.1 | 0.6 | 12.9 | 1.4 | 26.2 | 5.5 |
| AD-2222861.1 | 6.0 | 0.8 | 6.0 | 0.5 | 13.5 | 1.6 | 26.3 | 3.9 |
| AD-2135520.1 | 7.7 | 0.7 | 7.3 | 0.5 | 14.4 | 0.9 | 27.2 | 2.6 |
| AD-2222862.1 | 16.2 | 0.9 | 15.3 | 1.2 | 27.3 | 6.2 | 42.3 | 3.5 |
| AD-2135708.1 | 1.4 | 0.3 | 1.3 | 0.3 | 4.0 | 0.7 | 10.7 | 1.7 |
| AD-2222863.1 | 2.1 | 0.2 | 2.4 | 0.4 | 6.5 | 1.9 | 17.3 | 0.9 |
| AD-2135712.1 | 2.9 | 0.2 | 3.1 | 0.3 | 8.6 | 2.0 | 22.2 | 3.5 |
| AD-2135713.1 | 3.3 | 0.4 | 3.6 | 0.1 | 8.1 | 1.1 | 22.7 | 1.8 |
| AD-2135716.1 | 2.2 | 0.2 | 2.3 | 0.2 | 6.6 | 0.2 | 16.2 | 3.3 |
| AD-2222864.1 | 2.6 | 0.2 | 2.3 | 0.4 | 7.3 | 0.9 | 16.8 | 4.2 |
| AD-2135717.1 | 3.1 | 0.3 | 3.2 | 0.1 | 8.3 | 1.0 | 16.0 | 1.8 |
| AD-2222865.1 | 19.6 | 2.7 | 19.4 | 2.5 | 33.2 | 3.5 | 48.9 | 7.0 |
| AD-2135718.1 | 3.0 | 0.7 | 3.2 | 0.8 | 8.0 | 1.6 | 19.0 | 3.4 |
| AD-2135719.1 | 6.1 | 0.8 | 5.0 | 0.8 | 12.3 | 1.7 | 25.6 | 6.2 |
| AD-2222866.1 | 18.8 | 2.1 | 18.4 | 2.7 | 32.8 | 4.9 | 55.6 | 8.0 |
| AD-2135721.1 | 4.8 | 0.5 | 4.1 | 0.7 | 10.6 | 2.3 | 23.4 | 4.4 |
| AD-2222867.1 | 10.9 | 2.1 | 8.8 | 0.6 | 19.0 | 2.8 | 35.7 | 3.8 |
| AD-2135730.1 | 11.2 | 0.8 | 10.0 | 1.3 | 19.3 | 2.6 | 37.1 | 4.3 |
| AD-2135731.1 | 3.1 | 0.5 | 2.7 | 0.1 | 16.0 | 0.9 | 13.5 | 1.4 |
| AD-2222868.1 | 3.4 | 0.5 | 3.0 | 0.3 | 6.3 | 0.7 | 13.3 | 1.0 |
| AD-2135732.1 | 14.6 | 3.3 | 13.2 | 2.0 | 22.2 | 2.1 | 36.5 | 3.8 |
| AD-2222869.1 | 7.3 | 0.7 | 6.2 | 1.6 | 12.6 | 2.3 | 21.7 | 1.8 |
| AD-2135734.1 | 9.5 | 1.3 | 8.5 | 1.2 | 13.7 | 1.1 | 31.1 | 2.4 |
| AD-2222870.1 | 25.5 | 2.9 | 21.2 | 2.3 | 34.0 | 6.2 | 49.5 | 9.3 |
| AD-2135736.1 | 7.2 | 0.9 | 5.1 | 0.6 | 10.5 | 1.2 | 18.7 | 1.9 |
| AD-2135737.1 | 4.0 | 0.5 | 2.8 | 0.5 | 6.8 | 0.6 | 17.4 | 1.5 |
| AD-2135738.1 | 4.2 | 0.2 | 3.7 | 0.5 | 6.9 | 0.8 | 15.4 | 0.8 |
| AD-2135786.1 | 4.8 | 0.3 | 4.4 | 0.3 | 10.9 | 0.8 | 19.9 | 0.9 |
| AD-2135788.1 | 59.5 | 8.3 | 54.4 | 6.8 | 64.8 | 8.4 | 96.7 | 5.0 |
| AD-2222871.1 | 65.2 | 9.5 | 57.6 | 7.1 | 87.1 | 12.2 | 103.4 | 14.6 |
| AD-2135789.1 | 14.7 | 1.2 | 11.9 | 1.3 | 24.4 | 4.0 | 42.8 | 3.3 |
| AD-2222872.1 | 11.9 | 1.2 | 11.6 | 1.9 | 25.6 | 1.5 | 56.2 | 7.6 |
| AD-2135821.1 | 12.1 | 1.9 | 9.1 | 0.6 | 16.6 | 3.7 | 34.2 | 2.9 |
| AD-2222873.1 | 27.8 | 4.5 | 20.3 | 0.5 | 40.0 | 6.7 | 70.1 | 13.5 |
| AD-2135896.1 | 7.9 | 1.1 | 6.7 | 0.5 | 13.2 | 1.6 | \|24.7 | 0.6 |
| AD-2135897.1 | 39.5 | 9.4 | 35.2 | 7.1 | 55.1 | 3.0 | 60.2 | 5.1 |
| AD-2222874.1 | 6.6 | 0.4 | 5.0 | 0.5 | 15.2 | 1.8 | 41.4 | 6.1 |
| AD-2222875.1 | 2.4 | 0.2 | 2.4 | 0.4 | 5.1 | 0.5 | 14.9 | 0.8 |
| AD-2135900.1 | 2.6 | 0.3 | 2.7 | 0.1 | 5.6 | 0.9 | 15.6 | 1.9 |
| AD-2222876.1 | 7.8 | 1.1 | 8.3 | 0.9 | 16.2 | 0.9 | 42.9 | 6.2 |
| AD-2135901.1 | 7.0 | 0.7 | 5.8 | 1.2 | 12.2 | 1.3 | 24.4 | 2.3 |
| AD-2222877.1 | 18.4 | 2.6 | 15.0 | 2.9 | 26.6 | 1.5 | 49.3 | 1.9 |
| AD-2135904.1 | 1.7 | 0.1 | 1.6 | 0.1 | 3.4 | 0.1 | 7.6 | 0.6 |
| AD-2135907.1 | 7.8 | 2.8 | 7.4 | 2.3 | 11.4 | 2.3 | 26.0 | 2.3 |
| AD-2135962.1 | 6.3 | 0.4 | 6.4 | 0.5 | 15.7 | 2.7 | 41.6 | 2.5 |
| AD-2135964.1 | 14.1 | 2.0 | 12.7 | 1.7 | 22.6 | 1.9 | 50.9 | 6.1 |
| AD-2222878.1 | 32.1 | 4.0 | 27.1 | 1.3 | 45.4 | 4.3 | 74.2 | 7.6 |
| AD-2135965.1 | 5.2 | 0.6 | 5.2 | 1.1 | 9.4 | 0.9 | 23.9 | 1.3 |
| AD-2222879.1 | 9.5 | 0.7 | 9.5 | 1.6 | 15.6 | 0.7 | 31.1 | 2.1 |
| AD-2135967.1 | 7.9 | 1.1 | 8.4 | 1.0 | 19.1 | 2.2 | 32.9 | 2.8 |
| AD-2135973.1 | 4.9 | 1.3 | 4.3 | 0.9 | 9.7 | 2.0 | 21.7 | 2.8 |
| AD-2136060.1 | 43.0 | 6.8 | 38.0 | 2.7 | 59.7 | 9.1 | 82.7 | 9.8 |
| AD-2222880.1 | 31.5 | 4.0 | 32.4 | 3.6 | 43.6 | 3.9 | 71.9 | 2.9 |
| AD-2136066.1 | 19.3 | 1.9 | 16.5 | 2.9 | 23.6 | 2.5 | 51.7 | 7.6 |
| AD-2222881.1 | 37.9 | 3.1 | 33.1 | 5.1 | 43.3 | 6.9 | 86.6 | 5.2 |
| AD-2136068.1 | 12.2 | 0.5 | 12.4 | 1.3 | 18.4 | 1.5 | 37.5 | 3.2 |
| AD-2136069.1 | 11.9 | 3.0 | 9.7 | 2.0 | 22.8 | 4.1 | 36.9 | 7.4 |
| AD-2222882.1 | 20.8 | 2.6 | 20.9 | 1.7 | 38.2 | 1.1 | 58.8 | 2.6 |
| AD-2136072.1 | 7.8 | 0.7 | 8.6 | 1.5 | 16.3 | 1.3 | 42.8 | 2.3 |
| AD-2222883.1 | 22.7 | 1.9 | 23.4 | 1.9 | 31.1 | 10.2 | 84.2 | 10.2 |
| AD-2136073.1 | 4.5 | 0.5 | 4.8 | 1.1 | 12.4 | 2.4 | 35.6 | 5.1 |
| AD-2136074.1 | 25.7 | 2.9 | 25.1 | 3.3 | 27.3 | 4.5 | 75.4 | 9.2 |
| AD-2136075.1 | 21.0 | 1.9 | 20.0 | 4.5 | 32.4 | 3.7 | 67.0 | 3.1 |
| AD-2136077.1 | 6.2 | 1.2 | 16.2 | 0.9 | 10.7 | 1.3 | 28.9 | 1.1 |
| AD-2136079.1 | 2.8 | 0.5 | 3.1 | 0.3 | 5.2 | 0.9 | 14.9 | 2.5 |
| AD-2222884.1 | 4.4 | 1.0 | 4.6 | 0.4 | 10.7 | 2.9 | 23.8 | 3.9 |
| AD-2136080.1 | 3.6 | 0.5 | 4.6 | 0.9 | 11.6 | 2.4 | 31.5 | 5.5 |
| AD-2222885.1 | 7.9 | 0.4 | 10.3 | 2.2 | 18.1 | 4.3 | 48.0 | 9.8 |
| AD-2136083.1 | 5.9 | 1.2 | 7.3 | 0.6 | 17.0 | 3.6 | 47.8 | 12.8 |
| AD-2136164.1 | 21.9 | 4.1 | 21.2 | 1.7 | 40.4 | 3.2 | 75.1 | 5.4 |
| AD-2136166.1 | 9.3 | 1.8 | 8.2 | 1.7 | 16.8 | 2.7 | 43.3 | 6.1 |
| AD-2222886.1 | 8.7 | 1.2 | 9.1 | 1.9 | 18.7 | 1.6 | 46.1 | 10.3 |
| AD-2136168.1 | 5.3 | 1.4 | 7.6 | 1.4 | 16.7 | 0.9 | 29.6 | 6.0 |
| AD-2222887.1 | 24.9 | 3.0 | 26.5 | 2.1 | 38.3 | 3.7 | 64.8 | 8.7 |
| AD-2136171.1 | 4.8 | 0.9 | 8.9 | 1.2 | 14.0 | 2.0 | 28.6 | 4.4 |
| AD-2136172.1 | 10.3 | 1.4 | 16.1 | 2.3 | 20.9 | 1.7 | 44.3 | 9.5 |
| AD-2136179.1 | 11.9 | 0.6 | 14.3 | 0.5 | 20.6 | 4.5 | 44.8 | 4.3 |
| AD-2222888.1 | 11.8 | 0.6 | 16.3 | 1.4 | 26.3 | 3.6 | 43.9 | 10.5 |
| AD-2136183.1 | 20.2 | 8.9 | 15.6 | 2.9 | 28.0 | 5.6 | 40.9 | 3.1 |
| AD-2136263.1 | 23.7 | 5.7 | 27.8 | 3.4 | 39.3 | 16.7 | 68.9 | 1.2 |
| AD-2136347.1 | 4.6 | 0.5 | 5.9 | 1.3 | 14.1 | 2.0 | 28.9 | 4.0 |
| AD-2222889.1 | 4.2 | 0.8 | 6.3 | 1.0 | 3.6 | 2.9 | 24.3 | 4.0 |
| AD-2136348.1 | 6.1 | 0.4 | 8.4 | 2.0 | 15.8 | 1.4 | 26.5 | 4.0 |
| AD-2222890.1 | 14.9 | 0.8 | 21.4 | 4.3 | 25.9 | 4.3 | 39.2 | 8.2 |
| AD-2136349.1 | 26.3 | 2.7 | 31.1 | 1.3 | 49.0 | 3.9 | 54.1 | 11.2 |
| AD-2222891.1 | 22.4 | 3.6 | 35.6 | 3.8 | 57.6 | 11.2 | 80.3 | 15.8 |
| AD-2136355.1 | 7.3 | 2.8 | 8.9 | 0.3 | 16.7 | 2.1 | 28.8 | 9.9 |
| AD-2136421.1 | 2.6 | 0.5 | 3.9 | 0.6 | 6.1 | 1.9 | 24.8 | 1.6 |
| AD-2222892.1 | 6.4 | 0.9 | 9.2 | 0.7 | 19.3 | 1.3 | 40.2 | 5.3 |
| AD-2136431.1 | 4.3 | 0.4 | 5.7 | 0.4 | 12.4 | 0.8 | 27.0 | 3.0 |
| AD-2222893.1 | 4.4 | 0.7 | 6.0 | 0.8 | 10.9 | 1.0 | 28.8 | 1.7 |
| AD-2136433.1 | 22.1 | 1.3 | 27.8 | 1.3 | 43.7 | 5.1 | 70.8 | 10.6 |
| AD-2136434.1 | 6.0 | 0.2 | 7.6 | 0.9 | 13.5 | 1.3 | 29.8 | 3.3 |
| AD-2222894.1 | 17.6 | 1.8 | 17.5 | 1.8 | 31.1 | 4.1 | 50.1 | 5.8 |
| AD-2136437.1 | 3.5 | 0.6 | 4.4 | 0.5 | 6.0 | 1.2 | 19.8 | 0.5 |
| AD-2222895.1 | 2.7 | 0.2 | 3.2 | 0.5 | 5.7 | 0.8 | 17.5 | 1.1 |
| AD-2136438.1 | 8.3 | 1.0 | 10.0 | 1.5 | 17.4 | 2.2 | 38.9 | 3.0 |
| AD-2222896.1 | 24.9 | 5.0 | 26.2 | 6.7 | 36.1 | 8.2 | 68.3 | 4.8 |
| AD-2136439.1 | 8.2 | 3.2 | 7.6 | 0.7 | 15.6 | 1.8 | 32.3 | 3.7 |
| AD-2222897.1 | 21.5 | 2.5 | 23.9 | 3.7 | 37.1 | 3.4 | 71.2 | 5.2 |
| AD-2136440.1 | 3.9 | 0.1 | 4.1 | 0.5 | 8.0 | 0.8 | 18.6 | 1.8 |
| AD-2222898.1 | 4.5 | 0.2 | 6.6 | 0.3 | 11.7 | 1.7 | 24.1 | 3.0 |
| AD-2136442.1 | 3.6 | 2.2 | 3.1 | 0.2 | 6.5 | 1.3 | 16.3 | 1.9 |
| AD-2136443.1 | 5.7 | 0.3 | 6.5 | 1.1 | 13.9 | 1.4 | 29.3 | 1.4 |
| AD-2222899.1 | 23.6 | 5.9 | 24.4 | 3.9 | 30.1 | 10.2 | 62.2 | 6.6 |
| AD-2136465.1 | 7.4 | 1.3 | 8.9 | 1.5 | 17.2 | 2.0 | 41.2 | 4.6 |
| AD-2222900.1 | 5.4 | 0.3 | 6.6 | 0.5 | 14.5 | 3.2 | 32.8 | 2.6 |
| AD-2136470.1 | 3.8 | 0.4 | 4.8 | 0.6 | 12.2 | 1.6 | 28.1 | 1.5 |
| AD-2136571.1 | 5.0 | 0.4 | 6.7 | 0.7 | 14.5 | 0.9 | 28.0 | 2.9 |
| AD-2222901.1 | 10.9 | 0.7 | 13.9 | 0.9 | 26.6 | 1.2 | 42.7 | 4.4 |
| AD-2136606.1 | 22.8 | 6.2 | 24.4 | 1.4 | 37.2 | 3.7 | 51.9 | 6.4 |
| AD-2222902.1 | 31.3 | 3.8 | 53.2 | 9.6 | 63.8 | 12.3 | 72.0 | 5.1 |
| AD-2136716.1 | 14.4 | 0.9 | 16.6 | 2.4 | 27.2 | 2.5 | 48.8 | 3.4 |
| AD-2222903.1 | 55.9 | 5.8 | 71.4 | 7.4 | 75.9 | 2.9 | 80.0 | 3.2 |
| AD-2136717.1 | 4.3 | 0.5 | 4.5 | 0.4 | 10.0 | 1.2 | 21.3 | 1.4 |
| AD-2136718.3 | 3.3 | 0.3 | 4.6 | 0.6 | 8.3 | 0.3 | 19.5 | 3.3 |
| AD-2136721.1 | 2.9 | 0.3 | 3.7 | 0.5 | 7.2 | 0.4 | 17.0 | 1.3 |
| AD-2136726.1 | 8.7 | 0.5 | 19.6 | 1.7 | 16.9 | 1.9 | 39.1 | 2.0 |
| AD-2222905.1 | 31.0 | 2.3 | 34.3 | 5.3 | 54.9 | 4.4 | 78.7 | 19.4 |
| AD-2136729.1 | 13.3 | 0.9 | 15.6 | 2.2 | 23.7 | 2.5 | 53.5 | 4.2 |
| AD-2222906.1 | 34.1 | 6.0 | 38.2 | 6.6 | 60.2 | 3.4 | 94.5 | 9.2 |
| AD-2136753.1 | 19.2 | 2.2 | 26.7 | 5.0 | 38.6 | 5.4 | 61.8 | 4.7 |
| AD-2136754.1 | 7.1 | 0.6 | 8.7 | 1.7 | 16.6 | 1.6 | 35.5 | 2.5 |
| AD-2136755.1 | 3.4 | 0.5 | 4.2 | 0.5 | 7.7 | 0.8 | 20.6 | 1.8 |
| AD-2136756.1 | 13.4 | 2.4 | 15.7 | 1.7 | 34.6 | 4.0 | 64.3 | 5.2 |
| AD-2222907.1 | 26.6 | 7.3 | 46.0 | 4.0 | 54.9 | 9.2 | 61.1 | 12.4 |
| AD-2136757.1 | 14.8 | 0.5 | 6.1 | 0.9 | 15.7 | 1.9 | 34.5 | 2.9 |
| AD-2222908.1 | 6.9 | 0.6 | 8.7 | 2.0 | 21.3 | 0.6 | 49.7 | 2.2 |
| AD-2136758.1 | 23.0 | 2.8 | 29.3 | 1.8 | 45.3 | 3.3 | 65.7 | 10.1 |
| AD-2222909.1 | 15.9 | 1.5 | 18.9 | 1.7 | 32.6 | 3.8 | 56.9 | 7.7 |
| AD-2136760.1 | 5.3 | 2.4 | 6.3 | 1.0 | 12.9 | 0.7 | 29.8 | 1.7 |
| AD-2222910.1 | 3.4 | 0.2 | 4.8 | 0.7 | 11.7 | 1.2 | 28.2 | 2.3 |
| AD-2136761.1 | 3.3 | 1.8 | 6.5 | 1.2 | 12.1 | 1.5 | 27.4 | 4.5 |
| AD-2136762.1 | 6.3 | 0.3 | 7.6 | 1.2 | 15.8 | 2.4 | 37.1 | 11.8 |
| AD-2222911.1 | 5.9 | 0.5 | 8.1 | \|0.7 | 14.7 | 1.9 | 41.9 | 7.9 |
| AD-2136763.1 | 3.4 | 0.1 | 3.5 | 0.5 | 8.6 | 1.1 | 19.4 | 2.2 |
| AD-2136764.1 | 5.7 | 0.4 | 7.1 | 1.4 | 16.0 | 1.4 | 31.9 | 4.4 |
| AD-2136787.1 | 3.1 | 0.3 | 4.0 | 0.8 | 18.9 | 0.6 | 20.7 | 3.2 |
| AD-2222912.1 | 12.8 | 2.1 | 16.9 | 1.8 | 33.5 | 4.9 | 56.4 | 10.0 |
| AD-2136790.1 | 4.5 | 1.0 | 6.9 | 0.6 | 12.7 | 2.7 | 32.2 | 3.7 |
| AD-2136791.1 | 14.1 | 1.5 | 16.9 | 2.7 | 33.3 | 2.7 | 62.4 | 5.2 |
| AD-2222913.1 | 25.4 | 8.7 | 27.9 | 2.8 | 47.0 | 5.6 | 66.5 | 8.6 |
| AD-2136792.1 | 3.6 | 1.6 | 3.6 | 0.7 | 8.3 | 1.0 | 20.2 | 10.2 |
| AD-2222914.1 | 6.0 | 0.2 | 8.0 | 1.0 | 18.4 | 0.8 | 35.9 | 1.7 |
| AD-2136793.1 | 3.8 | 0.4 | 5.7 | 0.2 | 13.9 | 1.4 | 33.5 | 4.4 |
| AD-2222915.1 | 18.6 | 10.9 | 23.1 | 0.8 | 43.5 | 2.6 | 61.3 | 2.2 |
| AD-2136794.1 | 9.4 | 1.6 | 10.6 | 1.0 | 21.7 | 4.4 | 56.1 | 7.9 |
| AD-2222916.1 | 17.9 | 2.4 | 22.9 | 5.1 | 32.7 | 5.1 | 68.0 | 20.7 |
| AD-2136797.1 | 11.6 | 1.9 | 13.9 | 2.1 | 29.2 | 0.9 | 64.2 | 3.4 |
| AD-2222917.1 | 18.2 | 0.8 | 10.5 | 0.2 | 22.8 | 2.4 | 52.9 | 5.3 |
| AD-2136851.1 | 3.4 | 1.5 | 4.7 | 0.5 | 10.5 | 0.8 | 27.2 | 4.2 |
| AD-2136852.1 | 3.8 | 0.9 | 5.6 | 0.9 | 14.1 | 0.8 | 36.0 | 5.3 |
| AD-2136853.1 | 1.5 | 0.0 | 1.7 | 0.2 | 5.3 | 0.2 | 14.2 | 0.8 |
| AD-2136854.1 | 8.6 | 1.5 | 11.1 | 1.6 | 22.1 | 1.9 | 50.9 | 10.4 |
| AD-2136855.1 | 3.1 | 1.4 | 4.6 | 1.3 | 19.2 | 5.5 | 40.3 | 5.0 |
| AD-2222918.1 | 13.5 | 6.1 | 22.1 | 2.7 | 33.2 | 4.4 | 64.7 | 5.4 |
| AD-2136857.1 | 5.7 | 1.8 | 7.2 | 1.3 | 16.6 | 0.6 | 44.0 | 2.6 |
| AD-2222919.1 | 19.5 | 4.0 | 26.4 | 4.4 | 43.4 | 3.7 | 95.9 | 13.4 |
| AD-2136859.1 | 6.3 | 0.9 | 19.6 | 2.0 | 15.9 | 3.6 | 34.1 | 1.8 |
| AD-2222920.1 | 18.6 | 6.0 | 22.9 | 3.6 | 36.2 | 16.7 | 75.8 | 14.1 |
| AD-2136861.1 | 4.7 | 1.0 | 7.0 | 0.9 | 15.0 | 1.7 | 32.2 | 4.4 |
| AD-2136862.1 | 14.3 | 1.0 | 16.0 | 1.5 | 13.4 | 3.7 | 28.3 | 4.6 |
| AD-2136864.1 | 5.7 | 1.1 | 3.5 | 1.0 | 16.6 | 1.5 | 22.6 | 2.3 |
| AD-2136865.1 | 6.4 | 0.2 | 6.8 | \|0.5 | 20.1 | 2.7 | 25.5 | 10.7 |
| AD-2222921.1 | 3.7 | 0.2 | 4.3 | 0.3 | 13.4 | 1.7 | 21.3 | 4.3 |
| AD-2136866.1 | 11.2 | 3.1 | 11.0 | 1.2 | 31.3 | 2.1 | 40.9 | 6.8 |
| AD-2136867.1 | 10.1 | 1.4 | 10.4 | 0.5 | 28.1 | 2.5 | 33.4 | 3.9 |
| AD-2136868.1 | 2.2 | 0.2 | 2.5 | 0.4 | 8.7 | 1.9 | 15.5 | 0.9 |
| AD-2222922.1 | 5.4 | 0.4 | 7.3 | 0.8 | 22.7 | 1.4 | 25.2 | 2.4 |
| AD-2136869.1 | 5.3 | 0.3 | 6.2 | 0.9 | 17.9 | 1.3 | 23.2 | 0.9 |
| AD-2222923.1 | 24.2 | 2.9 | 26.4 | 3.4 | 46.3 | 3.6 | 35.0 | 6.5 |
| AD-2136870.1 | 15.2 | 1.1 | 14.9 | 2.1 | 30.8 | 1.2 | 39.4 | 5.1 |
| AD-2222924.1 | 46.7 | 14.0 | 45.6 | 1.8 | 66.6 | 3.9 | 58.4 | 5.5 |
| AD-2136871.1 | 3.0 | 0.5 | 2.9 | 0.7 | 10.7 | 2.1 | 16.9 | 1.3 |
| AD-2136873.1 | 6.3 | 0.7 | 5.5 | 0.1 | 14.2 | 1.4 | 23.6 | 2.0 |
| AD-2136874.1 | 8.4 | 1.2 | 7.8 | 1.3 | 21.8 | 2.8 | 25.0 | 2.4 |
| AD-2222925.1 | 31.3 | 6.3 | 29.3 | 2.6 | 56.8 | 7.0 | 52.1 | 5.9 |
| AD-2136875.1 | 5.2 | 0.6 | 5.2 | 10.7 | 14.6 | 1.8 | 22.1 | 1.5 |
| AD-2222926.1 | 4.9 | 0.4 | 7.3 | 1.4 | 15.9 | 1.3 | 19.7 | 4.3 |
| AD-2136876.1 | 5.5 | 0.8 | 5.0 | 0.9 | 14.1 | 1.3 | 20.7 | 1.6 |
| AD-2222927.1 | 13.1 | 1.9 | 14.8 | 0.8 | 34.3 | 3.7 | 37.2 | 3.7 |
| AD-2136877.1 | 3.4 | 0.7 | 3.7 | 0.3 | 9.9 | 0.9 | 16.0 | 3.4 |
| AD-2136878.1 | 5.7 | 0.3 | 5.2 | 0.9 | 15.3 | 0.8 | 22.9 | 2.3 |
| AD-2136879.1 | 2.4 | 0.4 | 2.6 | 0.4 | 9.5 | 0.8 | 12.7 | 2.1 |
| AD-2222928.1 | 4.6 | 1.2 | 4.0 | 0.5 | 13.3 | 1.1 | 21.3 | 1.6 |
| AD-2136880.1 | 8.5 | 1.0 | 9.1 | 0.9 | 22.0 | 0.9 | 32.4 | 2.3 |
| AD-2222929.1 | 6.8 | 1.4 | 7.8 | 1.7 | 26.4 | 3.7 | 32.1 | 3.3 |
| AD-2136882.1 | 17.6 | 1.7 | 19.0 | 1.6 | 45.0 | 5.2 | 46.7 | 4.5 |
| AD-2136883.1 | 2.7 | 0.6 | 3.3 | 0.8 | 8.9 | 0.6 | 16.2 | 2.1 |
| AD-2222930.1 | 5.0 | 0.5 | 5.8 | 0.4 | 16.7 | 0.8 | 26.8 | 4.0 |
| AD-2136992.1 | 14.5 | 0.3 | 4.0 | 1.1 | 18.9 | 1.1 | 16.8 | 1.2 |
| AD-2136993.1 | 3.3 | 0.6 | 2.9 | 0.7 | 11.7 | 0.5 | 15.8 | 1.5 |
| AD-2136994.1 | 17.0 | 1.2 | 17.8 | 1.1 | 34.8 | 1.9 | 43.1 | 4.3 |
| AD-2222931.1 | 40.4 | 2.2 | 47.1 | 7.8 | 75.0 | 5.2 | 65.6 | 7.7 |
| AD-2136995.1 | 8.2 | 0.5 | 8.2 | 1.4 | 22.5 | 1.6 | 27.4 | 1.7 |
| AD-2222932.1 | 40.9 | 3.0 | 40.1 | 4.9 | 75.6 | 3.5 | 72.7 | 9.2 |
| AD-2136996.1 | 2.7 | 0.5 | 2.7 | 10.2 | 10.5 | 0.4 | 13.9 | 0.7 |
| AD-2136997.1 | 3.2 | 0.2 | 3.0 | 0.8 | 7.8 | 1.1 | 12.9 | 1.3 |
| AD-2136998.1 | 4.2 | 0.1 | 4.8 | 1.3 | 13.1 | 1.6 | 15.7 | 1.7 |
| AD-2136999.1 | 2.8 | 0.7 | 14.0 | 0.9 | 6.5 | 0.3 | 10.1 | 0.7 |
| AD-2137000.1 | 10.1 | 1.1 | 12.2 | 1.4 | 30.2 | 4.7 | 31.1 | 2.0 |
| AD-2137001.1 | 9.2 | 1.0 | 10.0 | 1.5 | 24.9 | 2.2 | 32.1 | 3.0 |
| AD-2137002.1 | 5.5 | 0.4 | 5.3 | 0.7 | 13.5 | 1.2 | 18.5 | 2.5 |
| AD-2222933.1 | 31.9 | 2.9 | 26.5 | 4.8 | 50.2 | 4.1 | 59.0 | 4.8 |
| AD-2137016.3 | 6.5 | 0.5 | 7.9 | 0.7 | 23.2 | 10.3 | 31.7 | 0.8 |
| AD-2137017.3 | 3.7 | 1.7 | 2.8 | 0.8 | 5.7 | 1.2 | 10.8 | 0.6 |
| AD-2137018.5 | 1.7 | 0.5 | 1.2 | 0.2 | 4.4 | 0.5 | 7.3 | 0.9 |
| AD-2222934.1 | 4.9 | 0.7 | 5.7 | 0.7 | 16.2 | 0.9 | 22.6 | 1.8 |
| AD-2137019.1 | 6.2 | 0.6 | 19.9 | 3.0 | 22.7 | 1.2 | 36.1 | 3.1 |
| AD-2137020.1 | 10.8 | 1.4 | 12.0 | 0.2 | 30.4 | 1.7 | 49.9 | 2.6 |
| AD-2137021.1 | \|3.1 | 0.6 | 3.0 | 0.9 | 11.9 | 1.1 | 22.3 | 1.8 |
| AD-2137022.1 | 7.5 | 0.8 | 7.7 | 1.0 | 25.2 | 4.8 | 43.1 | 5.4 |
| AD-2137023.1 | 24.7 | 1.2 | 27.2 | 4.0 | 57.2 | 4.8 | 66.0 | 7.4 |
| AD-2137024.1 | 3.4 | 1.7 | 3.1 | 0.7 | 7.4 | 0.5 | 15.6 | 2.0 |
| AD-2137025.1 | 2.0 | 10.7 | 3.4 | 1.3 | 5.4 | 1.3 | 8.4 | 1.6 |
| AD-2137026.1 | 18.8 | 1.1 | 28.0 | 4.4 | 66.4 | 5.4 | 66.0 | 12.9 |
| AD-2137027.1 | 4.3 | 0.7 | 6.5 | 0.7 | 20.1 | 1.2 | 37.1 | 5.5 |
| AD-2137055.1 | 7.9 | 1.1 | 9.7 | 1.3 | 20.7 | 1.5 | 40.4 | 2.2 |
| AD-2222935.1 | 23.2 | 1.6 | 27.6 | 2.2 | 57.4 | 6.5 | 91.7 | 12.0 |
| AD-2137056.1 | 4.6 | 0.4 | 5.5 | 0.3 | 18.2 | 2.1 | 24.1 | 3.2 |
| AD-2222936.1 | 8.0 | 0.5 | 10.3 | 1.8 | 22.5 | 2.8 | 37.0 | 2.4 |
| AD-2137057.1 | 10.2 | 1.6 | 11.6 | 4.0 | 19.7 | 3.5 | 29.7 | 1.0 |
| AD-2222937.1 | 18.5 | 1.7 | 22.4 | 2.6 | 43.5 | 1.5 | 51.6 | 3.7 |
| AD-2137059.1 | 2.2 | 0.3 | 4.0 | \|0.9 | 7.4 | 0.6 | 14.7 | 1.2 |
| AD-2137061.1 | 5.9 | 1.2 | 6.0 | 1.1 | 12.8 | 2.0 | 26.5 | 2.5 |
| AD-2222939.1 | 2.5 | 0.2 | 2.2 | 0.3 | 6.5 | 1.4 | 13.2 | 1.3 |
| AD-2222940.1 | 4.8 | 10.2 | 5.3 | 0.9 | 15.7 | 1.3 | 22.4 | 1.3 |
| AD-2137062.1 | 16.8 | 2.2 | 17.0 | 1.0 | 40.0 | 2.7 | 40.2 | 2.8 |
| AD-2137063.1 | 3.7 | 0.7 | 4.6 | 1.1 | 11.4 | 1.6 | 17.1 | 1.9 |
| AD-2137101.1 | 41.6 | 6.8 | 45.6 | 3.5 | 63.7 | 8.9 | 95.7 | 15.1 |
| AD-2137128.1 | 5.0 | 0.7 | 6.6 | 0.3 | 19.1 | 1.6 | 37.6 | 5.1 |
| AD-2137130.1 | 2.5 | 0.5 | 3.2 | 0.4 | 9.0 | 0.6 | 18.5 | 1.8 |
| AD-2137138.1 | 5.0 | 1.6 | 5.7 | 0.3 | 15.2 | 2.0 | 25.1 | 0.8 |
| AD-2137196.1 | 2.0 | 0.2 | 3.4 | 0.8 | 7.2 | 2.8 | 13.5 | 2.4 |
| AD-2222942.1 | 47.0 | 2.7 | 51.4 | 5.2 | 77.6 | 4.3 | 56.0 | 4.9 |
| AD-2137197.1 | 5.6 | 0.5 | 5.9 | 0.5 | 21.7 | 2.5 | 35.2 | 4.4 |
| AD-2222943.1 | 67.5 | 6.4 | 73.8 | 13.8 | 100.4 | 10.8 | 83.2 | 15.6 |
| AD-2137198.1 | 4.4 | 0.7 | 6.5 | 1.3 | 15.5 | 1.5 | 29.1 | 2.4 |
| AD-2222944.1 | 5.2 | 0.4 | 7.3 | 1.4 | 20.6 | 2.4 | 34.9 | 4.6 |
| AD-2137199.1 | 2.0 | 0.4 | 2.1 | 0.5 | 5.9 | 1.5 | 11.6 | 1.4 |
| AD-2222945.1 | 2.5 | 0.4 | 3.0 | 0.3 | 10.0 | 1.7 | 20.7 | 1.4 |
| AD-2137200.1 | 1.9 | 0.3 | 2.6 | 0.5 | 7.0 | 1.3 | 13.2 | 1.9 |
| AD-2222946.1 | 2.4 | 0.1 | 3.1 | 0.5 | 9.5 | 1.4 | 20.7 | 2.5 |
| AD-2137204.1 | 1.1 | 0.5 | 1.6 | 0.3 | 4.0 | 1.5 | 9.7 | 0.9 |
| AD-2137223.1 | 1.7 | 0.1 | 2.0 | 0.3 | 4.9 | 0.4 | 9.1 | 1.6 |
| AD-2137224.1 | 9.1 | 1.7 | 8.4 | 2.6 | 13.9 | 1.6 | 30.6 | 1.1 |
| AD-2222947.1 | 4.3 | 1.1 | 6.5 | 0.4 | 13.2 | 0.3 | 27.5 | 6.2 |
| AD-2137225.1 | 2.3 | 0.5 | 1.8 | 0.4 | 3.8 | 0.3 | 8.6 | 0.6 |
| AD-2222949.1 | 4.2 | 0.5 | 5.2 | 1.4 | 13.7 | 2.0 | 28.9 | 5.7 |

TABLE 11
Initial in vitro screening assay in PHH cells

| | 10 nM Dose | | 1 nM Dose | | 0.1 nM Dose | | | 10 nM Dose | | 1 nM Dose | | 0.1 nM Dose | |
|---|---|---|---|---|---|---|---|---|---|---|---|---|---|
| | Avg % | | Avg % | | Avg % | | | Avg % | | Avg % | | Avg % | |
| | mRNA | | mRNA | | mRNA | | | mRNA | | mRNA | | mRNA | |
| Duplex | Remaining | SD | Remaining | SD | Remaining | SD | Duplex | Remaining | SD | Remaining | SD | Remaining | SD |
| AD-2138754.1 | 6 | 1 | 7 | 1 | 12 | 2 | AD-2138688.1 | 20 | 2 | 25 | 1 | 40 | 3 |
| AD-2138631.1 | 5 | 0 | 7 | 1 | 12 | 2 | AD-2138805.2 | 18 | 1 | 25 | 4 | 40 | 7 |
| AD-2138874.2 | 7 | 1 | 8 | 1 | 16 | 2 | AD-2138525.1 | 15 | 1 | 25 | 1 | 40 | 7 |
| AD-2138256.1 | 8 | 2 | 8 | 3 | 13 | 4 | AD-2138083.1 | 15 | 2 | 25 | 1 | 41 | 2 |
| AD-2138876.2 | 6 | 1 | 8 | 1 | 14 | 1 | AD-2138074.1 | 19 | 1 | 25 | 2 | 43 | 6 |
| AD-2138644.1 | 9 | 2 | 9 | 2 | 16 | 3 | AD-2138360.1 | 18 | 1 | 25 | 3 | 48 | 11 |
| AD-2138630.1 | 6 | 1 | 9 | 1 | 16 | 2 | AD-2138121.1 | 16 | 1 | 25 | 2 | 39 | 1 |
| AD-2138752.1 | 7 | 0 | 9 | 1 | 17 | 4 | AD-2138364.1 | 23 | 4 | 25 | 3 | 32 | 2 |
| AD-2138695.1 | 6 | 1 | 9 | 0 | 17 | 3 | AD-2138728.1 | 19 | 1 | 25 | 2 | 38 | 9 |
| AD-2138753.1 | 7 | 2 | 9 | 2 | 17 | 3 | AD-2138235.1 | 21 | 5 | 25 | 1 | 39 | 2 |
| AD-2138757.1 | 6 | 0 | 9 | 3 | 17 | 3 | AD-2138782.1 | 21 | 2 | 25 | 3 | 51 | 3 |
| AD-2138660.1 | 7 | 1 | 9 | 2 | 16 | 3 | AD-2138195.1 | 21 | 3 | 25 | 1 | 43 | 3 |
| AD-2138755.1 | 8 | 2 | 9 | 1 | 17 | 1 | AD-2138230.1 | 19 | 1 | 25 | 2 | 50 | 6 |
| AD-2138721.1 | 8 | 1 | 10 | 1 | 18 | 3 | AD-2138368.1 | 19 | 2 | 25 | 4 | 51 | 2 |
| AD-2138736.1 | 6 | 1 | 10 | 3 | 14 | 1 | AD-2138109.1 | 18 | 4 | 25 | 3 | 39 | 4 |
| AD-2138536.1 | 7 | 1 | 10 | 1 | 22 | 5 | AD-2138222.1 | 18 | 2 | 25 | 2 | 50 | 4 |
| AD-2138629.1 | 9 | 1 | 10 | 1 | 14 | 1 | AD-2138167.1 | 19 | 3 | 25 | 3 | 72 | 7 |
| AD-2138873.2 | 9 | 1 | 10 | 2 | 21 | 1 | AD-2138082.1 | 14 | 1 | 26 | 2 | 36 | 2 |
| AD-2138739.1 | 8 | 1 | 10 | 1 | 13 | 2 | AD-2138224.1 | 18 | 2 | 26 | 2 | 40 | 7 |
| AD-2138537.1 | 7 | 0 | 10 | 0 | 21 | 1 | AD-2138066.1 | 22 | 2 | 26 | 3 | 41 | 6 |
| AD-2138893.2 | 8 | 0 | 10 | 1 | 23 | 2 | AD-2138101.1 | 15 | 1 | 26 | 2 | 45 | 2 |
| AD-2138693.1 | 7 | 1 | 10 | 0 | 15 | 3 | AD-2138310.1 | 18 | 4 | 26 | 1 | 47 | 7 |
| AD-2138692.1 | 8 | 1 | 10 | 1 | 17 | 3 | AD-2138177.1 | 21 | 2 | 26 | 1 | 37 | 1 |
| AD-2138694.1 | 8 | 0 | 11 | 1 | 22 | 3 | AD-2138050.1 | 16 | 2 | 26 | 2 | 37 | 5 |
| AD-2138461.1 | 10 | 1 | 11 | 3 | 22 | 2 | AD-2138356.1 | 18 | 3 | 26 | 5 | 45 | 8 |
| AD-2138661.1 | 16 | 7 | 11 | 2 | 22 | 6 | AD-2138097.1 | 16 | 2 | 26 | 1 | 40 | 7 |
| AD-2138539.1 | 8 | 1 | 11 | 2 | 23 | 7 | AD-2138292.1 | 25 | 3 | 26 | 1 | 44 | 1 |
| AD-2138709.1 | 11 | 1 | 11 | 2 | 22 | 4 | AD-2138277.1 | 22 | 3 | 26 | 1 | 35 | 3 |
| AD-2138738.1 | 10 | 1 | 11 | 2 | 23 | 3 | AD-2138188.1 | 16 | 1 | 26 | 2 | 38 | 8 |
| AD-2138241.1 | 13 | 1 | 11 | 3 | 28 | 1 | AD-2138120.1 | 19 | 1 | 26 | 4 | 38 | 3 |
| AD-2138707.1 | 8 | 1 | 11 | 1 | 18 | 3 | AD-2138209.1 | 18 | 2 | 26 | 3 | 42 | 2 |
| AD-2138662.1 | 8 | 1 | 11 | 2 | 28 | 6 | AD-2138200.1 | 19 | 1 | 26 | 2 | 48 | 4 |
| AD-2138646.1 | 8 | 0 | 11 | 2 | 18 | 2 | AD-2138598.1 | 19 | 3 | 26 | 4 | 34 | 4 |
| AD-2138735.1 | 8 | 1 | 11 | 2 | 21 | 1 | AD-2138450.1 | 18 | 1 | 26 | 5 | 43 | 5 |
| AD-2138737.1 | 15 | 2 | 11 | 1 | 26 | 6 | AD-2138417.1 | 22 | 3 | 26 | 2 | 38 | 9 |
| AD-2138761.1 | 9 | 1 | 12 | 2 | 19 | 3 | AD-2138670.1 | 20 | 1 | 26 | 1 | 42 | 4 |
| AD-2138763.1 | 11 | 1 | 12 | 1 | 21 | 2 | AD-2138572.1 | 16 | 3 | 26 | 3 | 56 | 9 |
| AD-2138706.1 | 9 | 1 | 12 | 2 | 24 | 8 | AD-2138596.1 | 22 | 1 | 26 | 2 | 42 | 6 |
| AD-2138697.1 | 8 | 2 | 12 | 2 | 26 | 4 | AD-2138325.1 | 16 | 1 | 26 | 3 | 46 | 4 |
| AD-2138760.1 | 10 | 1 | 12 | 3 | 21 | 3 | AD-2138333.1 | 17 | 2 | 26 | 2 | 31 | 2 |
| AD-2138740.1 | 10 | 1 | 12 | 2 | 26 | 9 | AD-2138131.1 | 23 | 4 | 26 | 2 | 36 | 3 |
| AD-2138758.1 | 10 | 1 | 12 | 1 | 26 | 5 | AD-2138281.1 | 21 | 4 | 26 | 1 | 38 | 4 |
| AD-2138875.2 | 8 | 1 | 12 | 0 | 19 | 2 | AD-2138052.1 | 20 | 1 | 26 | 4 | 47 | 7 |
| AD-2138708.1 | 11 | 2 | 12 | 1 | 30 | 3 | AD-2138590.1 | 17 | 2 | 26 | 7 | 47 | 3 |
| AD-2138538.1 | 10 | 2 | 12 | 1 | 29 | 5 | AD-2138449.1 | 20 | 2 | 26 | 4 | 58 | 1 |
| AD-2138872.2 | 11 | 1 | 13 | 0 | 21 | 2 | AD-2138189.1 | 21 | 5 | 27 | 2 | 44 | 8 |
| AD-2138541.1 | 8 | 1 | 13 | 2 | 25 | 5 | AD-2138138.1 | 20 | 2 | 27 | 2 | 45 | 3 |
| AD-2138703.1 | 9 | 1 | 13 | 1 | 22 | 4 | AD-2138065.1 | 17 | 1 | 27 | 1 | 33 | 6 |
| AD-2138720.1 | 11 | 1 | 13 | 4 | 26 | 5 | AD-2138455.1 | 22 | 1 | 27 | 5 | 50 | 5 |
| AD-2138871.2 | 9 | 1 | 13 | 1 | 22 | 3 | AD-2138731.1 | 26 | 2 | 27 | 4 | 41 | 1 |
| AD-2138791.2 | 9 | 2 | 13 | 1 | 25 | 2 | AD-2138094.1 | 17 | 1 | 27 | 1 | 43 | 3 |
| AD-2138511.1 | 11 | 1 | 13 | 1 | 23 | 6 | AD-2138326.1 | 18 | 2 | 27 | 3 | 46 | 5 |
| AD-2138504.1 | 9 | 1 | 13 | 1 | 21 | 5 | AD-2138345.1 | 18 | 3 | 27 | 2 | 48 | 4 |
| AD-2138503.1 | 11 | 1 | 14 | 3 | 24 | 4 | AD-2138286.1 | 17 | 2 | 27 | 1 | 46 | 3 |
| AD-2138445.1 | 8 | 0 | 14 | 1 | 21 | 5 | AD-2138436.1 | 15 | 1 | 27 | 4 | 39 | 7 |
| AD-2138691.1 | 11 | 0 | 14 | 2 | 23 | 1 | AD-2138311.1 | 20 | 3 | 27 | 4 | 41 | 6 |
| AD-2138653.1 | 12 | 1 | 14 | 2 | 24 | 6 | AD-2138081.1 | 19 | 2 | 27 | 2 | 41 | 4 |
| AD-2138659.1 | 15 | 1 | 14 | 1 | 24 | 2 | AD-2138264.1 | 15 | 2 | 27 | 1 | 46 | 3 |
| AD-2138533.1 | 10 | 2 | 14 | 2 | 24 | 4 | AD-2138064.1 | 17 | 3 | 27 | 3 | 46 | 6 |
| AD-2138741.1 | 8 | 1 | 14 | 2 | 16 | 3 | AD-2138078.1 | 16 | 0 | 27 | 6 | 37 | 3 |
| AD-2138756.1 | 9 | 2 | 14 | 1 | 29 | 2 | AD-2138140.1 | 21 | 1 | 27 | 1 | 41 | 1 |
| AD-2138645.1 | 11 | 0 | 14 | 1 | 19 | 3 | AD-2138122.1 | 16 | 1 | 27 | 3 | 38 | 2 |
| AD-2138892.2 | 11 | 1 | 14 | 1 | 29 | 3 | AD-2138152.1 | 14 | 1 | 27 | 4 | 38 | 2 |
| AD-2138699.1 | 11 | 2 | 14 | 1 | 26 | 6 | AD-2138308.1 | 23 | 3 | 27 | 3 | 45 | 3 |
| AD-2138505.1 | 11 | 1 | 14 | 1 | 26 | 3 | AD-2138146.1 | 21 | 2 | 27 | 3 | 60 | 7 |
| AD-2138652.1 | 10 | 1 | 14 | 2 | 19 | 4 | AD-2138096.1 | 15 | 2 | 28 | 3 | 38 | 4 |
| AD-2138350.1 | 11 | 3 | 14 | 3 | 25 | 2 | AD-2138595.1 | 22 | 3 | 28 | 2 | 41 | 4 |
| AD-2138759.1 | 12 | 1 | 14 | 1 | 27 | 3 | AD-2138452.1 | 19 | 2 | 28 | 3 | 46 | 3 |
| AD-2138869.2 | 11 | 1 | 14 | 2 | 26 | 1 | AD-2138100.1 | 19 | 2 | 28 | 4 | 44 | 5 |
| AD-2138787.2 | 13 | 1 | 15 | 2 | 26 | 2 | AD-2138453.1 | 21 | 1 | 28 | 3 | 57 | 7 |
| AD-2138790.2 | 11 | 1 | 15 | 2 | 22 | 2 | AD-2138092.1 | 19 | 2 | 28 | 2 | 38 | 4 |
| AD-2138743.1 | 10 | 2 | 15 | 3 | 29 | 3 | AD-2138615.1 | 24 | 4 | 28 | 2 | 51 | 2 |
| AD-2138464.1 | 12 | 2 | 15 | 3 | 31 | 6 | AD-2138300.1 | 20 | 0 | 28 | 2 | 44 | 5 |
| AD-2138647.1 | 12 | 1 | 15 | 1 | 29 | 4 | AD-2138312.1 | 19 | 3 | 28 | 2 | 38 | 3 |
| AD-2138244.1 | 10 | 3 | 15 | 1 | 21 | 2 | AD-2138153.1 | 18 | 2 | 28 | 0 | 39 | 6 |
| AD-2138349.1 | 9 | 2 | 15 | 1 | 22 | 2 | AD-2138137.1 | 22 | 1 | 28 | 5 | 44 | 6 |
| AD-2138532.1 | 15 | 2 | 15 | 1 | 26 | 2 | AD-2138095.1 | 20 | 3 | 28 | 3 | 44 | 2 |
| AD-2138868.2 | 9 | 1 | 15 | 2 | 23 | 3 | AD-2138377.1 | 19 | 2 | 28 | 2 | 51 | 4 |
| AD-2138658.1 | 11 | 1 | 15 | 2 | 22 | 3 | AD-2138108.1 | 18 | 1 | 28 | 2 | 38 | 4 |
| AD-2138713.1 | 10 | 1 | 15 | 2 | 24 | 4 | AD-2138299.1 | 24 | 3 | 28 | 4 | 43 | 4 |
| AD-2138745.1 | 12 | 2 | 15 | 4 | 25 | 4 | AD-2138341.1 | 19 | 2 | 28 | 2 | 45 | 2 |
| AD-2138351.1 | 13 | 1 | 15 | 1 | 26 | 1 | AD-2138318.1 | 22 | 2 | 29 | 2 | 49 | 2 |
| AD-2138663.1 | 12 | 1 | 15 | 1 | 28 | 8 | AD-2138067.1 | 15 | 2 | 29 | 7 | 42 | 3 |
| AD-2138649.1 | 12 | 0 | 15 | 0 | 29 | 4 | AD-2138746.1 | 21 | 1 | 29 | 6 | 66 | 6 |
| AD-2138651.1 | 11 | 1 | 15 | 0 | 30 | 6 | AD-2138075.1 | 18 | 3 | 29 | 5 | 39 | 4 |
| AD-2138399.1 | 12 | 3 | 15 | 2 | 27 | 2 | AD-2138046.1 | 17 | 1 | 29 | 3 | 41 | 3 |
| AD-2138710.1 | 14 | 1 | 15 | 3 | 20 | 3 | AD-2138427.1 | 16 | 2 | 29 | 2 | 50 | 8 |
| AD-2138635.1 | 11 | 1 | 15 | 2 | 23 | 5 | AD-2138571.1 | 17 | 1 | 29 | 3 | 55 | 10 |
| AD-2138643.1 | 12 | 1 | 15 | 2 | 20 | 3 | AD-2138362.1 | 20 | 1 | 29 | 1 | 51 | 4 |
| AD-2138634.1 | 10 | 1 | 15 | 3 | 26 | 4 | AD-2138201.1 | 20 | 6 | 29 | 1 | 56 | 10 |
| AD-2138531.1 | 12 | 0 | 16 | 3 | 25 | 3 | AD-2138076.1 | 16 | 1 | 29 | 3 | 60 | 3 |
| AD-2138700.1 | 9 | 1 | 16 | 3 | 29 | 6 | AD-2138302.1 | 22 | 1 | 29 | 1 | 40 | 1 |
| AD-2138711.1 | 11 | 1 | 16 | 2 | 27 | 8 | AD-2138216.1 | 22 | 2 | 29 | 3 | 43 | 1 |
| AD-2138257.1 | 12 | 3 | 16 | 2 | 25 | 4 | AD-2138112.1 | 20 | 3 | 29 | 2 | 44 | 5 |
| AD-2138601.1 | 14 | 1 | 16 | 1 | 28 | 4 | AD-2138084.1 | 19 | 3 | 29 | 1 | 50 | 7 |
| AD-2138717.1 | 12 | 1 | 16 | 3 | 24 | 2 | AD-2138478.1 | 16 | 2 | 29 | 5 | 63 | 5 |
| AD-2138715.1 | 11 | 1 | 16 | 1 | 26 | 2 | AD-2138203.1 | 24 | 4 | 29 | 5 | 39 | 3 |
| AD-2138077.1 | 10 | 2 | 16 | 3 | 30 | 4 | AD-2138186.1 | 18 | 3 | 30 | 2 | 50 | 5 |
| AD-2138259.1 | 10 | 2 | 16 | 3 | 22 | 4 | AD-2138248.1 | 25 | 7 | 30 | 4 | 50 | 7 |
| AD-2138476.1 | 10 | 1 | 16 | 2 | 26 | 5 | AD-2138056.1 | 25 | 2 | 30 | 4 | 34 | 3 |
| AD-2138400.1 | 11 | 3 | 16 | 3 | 29 | 1 | AD-2138135.1 | 28 | 2 | 30 | 1 | 36 | 3 |
| AD-2138870.2 | 12 | 2 | 16 | 1 | 30 | 1 | AD-2138143.1 | 15 | 4 | 30 | 4 | 35 | 3 |
| AD-2138442.1 | 11 | 2 | 16 | 2 | 22 | 3 | AD-2138303.1 | 23 | 3 | 30 | 1 | 42 | 1 |
| AD-2138704.1 | 12 | 2 | 16 | 2 | 25 | 4 | AD-2138370.1 | 25 | 6 | 30 | 2 | 75 | 0 |
| AD-2138792.2 | 14 | 2 | 16 | 2 | 34 | 1 | AD-2138393.1 | 28 | 2 | 30 | 4 | 43 | 5 |
| AD-2138637.1 | 13 | 1 | 16 | 1 | 22 | 6 | AD-2138139.1 | 21 | 4 | 30 | 4 | 43 | 8 |
| AD-2138542.1 | 12 | 2 | 17 | 1 | 30 | 3 | AD-2138463.1 | 27 | 3 | 30 | 3 | 63 | 2 |
| AD-2138785.2 | 16 | 0 | 17 | 3 | 24 | 2 | AD-2138198.1 | 23 | 2 | 30 | 3 | 67 | 11 |
| AD-2138642.1 | 15 | 3 | 17 | 1 | 25 | 4 | AD-2138283.1 | 19 | 2 | 30 | 2 | 50 | 7 |
| AD-2138444.1 | 17 | 6 | 17 | 1 | 29 | 5 | AD-2138051.1 | 21 | 2 | 30 | 3 | 44 | 7 |
| AD-2138354.1 | 14 | 2 | 17 | 1 | 29 | 0 | AD-2138515.1 | 53 | 9 | 30 | 3 | 45 | 4 |
| AD-2138243.1 | 14 | 1 | 17 | 2 | 23 | 2 | AD-2138315.1 | 25 | 5 | 31 | 2 | 60 | 1 |
| AD-2138448.1 | 12 | 1 | 17 | 5 | 25 | 4 | AD-2138174.1 | 17 | 1 | 31 | 5 | 44 | 7 |
| AD-2138701.1 | 12 | 2 | 17 | 1 | 26 | 3 | AD-2138379.1 | 21 | 3 | 31 | 1 | 51 | 5 |
| AD-2138742.1 | 9 | 1 | 17 | 2 | 27 | 8 | AD-2138482.1 | 21 | 1 | 31 | 7 | 48 | 3 |
| AD-2138430.1 | 11 | 1 | 17 | 1 | 30 | 6 | AD-2138307.1 | 22 | 2 | 31 | 3 | 50 | 5 |
| AD-2138197.1 | 14 | 1 | 17 | 1 | 24 | 2 | AD-2138306.1 | 27 | 3 | 31 | 0 | 49 | 4 |
| AD-2138560.1 | 13 | 2 | 17 | 0 | 23 | 3 | AD-2138389.1 | 26 | 3 | 31 | 1 | 46 | 2 |
| AD-2138656.1 | 13 | 1 | 17 | 0 | 25 | 3 | AD-2138617.1 | 28 | 3 | 31 | 2 | 61 | 8 |
| AD-2138443.1 | 11 | 2 | 17 | 2 | 37 | 6 | AD-2138344.1 | 22 | 2 | 31 | 5 | 49 | 4 |
| AD-2138528.1 | 12 | 1 | 18 | 1 | 26 | 4 | AD-2138102.1 | 29 | 5 | 31 | 4 | 63 | 7 |
| AD-2138744.1 | 11 | 0 | 18 | 3 | 28 | 3 | AD-2138091.1 | 24 | 4 | 32 | 7 | 42 | 4 |
| AD-2138813.2 | 15 | 2 | 18 | 1 | 29 | 2 | AD-2138190.1 | 20 | 3 | 32 | 3 | 47 | 5 |
| AD-2138718.1 | 14 | 2 | 18 | 1 | 30 | 5 | AD-2138372.1 | 24 | 3 | 32 | 3 | 43 | 1 |
| AD-2138789.2 | 11 | 1 | 18 | 6 | 34 | 3 | AD-2138185.1 | 22 | 2 | 32 | 3 | 51 | 7 |
| AD-2138043.1 | 13 | 1 | 18 | 2 | 28 | 8 | AD-2138280.1 | 18 | 8 | 32 | 2 | 54 | 6 |
| AD-2138794.2 | 15 | 1 | 18 | 1 | 38 | 1 | AD-2138061.1 | 19 | 2 | 32 | 1 | 34 | 4 |
| AD-2138210.1 | 14 | 0 | 18 | 5 | 29 | 2 | AD-2138433.1 | 19 | 1 | 32 | 5 | 57 | 2 |
| AD-2138438.1 | 13 | 3 | 18 | 4 | 30 | 1 | AD-2138288.1 | 24 | 3 | 32 | 4 | 44 | 2 |
| AD-2138242.1 | 14 | 2 | 18 | 1 | 24 | 4 | AD-2138285.1 | 21 | 3 | 32 | 1 | 45 | 3 |
| AD-2138287.1 | 16 | 3 | 18 | 1 | 29 | 5 | AD-2138484.1 | 23 | 2 | 32 | 2 | 47 | 4 |
| AD-2138491.1 | 13 | 1 | 18 | 3 | 30 | 4 | AD-2138154.1 | 19 | 2 | 32 | 2 | 56 | 3 |
| AD-2138823.2 | 13 | 1 | 18 | 2 | 28 | 1 | AD-2138098.1 | 20 | 1 | 33 | 3 | 40 | 5 |
| AD-2138714.1 | 11 | 1 | 19 | 1 | 25 | 3 | AD-2138214.1 | 22 | 4 | 33 | 3 | 57 | 4 |
| AD-2138472.1 | 13 | 0 | 19 | 1 | 28 | 3 | AD-2138141.1 | 24 | 5 | 33 | 3 | 47 | 2 |
| AD-2138246.1 | 14 | 3 | 19 | 2 | 29 | 2 | AD-2138512.1 | 35 | 2 | 33 | 2 | 51 | 5 |
| AD-2138650.1 | 13 | 1 | 19 | 2 | 30 | 4 | AD-2138396.1 | 28 | 5 | 33 | 4 | 46 | 4 |
| AD-2138826.2 | 15 | 2 | 19 | 3 | 33 | 3 | AD-2138060.1 | 28 | 3 | 33 | 1 | 49 | 0 |
| AD-2138233.1 | 19 | 4 | 19 | 1 | 28 | 5 | AD-2138179.1 | 26 | 3 | 33 | 2 | 50 | 8 |
| AD-2138783.1 | 17 | 2 | 19 | 2 | 29 | 5 | AD-2138678.1 | 31 | 3 | 33 | 3 | 57 | 2 |
| AD-2138290.1 | 16 | 3 | 19 | 1 | 29 | 0 | AD-2138251.1 | 22 | 4 | 33 | 2 | 60 | 6 |
| AD-2138559.1 | 13 | 2 | 19 | 2 | 29 | 3 | AD-2138063.1 | 20 | 2 | 33 | 2 | 40 | 3 |
| AD-2138784.2 | 14 | 3 | 19 | 5 | 22 | 3 | AD-2138301.1 | 22 | 3 | 33 | 4 | 43 | 5 |
| AD-2138212.1 | 14 | 2 | 19 | 2 | 26 | 4 | AD-2138392.1 | 24 | 1 | 33 | 2 | 46 | 3 |
| AD-2138262.1 | 13 | 2 | 19 | 0 | 30 | 3 | AD-2138376.1 | 21 | 2 | 34 | 2 | 44 | 5 |
| AD-2138457.1 | 17 | 4 | 19 | 3 | 31 | 4 | AD-2138114.1 | 21 | 2 | 34 | 5 | 49 | 2 |
| AD-2138347.1 | 11 | 2 | 19 | 3 | 28 | 2 | AD-2138087.1 | 29 | 5 | 35 | 4 | 37 | 2 |
| AD-2138237.1 | 15 | 4 | 19 | 1 | 29 | 1 | AD-2138339.1 | 24 | 3 | 35 | 7 | 50 | 5 |
| AD-2138044.1 | 17 | 1 | 19 | 1 | 30 | 3 | AD-2138215.1 | 22 | 3 | 35 | 3 | 59 | 4 |
| AD-2138261.1 | 13 | 2 | 19 | 2 | 29 | 3 | AD-2138403.1 | 29 | 4 | 35 | 1 | 63 | 0 |
| AD-2138211.1 | 17 | 4 | 19 | 1 | 26 | 2 | AD-2138111.1 | 21 | 2 | 35 | 3 | 47 | 6 |
| AD-2138263.1 | 15 | 2 | 20 | 1 | 28 | 1 | AD-2138125.1 | 26 | 4 | 35 | 1 | 41 | 5 |
| AD-2138716.1 | 15 | 2 | 20 | 3 | 28 | 2 | AD-2138439.1 | 29 | 2 | 35 | 7 | 53 | 7 |
| AD-2138589.1 | 13 | 2 | 20 | 2 | 28 | 1 | AD-2138591.1 | 26 | 3 | 35 | 4 | 53 | 10 |
| AD-2138086.1 | 11 | 1 | 20 | 4 | 30 | 7 | AD-2138175.1 | 21 | 2 | 35 | 3 | 60 | 8 |
| AD-2138793.2 | 13 | 2 | 20 | 3 | 33 | 6 | AD-2138090.1 | 25 | 2 | 35 | 3 | 44 | 9 |
| AD-2138055.1 | 14 | 2 | 20 | 2 | 24 | 1 | AD-2138562.1 | 20 | 3 | 35 | 4 | 61 | 1 |
| AD-2138459.1 | 14 | 1 | 20 | 3 | 29 | 5 | AD-2138419.1 | 23 | 1 | 35 | 1 | 42 | 6 |
| AD-2138712.1 | 14 | 2 | 20 | 1 | 27 | 5 | AD-2138305.1 | 34 | 4 | 35 | 3 | 43 | 1 |
| AD-2138085.1 | 13 | 3 | 20 | 1 | 35 | 2 | AD-2138513.1 | 63 | 6 | 35 | 1 | 49 | 4 |
| AD-2138762.1 | 16 | 2 | 20 | 2 | 38 | 3 | AD-2138136.1 | 28 | 5 | 35 | 3 | 51 | 10 |
| AD-2138441.1 | 17 | 3 | 20 | 1 | 25 | 2 | AD-2138602.1 | 34 | 2 | 35 | 2 | 70 | 6 |
| AD-2138309.1 | 18 | 2 | 20 | 2 | 30 | 3 | AD-2138328.1 | 32 | 4 | 36 | 2 | 53 | 10 |
| AD-2138401.1 | 14 | 3 | 20 | 1 | 29 | 4 | AD-2138113.1 | 28 | 4 | 36 | 6 | 70 | 7 |
| AD-2138357.1 | 13 | 1 | 20 | 2 | 31 | 1 | AD-2138282.1 | 27 | 3 | 36 | 1 | 54 | 4 |
| AD-2138238.1 | 17 | 2 | 20 | 2 | 34 | 3 | AD-2138059.1 | 31 | 1 | 36 | 2 | 43 | 2 |
| AD-2138047.1 | 15 | 1 | 21 | 3 | 29 | 3 | AD-2138415.1 | 33 | 1 | 36 | 3 | 59 | 5 |
| AD-2138465.1 | 12 | 1 | 21 | 1 | 37 | 4 | AD-2138144.1 | 25 | 2 | 36 | 1 | 51 | 5 |
| AD-2138821.2 | 17 | 3 | 21 | 1 | 29 | 4 | AD-2138124.1 | 25 | 1 | 36 | 2 | 64 | 7 |
| AD-2138397.1 | 18 | 1 | 21 | 2 | 30 | 2 | AD-2138278.1 | 26 | 2 | 36 | 2 | 73 | 10 |
| AD-2138705.1 | 14 | 2 | 21 | 1 | 31 | 2 | AD-2138273.1 | 40 | 10 | 36 | 5 | 58 | 8 |
| AD-2138447.1 | 14 | 3 | 22 | 1 | 26 | 4 | AD-2138730.1 | 33 | 3 | 36 | 1 | 66 | 10 |
| AD-2138437.1 | 15 | 1 | 22 | 3 | 29 | 5 | AD-2138674.1 | 31 | 2 | 37 | 2 | 58 | 7 |
| AD-2138406.1 | 16 | 2 | 23 | 4 | 30 | 2 | AD-2138337.1 | 39 | 2 | 37 | 3 | 53 | 2 |
| AD-2138348.1 | 23 | 6 | 23 | 1 | 26 | 1 | AD-2138391.1 | 34 | 3 | 37 | 3 | 47 | 7 |
| AD-2138289.1 | 19 | 1 | 24 | 2 | 30 | 3 | AD-2138479.1 | 30 | 2 | 37 | 6 | 82 | 5 |
| AD-2138451.1 | 16 | 1 | 24 | 0 | 27 | 2 | AD-2138298.1 | 29 | 3 | 37 | 6 | 56 | 3 |
| AD-2138255.1 | 17 | 1 | 25 | 1 | 30 | 3 | AD-2138681.1 | 33 | 3 | 37 | 0 | 59 | 3 |
| AD-2138435.1 | 15 | 2 | 27 | 5 | 30 | 2 | AD-2138480.1 | 28 | 3 | 38 | 5 | 62 | 4 |
| AD-2138079.1 | 13 | 0 | 27 | 0 | 29 | 3 | AD-2138142.1 | 26 | 3 | 38 | 3 | 56 | 4 |
| AD-2138771.1 | 6 | 1 | 8 | 1 | 16 | 3 | AD-2138507.1 | 41 | 6 | 38 | 2 | 72 | 5 |
| AD-2138889.2 | 5 | 0 | 8 | 1 | 24 | 2 | AD-2138608.1 | 28 | 0 | 38 | 1 | 77 | 3 |
| AD-2138548.1 | 6 | 1 | 8 | 2 | 18 | 3 | AD-2138575.1 | 33 | 4 | 39 | 3 | 69 | 2 |
| AD-2138768.1 | 7 | 0 | 9 | 1 | 15 | 3 | AD-2138374.1 | 30 | 1 | 40 | 4 | 55 | 4 |
| AD-2138765.1 | 9 | 2 | 10 | 1 | 18 | 3 | AD-2138432.1 | 32 | 3 | 40 | 3 | 59 | 9 |
| AD-2138626.1 | 7 | 1 | 10 | 0 | 16 | 3 | AD-2138217.1 | 32 | 6 | 40 | 2 | 59 | 3 |
| AD-2138883.2 | 7 | 1 | 10 | 0 | 22 | 2 | AD-2138057.1 | 44 | 5 | 40 | 3 | 55 | 4 |
| AD-2138553.1 | 8 | 0 | 10 | 1 | 29 | 4 | AD-2138612.1 | 44 | 2 | 40 | 1 | 80 | 6 |
| AD-2138547.1 | 7 | 2 | 10 | 3 | 23 | 5 | AD-2138365.1 | 41 | 6 | 41 | 3 | 57 | 6 |
| AD-2138878.2 | 7 | 1 | 10 | 1 | 19 | 1 | AD-2138835.2 | 28 | 2 | 41 | 6 | 79 | 12 |
| AD-2138552.1 | 7 | 0 | 10 | 2 | 23 | 3 | AD-2138901.2 | 31 | 3 | 41 | 1 | 60 | 2 |
| AD-2138550.1 | 8 | 1 | 10 | 5 | 25 | 6 | AD-2138291.1 | 37 | 4 | 41 | 2 | 51 | 3 |
| AD-2138585.1 | 10 | 1 | 10 | 2 | 26 | 3 | AD-2138335.1 | 35 | 4 | 41 | 4 | 54 | 1 |
| AD-2138412.1 | 8 | 1 | 10 | 2 | 15 | 2 | AD-2138665.1 | 38 | 2 | 41 | 6 | 66 | 18 |
| AD-2138802.2 | 8 | 2 | 11 | 1 | 23 | 3 | AD-2138338.1 | 30 | 1 | 42 | 5 | 57 | 3 |
| AD-2138723.1 | 8 | 2 | 11 | 1 | 16 | 2 | AD-2138180.1 | 35 | 1 | 42 | 1 | 49 | 10 |
| AD-2138767.1 | 7 | 1 | 11 | 1 | 18 | 4 | AD-2138062.1 | 30 | 3 | 42 | 3 | 44 | 7 |
| AD-2138856.2 | 9 | 1 | 11 | 1 | 17 | 3 | AD-2138363.1 | 34 | 5 | 42 | 8 | 66 | 9 |
| AD-2138551.1 | 8 | 1 | 11 | 1 | 20 | 2 | AD-2138729.1 | 40 | 1 | 42 | 3 | 63 | 8 |
| AD-2138894.2 | 6 | 1 | 11 | 0 | 30 | 3 | AD-2138314.1 | 37 | 3 | 43 | 4 | 62 | 1 |
| AD-2138549.1 | 7 | 1 | 11 | 2 | 22 | 4 | AD-2138319.1 | 31 | 3 | 43 | 2 | 60 | 2 |
| AD-2138888.2 | 7 | 1 | 11 | 1 | 22 | 3 | AD-2138166.1 | 38 | 4 | 43 | 1 | 73 | 5 |
| AD-2138566.1 | 12 | 2 | 11 | 2 | 16 | 3 | AD-2138042.1 | 46 | 5 | 44 | 4 | 46 | 3 |
| AD-2138877.2 | 8 | 0 | 11 | 2 | 20 | 6 | AD-2138685.1 | 30 | 7 | 44 | 1 | 57 | 5 |
| AD-2138879.2 | 9 | 1 | 12 | 1 | 24 | 2 | AD-2138272.1 | 45 | 6 | 44 | 9 | 63 | 8 |
| AD-2138770.1 | 9 | 1 | 12 | 1 | 21 | 3 | AD-2138239.1 | 39 | 3 | 44 | 4 | 72 | 2 |
| AD-2138544.1 | 7 | 1 | 12 | 3 | 20 | 2 | AD-2138655.1 | 40 | 2 | 46 | 3 | 72 | 3 |
| AD-2138520.1 | 7 | 0 | 12 | 1 | 25 | 5 | AD-2138526.1 | 36 | 2 | 46 | 3 | 63 | 4 |
| AD-2138890.2 | 7 | 1 | 12 | 0 | 25 | 1 | AD-2138252.1 | 37 | 5 | 47 | 2 | 65 | 4 |
| AD-2138839.2 | 9 | 1 | 12 | 2 | 21 | 1 | AD-2138340.1 | 44 | 5 | 47 | 5 | 67 | 7 |
| AD-2138764.1 | 9 | 1 | 12 | 2 | 24 | 4 | AD-2138219.1 | 36 | 4 | 47 | 2 | 68 | 9 |
| AD-2138584.1 | 9 | 1 | 12 | 0 | 27 | 6 | AD-2138275.1 | 36 | 8 | 47 | 4 | 49 | 6 |
| AD-2138751.1 | 11 | 2 | 12 | 1 | 23 | 5 | AD-2138041.1 | 47 | 2 | 47 | 7 | 50 | 4 |
| AD-2138885.2 | 8 | 1 | 12 | 1 | 23 | 3 | AD-2138387.1 | 40 | 0 | 48 | 6 | 62 | 4 |
| AD-2138540.1 | 7 | 1 | 12 | 1 | 34 | 6 | AD-2138367.1 | 54 | 5 | 48 | 7 | 56 | 4 |
| AD-2138521.1 | 9 | 1 | 12 | 1 | 36 | 6 | AD-2138902.2 | 41 | 1 | 48 | 3 | 73 | 9 |
| AD-2138880.2 | 10 | 1 | 12 | 0 | 23 | 5 | AD-2138529.1 | 45 | 2 | 49 | 2 | 70 | 6 |
| AD-2138886.2 | 8 | 1 | 12 | 1 | 22 | 2 | AD-2138134.1 | 52 | 3 | 50 | 3 | 78 | 11 |
| AD-2138881.2 | 10 | 1 | 12 | 2 | 27 | 3 | AD-2138683.1 | 47 | 3 | 50 | 3 | 76 | 7 |
| AD-2138518.1 | 10 | 1 | 13 | 4 | 24 | 4 | AD-2138429.1 | 50 | 2 | 51 | 6 | 65 | 6 |
| AD-2138557.1 | 9 | 2 | 13 | 1 | 24 | 2 | AD-2138231.1 | 72 | 10 | 51 | 3 | 67 | 7 |
| AD-2138623.1 | 10 | 1 | 13 | 1 | 25 | 5 | AD-2138424.1 | 47 | 5 | 52 | 6 | 89 | 8 |
| AD-2138545.1 | 8 | 0 | 13 | 2 | 19 | 4 | AD-2138680.1 | 54 | 5 | 52 | 3 | 73 | 3 |
| AD-2138858.2 | 13 | 1 | 13 | 1 | 28 | 1 | AD-2138395.1 | 49 | 8 | 53 | 6 | 56 | 2 |
| AD-2138490.1 | 11 | 1 | 13 | 1 | 21 | 3 | AD-2138421.1 | 45 | 1 | 54 | 1 | 83 | 6 |
| AD-2138724.1 | 9 | 0 | 13 | 1 | 25 | 3 | AD-2138774.1 | 46 | 6 | 54 | 2 | 65 | 7 |
| AD-2138866.2 | 9 | 2 | 13 | 0 | 27 | 1 | AD-2138040.1 | 49 | 3 | 54 | 4 | 50 | 2 |
| AD-2138586.1 | 10 | 1 | 13 | 1 | 33 | 7 | AD-2138466.1 | 49 | 4 | 55 | 7 | 76 | 4 |
| AD-2138614.1 | 11 | 3 | 13 | 2. | 19 | 2 | AD-2138133.1 | 65 | 10 | 55 | 5 | 63 | 7 |
| AD-2138625.1 | 11 | 1 | 13 | 1 | 25 | 2 | AD-2138343.1 | 31 | 2 | 55 | 5 | 68 | 3 |
| AD-2138229.1 | 8 | 1 | 13 | 2 | 22 | 2 | AD-2138330.1 | 42 | 6 | 55 | 5 | 74 | 11 |
| AD-2138841.2 | 10 | 0 | 13 | 1 | 26 | 1 | AD-2138481.1 | 48 | 6 | 56 | 5 | 68 | 5 |
| AD-2138840.2 | 9 | 1 | 13 | 2 | 23 | 2 | AD-2138733.1 | 56 | 4 | 57 | 3 | 71 | 7 |
| AD-2138621.1 | 8 | 1 | 13 | 2 | 23 | 3 | AD-2138380.1 | 77 | 3 | 57 | 6 | 70 | 4 |
| AD-2138882.2 | 11 | 2 | 13 | 1 | 25 | 1 | AD-2138119.1 | 53 | 11 | 58 | 4 | 65 | 7 |
| AD-2138568.1 | 10 | 1 | 13 | 2 | 22 | 4 | AD-2138334.1 | 72 | 9 | 58 | 8 | 73 | 5 |
| AD-2138804.2 | 10 | 1 | 13 | 1 | 24 | 1 | AD-2138329.1 | 48 | 2 | 58 | 2 | 71 | 6 |
| AD-2138519.1 | 11 | 0 | 13 | 3 | 27 | 6 | AD-2138342.1 | 54 | 1 | 59 | 6 | 80 | 7 |
| AD-2138567.1 | 15 | 1 | 13 | 3 | 22 | 4 | AD-2139124.2 | 60 | 11 | 59 | 4 | 68 | 3 |
| AD-2138749.1 | 12 | 4 | 13 | 3 | 23 | 0 | AD-2138675.1 | 57 | 12 | 60 | 5 | 75 | 4 |
| AD-2138769.1 | 10 | 1 | 13 | 1 | 24 | 2 | AD-2138676.1 | 55 | 5 | 60 | 6 | 76 | 3 |
| AD-2138772.1 | 9 | 1 | 13 | 1 | 25 | 5 | AD-2138597.1 | 56 | 7 | 60 | 5 | 83 | 7 |
| AD-2138628.1 | 11 | 0 | 14 | 3 | 15 | 7 | AD-2138297.1 | 53 | 8 | 60 | 6 | 69 | 5 |
| AD-2138580.1 | 9 | 1 | 14 | 1 | 20 | 3 | AD-2138331.1 | 48 | 2 | 60 | 2 | 73 | 2 |
| AD-2138798.2 | 11 | 2 | 14 | 0 | 21 | 2 | AD-2138593.1 | 55 | 5 | 60 | 3 | 79 | 7 |
| AD-2138523.1 | 8 | 0 | 14 | 0 | 28 | 5 | AD-2138667.1 | 59 | 3 | 61 | 7 | 86 | 4 |
| AD-2138825.2 | 10 | 0 | 14 | 2 | 35 | 1 | AD-2138909.2 | 64 | 4 | 61 | 4 | 70 | 4 |
| AD-2138534.1 | 11 | 1 | 14 | 7 | 32 | 4 | AD-2138600.1 | 63 | 2 | 61 | 10 | 71 | 4 |
| AD-2138162.1 | 7 | 1 | 14 | 1 | 24 | 5 | AD-2138483.1 | 56 | 3 | 62 | 5 | 74 | 6 |
| AD-2138842.2 | 10 | 1 | 14 | 2 | 28 | 5 | AD-2138409.1 | 59 | 4 | 62 | 4 | 78 | 7 |
| AD-2138797.2 | 11 | 1 | 14 | 2 | 22 | 2 | AD-2138295.1 | 67 | 6 | 62 | 4 | 74 | 4 |
| AD-2138891.2 | 10 | 1 | 14 | 2 | 25 | 1 | AD-2138684.1 | 56 | 5 | 63 | 2 | 101 | 18 |
| AD-2138859.2 | 13 | 1 | 14 | 2 | 22 | 2 | AD-2138276.1 | 64 | 10 | 63 | 6 | 71 | 7 |
| AD-2138620.1 | 11 | 2 | 14 | 1 | 25 | 3 | AD-2138493.1 | 66 | 6 | 63 | 2 | 83 | 6 |
| AD-2138863.2 | 10 | 1 | 14 | 0 | 31 | 7 | AD-2138908.2 | 63 | 6 | 63 | 8 | 64 | 7 |
| AD-2138488.1 | 11 | 2 | 14 | 3 | 18 | 2 | AD-2138336.1 | 73 | 6 | 63 | 17 | 70 | 7 |
| AD-2138857.2 | 11 | 2 | 14 | 2 | 25 | 1 | AD-2138332.1 | 65 | 2 | 63 | 17 | 75 | 3 |
| AD-2138816.2 | 10 | 2 | 14 | 1 | 25 | 2 | AD-2139018.2 | 72 | 6 | 64 | 4 | 76 | 1 |
| AD-2138747.1 | 9 | 1 | 14 | 1 | 23 | 4 | AD-2139003.2 | 65 | 2 | 65 | 5 | 68 | 6 |
| AD-2138638.1 | 12 | 2 | 14 | 0 | 26 | 7 | AD-2139016.2 | 78 | 14 | 65 | 19 | 87 | 5 |
| AD-2138867.2 | 10 | 0 | 14 | 1 | 29 | 2 | AD-2138973.2 | 75 | 9 | 65 | 1 | 79 | 10 |
| AD-2138228.1 | 13 | 3 | 15 | 1 | 19 | 2 | AD-2138456.1 | 67 | 7 | 65 | 6 | 83 | 3 |
| AD-2138616.1 | 12 | 1 | 15 | 1 | 25 | 3 | AD-2139078.2 | 61 | 10 | 65 | 10 | 83 | 10 |
| AD-2138164.1 | 9 | 1 | 15 | 2 | 25 | 2 | AD-2139143.2 | 72 | 8 | 66 | 8 | 61 | 9 |
| AD-2138696.1 | 10 | 1 | 15 | 2 | 31 | 5 | AD-2138221.1 | 74 | 11 | 66 | 2 | 91 | 9 |
| AD-2138475.1 | 12 | 1 | 15 | 4 | 38 | 8 | AD-2139144.2 | 88 | 12 | 67 | 23 | 93 | 7 |
| AD-2138414.1 | 12 | 0 | 15 | 1 | 26 | 6 | AD-2139126.2 | 76 | 8 | 67 | 7 | 61 | 6 |
| AD-2138838.2 | 10 | 0 | 15 | 1 | 27 | 1 | AD-2138284.1 | 71 | 6 | 67 | 4 | 89 | 4 |
| AD-2138640.1 | 14 | 2 | 15 | 3 | 29 | 6 | AD-2138431.1 | 63 | 3 | 68 | 8 | 106 | 15 |
| AD-2138887.2 | 12 | 1 | 15 | 1 | 22 | 4 | AD-2138171.1 | 52 | 9 | 68 | 3 | 80 | 4 |
| AD-2138773.1 | 14 | 2. | 15 | 1 | 25 | 4 | AD-2138988.2 | 72 | 7 | 68 | 5 | 74 | 3 |
| AD-2138440.1 | 10 | 2 | 15 | 2 | 39 | 16 | AD-2138317.1 | 46 | 2 | 68 | 6 | 85 | 4 |
| AD-2138897.2 | 11 | 0 | 15 | 2 | 30 | 2 | AD-2138972.2 | 76 | 7 | 69 | 5 | 66 | 6 |
| AD-2138486.1 | 10 | 1 | 15 | 3 | 22 | 3 | AD-2139080.2 | 73 | 6 | 69 | 6 | 77 | 4 |
| AD-2138855.2 | 12 | 2 | 15 | 2 | 23 | 3 | AD-2138679.1 | 70 | 8 | 69 | 3 | 73 | 3 |
| AD-2138833.2 | 9 | 1 | 15 | 2 | 28 | 4 | AD-2139095.2 | 78 | 4 | 70 | 8 | 74 | 7 |
| AD-2138884.2 | 11 | 0 | 15 | 1 | 29 | 2 | AD-2138115.1 | 64 | 9 | 70 | 3 | 87 | 1 |
| AD-2138822.2 | 14 | 2 | 15 | 1 | 32 | 3 | AD-2138677.1 | 69 | 2 | 70 | 7 | 74 | 15 |
| AD-2138497.1 | 11 | 1 | 15 | 2 | 27 | 8 | AD-2139129.2 | 78 | 2 | 71 | 8 | 74 | 5 |
| AD-2138569.1 | 12 | 1 | 15 | 1 | 26 | 3 | AD-2139051.2 | 69 | 5 | 71 | 3 | 75 | 7 |
| AD-2138165.1 | 11 | 2 | 15 | 1 | 29 | 1 | AD-2139145.2 | 72 | 27 | 71 | 4 | 95 | 7 |
| AD-2138072.1 | 10 | 0 | 15 | 2 | 22 | 4 | AD-2139067.2 | 60 | 14 | 71 | 5 | 72 | 4 |
| AD-2138487.1 | 12 | 2 | 15 | 3 | 26 | 8 | AD-2138987.2 | 71 | 5 | 72 | 2 | 65 | 11 |
| AD-2138836.2 | 10 | 1 | 15 | 3 | 27 | 5 | AD-2138954.2 | 49 | 16 | 72 | 24 | 101 | 10 |
| AD-2138689.1 | 14 | 2 | 15 | 1 | 28 | 2 | AD-2139035.2 | 64 | 8 | 72 | 5 | 73 | 7 |
| AD-2138864.2 | 11 | 1 | 15 | 1 | 27 | 1 | AD-2139094.2 | 71 | 5 | 72 | 4 | 77 | 10 |
| AD-2138227.1 | 14 | 2 | 16 | 1 | 25 | 2 | AD-2139111.2 | 73 | 4 | 72 | 5 | 72 | 2 |
| AD-2138624.1 | 11 | 1 | 16 | 2 | 25 | 3 | AD-2139019.2 | 77 | 5 | 72 | 10 | 78 | 3 |
| AD-2138633.1 | 11 | 1 | 16 | 1 | 31 | 4 | AD-2139034.2 | 63 | 4 | 73 | 7 | 71 | 11 |
| AD-2138808.2 | 12 | 2 | 16 | 2 | 24 | 2 | AD-2139032.2 | 77 | 6 | 73 | 2 | 74 | 7 |
| AD-2138898.2 | 13 | 1 | 16 | 1 | 30 | 2 | AD-2139128.2 | 56 | 16 | 73 | 1 | 76 | 8 |
| AD-2138196.1 | 13 | 1 | 16 | 0 | 32 | 2 | AD-2138956.2 | 78 | 11 | 73 | 6 | 79 | 6 |
| AD-2138605.1 | 12 | 1 | 16 | 5 | 24 | 5 | AD-2139140.2 | 81 | 9 | 73 | 8 | 53 | 13 |
| AD-2138896.2 | 15 | 2 | 16 | 1 | 31 | 3 | AD-2138390.1 | 75 | 7 | 73 | 1 | 77 | 4 |
| AD-2138664.1 | 13 | 1 | 16 | 1 | 35 | 10 | AD-2139081.2 | 76 | 10 | 73 | 9 | 75 | 9 |
| AD-2138462.1 | 15 | 1 | 16 | 2 | 41 | 4 | AD-2138599.1 | 65 | 7 | 73 | 1 | 78 | 1 |
| AD-2138641.1 | 10 | 2 | 16 | 2 | 21 | 1 | AD-2138941.2 | 52 | 12 | 73 | 2 | 79 | 1 |
| AD-2138558.1 | 11 | 1 | 16 | 1 | 28 | 7 | AD-2139079.2 | 86 | 3 | 73 | 13 | 85 | 8 |
| AD-2138766.1 | 15 | 2 | 16 | 2 | 25 | 2 | AD-2139113.2 | 91 | 3 | 73 | 6 | 88 | 2 |
| AD-2138781.1 | 12 | 2 | 16 | 2 | 34 | 4 | AD-2138913.2 | 71 | 5 | 74 | 11 | 72 | 6 |
| AD-2138844.2 | 11 | 2 | 16 | 2 | 24 | 2 | AD-2139064.2 | 72 | 7 | 74 | 9 | 79 | 5 |
| AD-2138320.1 | 16 | 5 | 16 | 1 | 30 | 3 | AD-2138903.2 | 76 | 6 | 75 | 6 | 83 | 1 |
| AD-2138727.1 | 13 | 3 | 16 | 2 | 22 | 5 | AD-2139092.2 | 80 | 14 | 75 | 5 | 72 | 6 |
| AD-2138860.2 | 15 | 2 | 16 | 1 | 27 | 2 | AD-2138971.2 | 74 | 13 | 75 | 10 | 85 | 13 |
| AD-2138606.1 | 12 | 1 | 16 | 2 | 30 | 5 | AD-2139110.2 | 66 | 5 | 75 | 7 | 78 | 6 |
| AD-2138583.1 | 11 | 0 | 16 | 3 | 33 | 4 | AD-2138957.2 | 82 | 4 | 76 | 2 | 79 | 7 |
| AD-2138827.2 | 14 | 1 | 16 | 3 | 33 | 3 | AD-2138905.2 | 67 | 6 | 76 | 9 | 85 | 8 |
| AD-2138848.2 | 12 | 1 | 16 | 2 | 34 | 4 | AD-2139142.2 | 61 | 6 | 76 | 8 | 65 | 7 |
| AD-2138073.1 | 12 | 1 | 17 | 3 | 30 | 8 | AD-2138906.2 | 70 | 3 | 76 | 3 | 73 | 11 |
| AD-2138748.1 | 13 | 1 | 17 | 2 | 27 | 4 | AD-2138911.2 | 74 | 6 | 76 | 4 | 80 | 3 |
| AD-2138581.1 | 13 | 1 | 17 | 1 | 32 | 4 | AD-2138986.2 | 85 | 8 | 77 | 13 | 83 | 4 |
| AD-2138556.1 | 11 | 2 | 17 | 3 | 33 | 6 | AD-2139108.2 | 93 | 15 | 77 | 10 | 93 | 10 |
| AD-2138622.1 | 12 | 2 | 17 | 1 | 21 | 1 | AD-2139125.2 | 73 | 5 | 77 | 9 | 63 | 1 |
| AD-2138795.2 | 14 | 2 | 17 | 3 | 26 | 2 | AD-2139002.2 | 73 | 11 | 77 | 14 | 73 | 10 |
| AD-2138811.2 | 15 | 1 | 17 | 3 | 29 | 2 | AD-2139066.2 | 65 | 4 | 77 | 2 | 75 | 17 |
| AD-2138579.1 | 12 | 1 | 17 | 2 | 30 | 5 | AD-2139052.2 | 79 | 3 | 78 | 5 | 87 | 8 |
| AD-2138496.1 | 14 | 1 | 17 | 2 | 27 | 4 | AD-2138732.1 | 88 | 2 | 78 | 4 | 89 | 5 |
| AD-2138582.1 | 12 | 2 | 17 | 4 | 29 | 4 | AD-2138940.2 | 79 | 11 | 78 | 9 | 85 | 1 |
| AD-2138546.1 | 10 | 1 | 17 | 3 | 32 | 5 | AD-2139131.2 | 73 | 14 | 78 | 8 | 77 | 4 |
| AD-2138607.1 | 14 | 2 | 17 | 2 | 33 | 11 | AD-2139096.2 | 79 | 14 | 78 | 9 | 84 | 2 |
| AD-2138070.1 | 13 | 1 | 17 | 4 | 21 | 1 | AD-2139001.2 | 76 | 7 | 78 | 5 | 78 | 11 |
| AD-2138627.1 | 14 | 1 | 17 | 0 | 25 | 5 | AD-2138924.2 | 72 | 7 | 78 | 7 | 76 | 7 |
| AD-2138809.2 | 15 | 2 | 17 | 1 | 26 | 4 | AD-2138394.1 | 82 | 5 | 78 | 6 | 89 | 7 |
| AD-2138385.1 | 13 | 1 | 17 | 1 | 28 | 5 | AD-2138925.2 | 81 | 4 | 78 | 7 | 87 | 5 |
| AD-2138722.1 | 11 | 1 | 17 | 3 | 30 | 5 | AD-2138907.2 | 77 | 9 | 79 | 14 | 71 | 12 |
| AD-2138845.2 | 11 | 1 | 17 | 4 | 28 | 2 | AD-2139133.2 | 83 | 0 | 79 | 8 | 72 | 6 |
| AD-2138383.1 | 15 | 3 | 17 | 2 | 29 | 3 | AD-2139036.2 | 78 | 3 | 79 | 7 | 85 | 0 |
| AD-2138498.1 | 14 | 1 | 17 | 2 | 29 | 2 | AD-2138970.2 | 77 | 6 | 79 | 14 | 77 | 21 |
| AD-2138865.2 | 10 | 1 | 17 | 3 | 31 | 3 | AD-2139065.2 | 75 | 5 | 79 | 5 | 84 | 9 |
| AD-2138824.2 | 11 | 0 | 17 | 1 | 39 | 5 | AD-2138494.1 | 79 | 5 | 80 | 10 | 91 | 2 |
| AD-2138725.1 | 15 | 1 | 17 | 3 | 27 | 5 | AD-2138426.1 | 79 | 2 | 80 | 8 | 103 | 12 |
| AD-2138524.1 | 12 | 1 | 17 | 2 | 31 | 3 | AD-2139097.2 | 84 | 4 | 80 | 4 | 82 | 5 |
| AD-2138508.1 | 13 | 1 | 17 | 1 | 36 | 4 | AD-2139000.2 | 73 | 10 | 80 | 6 | 86 | 11 |
| AD-2138495.1 | 10 | 1 | 17 | 2 | 23 | 3 | AD-2138904.2 | 78 | 11 | 80 | 5 | 85 | 9 |
| AD-2138750.1 | 17 | 4 | 17 | 2 | 24 | 6 | AD-2139121.2 | 78 | 11 | 80 | 14 | 92 | 3 |
| AD-2138690.1 | 12 | 2 | 17 | 3 | 26 | 2 | AD-2139109.2 | 60 | 0 | 81 | 10 | 75 | 3 |
| AD-2138632.1 | 11 | 2 | 17 | 1 | 40 | 4 | AD-2139146.2 | 87 | 1 | 81 | 2 | 90 | 3 |
| AD-2138500.1 | 12 | 1 | 17 | 1 | 25 | 3 | AD-2138327.1 | 83 | 7 | 81 | 6 | 86 | 15 |
| AD-2138810.2 | 16 | 3 | 17 | 2 | 29 | 1 | AD-2138974.2 | 74 | 3 | 81 | 8 | 86 | 4 |
| AD-2138517.1 | 15 | 2 | 17 | 1 | 32 | 3 | AD-2139050.2 | 70 | 8 | 81 | 9 | 81 | 6 |
| AD-2138208.1 | 12 | 2 | 17 | 1 | 33 | 5 | AD-2139053.2 | 84 | 2 | 81 | 5 | 86 | 4 |
| AD-2138321.1 | 11 | 1 | 18 | 2 | 24 | 3 | AD-2138371.1 | 79 | 4 | 81 | 8 | 83 | 4 |
| AD-2138687.1 | 16 | 3 | 18 | 1 | 24 | 3 | AD-2139141.2 | 84 | 9 | 81 | 12 | 74 | 12 |
| AD-2138854.2 | 16 | 1 | 18 | 1 | 32 | 2 | AD-2138926.2 | 92 | 2 | 82 | 5 | 94 | 8 |
| AD-2138265.1 | 12 | 4 | 18 | 2 | 34 | 1 | AD-2138989.2 | 84 | 11 | 82 | 3 | 94 | 8 |
| AD-2138726.1 | 15 | 2 | 18 | 2 | 42 | 1 | AD-2139130.2 | 78 | 7 | 82 | 9 | 81 | 5 |
| AD-2138828.2 | 14 | 1 | 18 | 1 | 28 | 4 | AD-2138428.1 | 91 | 11 | 82 | 19 | 95 | 5 |
| AD-2138832.2 | 13 | 1 | 18 | 1 | 35 | 3 | AD-2138375.1 | 75 | 13 | 82 | 8 | 84 | 7 |
| AD-2138554.1 | 9 | 1 | 18 | 2 | 45 | 4 | AD-2139099.2 | 84 | 0 | 83 | 8 | 84 | 4 |
| AD-2138837.2 | 13 | 0 | 18 | 3 | 31 | 2 | AD-2139049.2 | 83 | 11 | 83 | 4 | 76 | 7 |
| AD-2138274.1 | 14 | 1 | 18 | 1 | 33 | 4 | AD-2138975.2 | 84 | 6 | 83 | 5 | 76 | 5 |
| AD-2138535.1 | 13 | 1 | 18 | 5 | 48 | 5 | AD-2139101.2 | 85 | 1 | 83 | 8 | 79 | 12 |
| AD-2138555.1 | 12 | 2 | 18 | 2 | 27 | 2 | AD-2139147.2 | 66 | 18 | 83 | 9 | 86 | 3 |
| AD-2138609.1 | 17 | 1 | 18 | 1 | 29 | 4 | AD-2138915.2 | 83 | 6 | 83 | 5 | 96 | 7 |
| AD-2138477.1 | 9 | 6 | 18 | 3 | 36 | 2 | AD-2138977.2 | 90 | 3 | 83 | 3 | 94 | 2 |
| AD-2138104.1 | 13 | 0 | 18 | 1 | 28 | 5 | AD-2139103.2 | 87 | 3 | 84 | 4 | 90 | 3 |
| AD-2138543.1 | 11 | 2 | 18 | 2 | 31 | 6 | AD-2138293.1 | 60 | 1 | 84 | 27 | 76 | 2 |
| AD-2138130.1 | 13 | 1 | 18 | 3 | 28 | 2 | AD-2139135.2 | 84 | 9 | 84 | 5 | 88 | 4 |
| AD-2138148.1 | 14 | 1 | 18 | 2 | 29 | 2 | AD-2139017.2 | 82 | 5 | 84 | 5 | 88 | 4 |
| AD-2138777.1 | 19 | 2 | 18 | 1 | 30 | 1 | AD-2139098.2 | 86 | 6 | 84 | 3 | 92 | 9 |
| AD-2138267.1 | 13 | 1 | 18 | 3 | 31 | 5 | AD-2138938.2 | 63 | 25 | 84 | 11 | 68 | 20 |
| AD-2138187.1 | 13 | 2 | 18 | 3 | 33 | 4 | AD-2138985.2 | 95 | 2 | 84 | 4 | 85 | 12 |
| AD-2138163.1 | 11 | 2 | 19 | 2 | 25 | 4 | AD-2139083.2 | 80 | 9 | 84 | 9 | 99 | 3 |
| AD-2138161.1 | 9 | 3 | 19 | 1 | 33 | 4 | AD-2138514.1 | 100 | 11 | 85 | 10 | 90 | 7 |
| AD-2138796.2 | 15 | 1 | 19 | 3 | 30 | 2 | AD-2139048.2 | 72 | 14 | 85 | 9 | 81 | 10 |
| AD-2138654.1 | 15 | 2 | 19 | 0 | 32 | 4 | AD-2139055.2 | 88 | 10 | 85 | 7 | 97 | 9 |
| AD-2138266.1 | 12 | 1 | 19 | 3 | 36 | 4 | AD-2139004.2 | 83 | 11 | 85 | 7 | 100 | 6 |
| AD-2138407.1 | 11 | 0 | 19 | 3 | 28 | 2 | AD-2138492.1 | 80 | 10 | 85 | 1 | 91 | 4 |
| AD-2138807.2 | 13 | 1 | 19 | 2 | 28 | 3 | AD-2138943.2 | 82 | 6 | 86 | 5 | 98 | 4 |
| AD-2138226.1 | 16 | 3 | 19 | 1 | 29 | 11 | AD-2139134.2 | 93 | 16 | 86 | 9 | 92 | 2 |
| AD-2138577.1 | 16 | 1 | 19 | 0 | 36 | 6 | AD-2138945.2 | 94 | 8 | 86 | 4 | 98 | 3 |
| AD-2138843.2 | 12 | 1 | 19 | 1 | 37 | 3 | AD-2139054.2 | 93 | 14 | 86 | 11 | 103 | 2 |
| AD-2138588.1 | 12 | 2 | 19 | 2 | 43 | 7 | AD-2138910.2 | 68 | 5 | 86 | 7 | 81 | 8 |
| AD-2138323.1 | 15 | 2 | 19 | 1 | 27 | 2 | AD-2139075.2 | 90 | 10 | 86 | 7 | 83 | 1 |
| AD-2138830.2 | 14 | 1 | 19 | 2 | 27 | 6 | AD-2138682.1 | 72 | 3 | 86 | 10 | 85 | 19 |
| AD-2138576.1 | 14 | 1 | 19 | 2 | 30 | 5 | AD-2139037.2 | 80 | 5 | 86 | 5 | 88 | 7 |
| AD-2138895.2 | 13 | 2 | 19 | 1 | 39 | 3 | AD-2139112.2 | 83 | 7 | 86 | 7 | 88 | 7 |
| AD-2138454.1 | 15 | 1 | 19 | 2 | 40 | 6 | AD-2138271.1 | 90 | 2 | 86 | 11 | 95 | 4 |
| AD-2138474.1 | 11 | 1 | 19 | 3 | 42 | 3 | AD-2139005.2 | 78 | 7 | 88 | 9 | 85 | 10 |
| AD-2138618.1 | 15 | 1 | 19 | 2 | 30 | 5 | AD-2139033.2 | 80 | 13 | 88 | 5 | 74 | 7 |
| AD-2138206.1 | 11 | 0 | 19 | 1 | 30 | 5 | AD-2138402.1 | 94 | 27 | 88 | 4 | 92 | 3 |
| AD-2138522.1 | 11 | 0 | 19 | 2 | 50 | 7 | AD-2138578.1 | 89 | 9 | 88 | 6 | 100 | 8 |
| AD-2138812.2 | 13 | 1 | 19 | 3 | 29 | 1 | AD-2138668.1 | 94 | 10 | 88 | 2 | 94 | 3 |
| AD-2138506.1 | 11 | 1 | 19 | 2 | 40 | 7 | AD-2139093.2 | 82 | 7 | 88 | 9 | 71 | 7 |
| AD-2138862.2 | 15 | 1 | 19 | 1 | 29 | 2 | AD-2139117.2 | 81 | 7 | 88 | 9 | 90 | 3 |
| AD-2138145.1 | 10 | 0 | 19 | 3 | 30 | 2 | AD-2139139.2 | 85 | 11 | 88 | 3 | 95 | 5 |
| AD-2138468.1 | 14 | 3 | 19 | 4 | 33 | 5 | AD-2138734.1 | 80 | 3 | 88 | 3 | 91 | 4 |
| AD-2138183.1 | 17 | 3 | 19 | 3 | 35 | 7 | AD-2138914.2 | 79 | 6 | 89 | 3 | 98 | 5 |
| AD-2138322.1 | 13 | 2 | 19 | 4 | 23 | 2 | AD-2139089.2 | 93 | 6 | 89 | 13 | 89 | 10 |
| AD-2138806.2 | 13 | 2 | 19 | 1 | 30 | 3 | AD-2139118.2 | 93 | 4 | 89 | 11 | 108 | 7 |
| AD-2138260.1 | 12 | 2 | 19 | 1 | 32 | 4 | AD-2139115.2 | 87 | 1 | 89 | 3 | 73 | 11 |
| AD-2138613.1 | 14 | 3 | 19 | 5 | 32 | 4 | AD-2138933.2 | 110 | 5 | 89 | 9 | 110 | 9 |
| AD-2138205.1 | 13 | 3 | 19 | 2 | 32 | 4 | AD-2138922.2 | 94 | 9 | 89 | 22 | 84 | 17 |
| AD-2138168.1 | 13 | 3 | 19 | 1 | 34 | 9 | AD-2138270.1 | 80 | 3 | 89 | 7 | 91 | 9 |
| AD-2138849.2 | 15 | 1 | 19 | 1 | 40 | 3 | AD-2139105.2 | 88 | 11 | 89 | 5 | 91 | 11 |
| AD-2138489.1 | 19 | 2 | 19 | 4 | 41 | 5 | AD-2138420.1 | 89 | 6 | 89 | 11 | 93 | 16 |
| AD-2138118.1 | 20 | 2 | 20 | 3 | 26 | 2 | AD-2139155.2 | 77 | 21 | 89 | 13 | 94 | 11 |
| AD-2138160.1 | 10 | 2 | 20 | 2 | 28 | 1 | AD-2139132.2 | 90 | 12 | 90 | 7 | 85 | 13 |
| AD-2138636.1 | 15 | 1 | 20 | 3 | 42 | 6 | AD-2139123.2 | 77 | 10 | 90 | 11 | 98 | 14 |
| AD-2138565.1 | 15 | 1 | 20 | 2 | 25 | 2 | AD-2139061.2 | 81 | 13 | 90 | 17 | 96 | 4 |
| AD-2138460.1 | 16 | 2 | 20 | 4 | 31 | 3 | AD-2139008.2 | 95 | 6 | 90 | 9 | 108 | 6 |
| AD-2138155.1 | 13 | 3 | 20 | 1 | 32 | 2 | AD-2138912.2 | 82 | 7 | 90 | 4 | 79 | 3 |
| AD-2138502.1 | 15 | 1 | 20 | 5 | 34 | 7 | AD-2138927.2 | 93 | 0 | 91 | 6 | 97 | 7 |
| AD-2138202.1 | 13 | 3 | 20 | 1 | 39 | 4 | AD-2138955.2 | 82 | 9 | 91 | 10 | 86 | 4 |
| AD-2138853.2 | 15 | 1 | 20 | 1 | 27 | 3 | AD-2139020.2 | 85 | 3 | 91 | 5 | 86 | 6 |
| AD-2138469.1 | 15 | 1 | 20 | 3 | 33 | 5 | AD-2138949.2 | 103 | 6 | 91 | 5 | 104 | 2 |
| AD-2138775.1 | 6 | 0 | 20 | 2 | 33 | 3 | AD-2139013.2 | 93 | 1 | 91 | 6 | 107 | 6 |
| AD-2138834.2 | 14 | 1 | 20 | 1 | 35 | 2 | AD-2139137.2 | 86 | 6 | 91 | 7 | 102 | 6 |
| AD-2138779.1 | 13 | 2 | 20 | 2 | 26 | 1 | AD-2138920.2 | 88 | 12 | 91 | 10 | 99 | 8 |
| AD-2138172.1 | 12 | 1 | 20 | 2 | 34 | 5 | AD-2139069.2 | 81 | 15 | 91 | 2 | 90 | 9 |
| AD-2138132.1 | 20 | 4 | 20 | 1 | 34 | 5 | AD-2139063.2 | 86 | 8 | 91 | 4 | 101 | 3 |
| AD-2138355.1 | 14 | 1 | 20 | 1 | 36 | 3 | AD-2139149.2 | 85 | 20 | 91 | 10 | 87 | 6 |
| AD-2138129.1 | 11 | 2 | 20 | 3 | 37 | 9 | AD-2139006.2 | 101 | 11 | 91 | 9 | 91 | 8 |
| AD-2138361.1 | 12 | 4 | 20 | 1 | 31 | 1 | AD-2139044.2 | 103 | 12 | 92 | 14 | 109 | 4 |
| AD-2138666.1 | 17 | 3 | 20 | 2 | 35 | 7 | AD-2138944.2 | 94 | 10 | 92 | 9 | 91 | 3 |
| AD-2138471.1 | 15 | 2 | 20 | 3 | 39 | 2 | AD-2138921.2 | 94 | 15 | 92 | 2 | 104 | 1 |
| AD-2138088.1 | 17 | 1 | 20 | 2 | 29 | 2 | AD-2139151.2 | 95 | 17 | 92 | 9 | 102 | 4 |
| AD-2138304.1 | 18 | 2 | 20 | 1 | 31 | 1 | AD-2138423.1 | 79 | 3 | 92 | 3 | 93 | 9 |
| AD-2138253.1 | 13 | 1 | 20 | 1 | 31 | 2 | AD-2138218.1 | 88 | 9 | 92 | 5 | 95 | 10 |
| AD-2138850.2 | 16 | 2 | 20 | 0 | 34 | 3 | AD-2139021.2 | 86 | 4 | 93 | 5 | 89 | 5 |
| AD-2138245.1 | 15 | 1 | 20 | 0 | 38 | 1 | AD-2138978.2 | 97 | 7 | 93 | 6 | 106 | 7 |
| AD-2138225.1 | 14 | 3 | 20 | 2 | 28 | 1 | AD-2139119.2 | 84 | 11 | 93 | 9 | 87 | 7 |
| AD-2138369.1 | 16 | 4 | 20 | 4 | 33 | 2 | AD-2138963.2 | 84 | 4 | 93 | 6 | 105 | 5 |
| AD-2138470.1 | 17 | 1 | 20 | 6 | 33 | 4 | AD-2138918.2 | 95 | 15 | 93 | 10 | 112 | 1 |
| AD-2138509.1 | 16 | 2 | 20 | 3 | 52 | 2 | AD-2138990.2 | 82 | 5 | 93 | 8 | 94 | 3 |
| AD-2138563.1 | 17 | 3 | 20 | 1 | 29 | 6 | AD-2138923.2 | 95 | 12 | 93 | 11 | 98 | 5 |
| AD-2138117.1 | 19 | 3 | 20 | 4 | 31 | 7 | AD-2139007.2 | 90 | 13 | 93 | 7 | 94 | 19 |
| AD-2138831.2 | 16 | 3 | 20 | 3 | 39 | 4 | AD-2139087.2 | 91 | 14 | 93 | 5 | 100 | 6 |
| AD-2138847.2 | 15 | 1 | 20 | 1 | 69 | 2 | AD-2139116.2 | 99 | 8 | 93 | 17 | 104 | 12 |
| AD-2138178.1 | 17 | 1 | 21 | 2 | 25 | 5 | AD-2138939.2 | 94 | 7 | 94 | 2 | 92 | 4 |
| AD-2138587.1 | 15 | 2 | 21 | 2 | 31 | 5 | AD-2138673.1 | 89 | 3 | 94 | 1 | 95 | 10 |
| AD-2138089.1 | 18 | 5 | 21 | 1 | 35 | 4 | AD-2139068.2 | 85 | 2 | 94 | 6 | 96 | 6 |
| AD-2138080.1 | 14 | 2 | 21 | 3 | 37 | 3 | AD-2138917.2 | 92 | 6 | 94 | 8 | 90 | 2 |
| AD-2138501.1 | 14 | 5 | 21 | 8 | 22 | 0 | AD-2138388.1 | 109 | 14 | 94 | 1 | 91 | 10 |
| AD-2138353.1 | 13 | 3 | 21 | 4 | 31 | 2 | AD-2138220.1 | 90 | 8 | 94 | 6 | 101 | 13 |
| AD-2138169.1 | 13 | 2 | 21 | 2 | 40 | 3 | AD-2138953.2 | 90 | 4 | 94 | 11 | 100 | 3 |
| AD-2138485.1 | 14 | 2 | 21 | 1 | 35 | 7 | AD-2139038.2 | 85 | 3 | 94 | 4 | 94 | 8 |
| AD-2138254.1 | 12 | 4 | 21 | 3 | 31 | 5 | AD-2139023.2 | 94 | 5 | 94 | 5 | 95 | 3 |
| AD-2138467.1 | 15 | 2 | 21 | 5 | 34 | 3 | AD-2138919.2 | 94 | 4 | 94 | 13 | 98 | 4 |
| AD-2138458.1 | 15 | 1 | 21 | 4 | 41 | 10 | AD-2138947.2 | 88 | 10 | 94 | 6 | 92 | 5 |
| AD-2138570.1 | 16 | 2 | 21 | 1 | 51 | 12 | AD-2139100.2 | 87 | 4 | 94 | 7 | 96 | 7 |
| AD-2138181.1 | 15 | 1 | 21 | 2 | 25 | 3 | AD-2138952.2 | 98 | 5 | 94 | 4 | 97 | 9 |
| AD-2138434.1 | 15 | 1 | 21 | 2 | 33 | 4 | AD-2139045.2 | 91 | 3 | 95 | 5 | 90 | 6 |
| AD-2138851.2 | 18 | 2 | 21 | 1 | 34 | 2 | AD-2139082.2 | 97 | 13 | 95 | 2 | 99 | 3 |
| AD-2138213.1 | 14 | 1 | 21 | 3 | 38 | 5 | AD-2139057.2 | 95 | 3 | 95 | 7 | 100 | 2 |
| AD-2138199.1 | 14 | 3 | 21 | 2 | 39 | 6 | AD-2139062.2 | 86 | 12 | 95 | 2 | 102 | 8 |
| AD-2138279.1 | 16 | 2 | 21 | 2 | 42 | 2 | AD-2139030.2 | 96 | 8 | 95 | 5 | 102 | 7 |
| AD-2138105.1 | 14 | 1 | 21 | 4 | 24 | 4 | AD-2138378.1 | 88 | 7 | 95 | 6 | 101 | 10 |
| AD-2138240.1 | 17 | 0 | 21 | 1 | 37 | 3 | AD-2139047.2 | 92 | 7 | 95 | 4 | 103 | 4 |
| AD-2138604.1 | 15 | 1 | 21 | 2 | 55 | 5 | AD-2138969.2 | 92 | 9 | 96 | 3 | 97 | 4 |
| AD-2138103.1 | 18 | 2 | 21 | 2 | 34 | 6 | AD-2138929.2 | 95 | 3 | 96 | 4 | 97 | 7 |
| AD-2138530.1 | 18 | 3 | 21 | 3 | 38 | 9 | AD-2138592.1 | 99 | 3 | 96 | 3 | 112 | 3 |
| AD-2138236.1 | 16 | 3 | 21 | 1 | 39 | 7 | AD-2138916.2 | 98 | 11 | 96 | 5 | 104 | 5 |
| AD-2138776.1 | 16 | 2 | 21 | 2 | 29 | 5 | AD-2139027.2 | 97 | 5 | 96 | 12 | 107 | 3 |
| AD-2138686.1 | 18 | 1 | 21 | 0 | 31 | 6 | AD-2139114.2 | 93 | 7 | 96 | 5 | 97 | 6 |
| AD-2138151.1 | 13 | 2 | 21 | 2 | 32 | 3 | AD-2138979.2 | 85 | 6 | 96 | 10 | 116 | 16 |
| AD-2138116.1 | 17 | 1 | 22 | 4 | 28 | 2. | AD-2139104.2 | 92 | 9 | 97 | 4 | 99 | 12 |
| AD-2138852.2 | 18 | 1 | 22 | 2 | 32 | 2 | AD-2138561.1 | 95 | 6 | 97 | 3 | 99 | 3 |
| AD-2138672.1 | 21 | 3 | 22 | 2 | 41 | 6 | AD-2138408.1 | 100 | 8 | 97 | 9 | 95 | 2 |
| AD-2138829.2 | 14 | 1 | 22 | 3 | 42 | 3 | AD-2138935.2 | 91 | 8 | 97 | 16 | 94 | 8 |
| AD-2138127.1 | 13 | 2 | 22 | 2 | 32 | 8 | AD-2139148.2 | 95 | 14 | 97 | 7 | 97 | 5 |
| AD-2138698.1 | 19 | 3 | 22 | 4 | 59 | 5 | AD-2139106.2 | 89 | 13 | 97 | 3 | 99 | 4 |
| AD-2138150.1 | 17 | 2 | 22 | 1 | 34 | 8 | AD-2139076.2 | 93 | 12 | 97 | 4 | 102 | 3 |
| AD-2138234.1 | 19 | 3 | 22 | 1 | 36 | 5 | AD-2138422.1 | 79 | 8 | 97 | 7 | 100 | 2 |
| AD-2138800.2 | 17 | 1 | 22 | 3 | 36 | 3 | AD-2139071.2 | 82 | 10 | 97 | 5 | 104 | 3 |
| AD-2138184.1 | 18 | 1 | 22 | 2 | 37 | 5 | AD-2138418.1 | 101 | 11 | 98 | 9 | 86 | 13 |
| AD-2138373.1 | 11 | 1 | 22 | 4 | 26 | 2 | AD-2138994.2 | 98 | 7 | 98 | 4 | 97 | 15 |
| AD-2138110.1 | 15 | 1 | 22 | 2 | 34 | 4 | AD-2139039.2 | 83 | 11 | 98 | 3 | 97 | 3 |
| AD-2138416.1 | 18 | 3 | 22 | 2 | 37 | 4 | AD-2138992.2 | 95 | 6 | 98 | 5 | 107 | 4 |
| AD-2138611.1 | 18 | 2 | 22 | 2 | 25 | 6 | AD-2138958.2 | 92 | 9 | 98 | 2 | 96 | 6 |
| AD-2138446.1 | 15 | 2 | 22 | 2 | 32 | 3 | AD-2138942.2 | 87 | 2 | 98 | 12 | 99 | 7 |
| AD-2138173.1 | 14 | 2 | 22 | 1 | 35 | 8 | AD-2139107.2 | 92 | 7 | 98 | 11 | 93 | 6 |
| AD-2138123.1 | 14 | 2 | 22 | 3 | 37 | 8 | AD-2138964.2 | 106 | 9 | 98 | 9 | 108 | 11 |
| AD-2138499.1 | 16 | 3 | 22 | 6 | 39 | 5 | AD-2139091.2 | 80 | 2 | 98 | 8 | 86 | 5 |
| AD-2138619.1 | 17 | 2 | 22 | 1 | 59 | 13 | AD-2138931.2 | 98 | 5 | 99 | 5 | 101 | 3 |
| AD-2138249.1 | 16 | 3 | 22 | 3 | 43 | 3 | AD-2138976.2 | 95 | 7 | 99 | 1 | 99 | 8 |
| AD-2138268.1 | 13 | 1 | 22 | 1 | 44 | 4 | AD-2139070.2 | 96 | 8 | 99 | 10 | 99 | 8 |
| AD-2138639.1 | 17 | 2 | 22 | 3 | 29 | 3 | AD-2138410.1 | 109 | 1 | 99 | 1 | 106 | 10 |
| AD-2138223.1 | 17 | 3 | 22 | 4 | 29 | 1 | AD-2138962.2 | 95 | 9 | 99 | 8 | 116 | 4 |
| AD-2138702.1 | 12 | 1 | 22 | 5 | 39 | 6 | AD-2139056.2 | 96 | 10 | 99 | 12 | 109 | 7 |
| AD-2138516.1 | 17 | 2 | 22 | 3 | 29 | 2 | AD-2138998.2 | 107 | 4 | 99 | 3 | 103 | 9 |
| AD-2138398.1 | 24 | 5 | 22 | 3 | 32 | 4 | AD-2138948.2 | 96 | 7 | 100 | 2 | 103 | 11 |
| AD-2138204.1 | 15 | 2 | 22 | 2 | 35 | 3 | AD-2139059.2 | 95 | 8 | 100 | 13 | 99 | 6 |
| AD-2138510.1 | 16 | 2 | 22 | 3 | 38 | 5 | AD-2139090.2 | 95 | 16 | 100 | 8 | 108 | 11 |
| AD-2138648.1 | 17 | 1 | 22 | 2 | 42 | 3 | AD-2138961.2 | 98 | 11 | 100 | 3 | 92 | 12 |
| AD-2138814.2 | 17 | 2 | 22 | 3 | 33 | 5 | AD-2138937.2 | 100 | 10 | 100 | 3 | 100 | 4 |
| AD-2138250.1 | 14 | 3 | 22 | 2 | 38 | 3 | AD-2139138.2 | 99 | 11 | 100 | 10 | 119 | 11 |
| AD-2138358.1 | 18 | 3 | 22 | 4 | 44 | 10 | AD-2139041.2 | 89 | 19 | 100 | 6 | 94 | 3 |
| AD-2138232.1 | 18 | 4 | 23 | 1 | 40 | 4 | AD-2139012.2 | 99 | 2 | 101 | 4 | 103 | 4 |
| AD-2138128.1 | 12 | 2 | 23 | 1 | 29 | 0 | AD-2138928.2 | 92 | 12 | 101 | 10 | 109 | 3 |
| AD-2138527.1 | 15 | 2 | 23 | 3 | 43 | 7 | AD-2139043.2 | 96 | 5 | 101 | 8 | 98 | 5 |
| AD-2138258.1 | 17 | 2 | 23 | 2 | 44 | 8 | AD-2138984.2 | 101 | 4 | 101 | 5 | 106 | 4 |
| AD-2138068.1 | 16 | 3 | 23 | 3 | 29 | 3 | AD-2139022.2 | 102 | 9 | 101 | 3 | 110 | 4 |
| AD-2138564.1 | 22 | 4 | 23 | 1 | 32 | 3 | AD-2139136.2 | 96 | 10 | 101 | 9 | 100 | 4 |
| AD-2138149.1 | 19 | 2 | 23 | 1 | 37 | 2 | AD-2139029.2 | 90 | 5 | 101 | 2 | 94 | 7 |
| AD-2138106.1 | 14 | 1 | 23 | 4 | 40 | 7 | AD-2139077.2 | 93 | 16 | 101 | 3 | 107 | 2 |
| AD-2138669.1 | 19 | 4 | 23 | 0 | 40 | 9 | AD-2138965.2 | 95 | 5 | 101 | 4 | 102 | 10 |
| AD-2138346.1 | 14 | 3 | 23 | 2 | 41 | 2 | AD-2138932.2 | 111 | 9 | 101 | 2 | 108 | 10 |
| AD-2138719.1 | 17 | 4 | 23 | 2 | 43 | 4 | AD-2138967.2 | 100 | 7 | 102 | 9 | 102 | 1 |
| AD-2138193.1 | 15 | 2 | 23 | 2 | 46 | 7 | AD-2138950.2 | 92 | 23 | 102 | 11 | 114 | 3 |
| AD-2138099.1 | 14 | 1 | 23 | 2 | 33 | 5 | AD-2138996.2 | 95 | 1 | 102 | 0 | 98 | 12 |
| AD-2138313.1 | 18 | 3 | 23 | 1 | 34 | 5 | AD-2138982.2 | 94 | 7 | 102 | 7 | 101 | 3 |
| AD-2138159.1 | 14 | 2 | 23 | 2 | 47 | 6 | AD-2139015.2 | 99 | 4 | 102 | 4 | 101 | 9 |
| AD-2138671.1 | 20 | 3 | 23 | 1 | 35 | 6 | AD-2138930.2 | 99 | 14 | 102 | 2 | 108 | 6 |
| AD-2138366.1 | 21 | 3 | 23 | 3 | 41 | 2 | AD-2138951.2 | 99 | 10 | 102 | 7 | 97 | 7 |
| AD-2138156.1 | 16 | 1 | 23 | 2 | 41 | 7 | AD-2138966.2 | 91 | 8 | 102 | 12 | 112 | 6 |
| AD-2138780.1 | 18 | 2 | 23 | 2 | 49 | 5 | AD-2139073.2 | 88 | 4 | 103 | 5 | 97 | 8 |
| AD-2138053.1 | 14 | 1 | 23 | 3 | 34 | 4 | AD-2139028.2 | 102 | 10 | 103 | 5 | 111 | 2 |
| AD-2138324.1 | 17 | 3 | 23 | 4 | 34 | 1 | AD-2139014.2 | 96 | 6 | 103 | 11 | 97 | 2 |
| AD-2138381.1 | 17 | 3 | 23 | 2 | 36 | 6 | AD-2138999.2 | 106 | 4 | 103 | 7 | 112 | 2 |
| AD-2138071.1 | 20 | 3 | 23 | 3 | 29 | 3 | AD-2139060.2 | 98 | 13 | 103 | 10 | 103 | 5 |
| AD-2138610.1 | 17 | 1 | 23 | 3 | 43 | 3 | AD-2139074.2 | 101 | 12 | 103 | 6 | 109 | 4 |
| AD-2138158.1 | 12 | 2 | 24 | 3 | 32 | 3 | AD-2139084.2 | 98 | 9 | 103 | 6 | 113 | 4 |
| AD-2138054.1 | 15 | 1 | 24 | 3 | 43 | 8 | AD-2139009.2 | 94 | 9 | 103 | 8 | 105 | 8 |
| AD-2138819.2 | 17 | 1 | 24 | 1 | 48 | 3 | AD-2138425.1 | 113 | 8 | 104 | 8 | 106 | 16 |
| AD-2138473.1 | 18 | 1 | 24 | 2 | 53 | 1 | AD-2139150.2 | 103 | 4 | 104 | 3 | 108 | 4 |
| AD-2138386.1 | 16 | 2 | 24 | 3 | 34 | 2 | AD-2139120.2 | 100 | 14 | 104 | 1 | 109 | 10 |
| AD-2138269.1 | 14 | 2 | 24 | 2 | 35 | 3 | AD-2139085.2 | 100 | 10 | 104 | 5 | 96 | 5 |
| AD-2138820.2 | 17 | 1 | 24 | 1 | 39 | 5 | AD-2139040.2 | 87 | 12 | 104 | 5 | 99 | 3 |
| AD-2138405.1 | 17 | 1 | 24 | 2 | 43 | 1 | AD-2139122.2 | 102 | 18 | 104 | 10 | 100 | 7 |
| AD-2138899.2 | 18 | 1 | 24 | 3 | 43 | 2 | AD-2139025.2 | 102 | 10 | 104 | 6 | 104 | 6 |
| AD-2138352.1 | 17 | 3 | 24 | 3 | 43 | 6 | AD-2139102.2 | 91 | 8 | 104 | 6 | 102 | 7 |
| AD-2138603.1 | 18 | 1 | 24 | 3 | 51 | 2 | AD-2139153.2 | 101 | 14 | 105 | 6 | 108 | 4 |
| AD-2138247.1 | 18 | 3 | 24 | 2 | 52 | 8 | AD-2138991.2 | 97 | 11 | 105 | 8 | 111 | 4 |
| AD-2138069.1 | 16 | 2 | 24 | 3 | 29 | 2 | AD-2138296.1 | 113 | 20 | 105 | 7 | 107 | 7 |
| AD-2138048.1 | 14 | 2 | 24 | 4 | 34 | 3 | AD-2138981.2 | 105 | 4 | 105 | 2 | 100 | 15 |
| AD-2138126.1 | 15 | 1 | 24 | 5 | 35 | 2 | AD-2138983.2 | 92 | 8 | 106 | 4 | 104 | 9 |
| AD-2138147.1 | 16 | 1 | 24 | 4 | 41 | 5 | AD-2139024.2 | 100 | 4 | 106 | 4 | 105 | 12 |
| AD-2138778.1 | 14 | 1 | 24 | 2 | 48 | 4 | AD-2139058.2 | 108 | 8 | 106 | 3 | 113 | 4 |
| AD-2138191.1 | 20 | 5 | 24 | 2 | 35 | 2 | AD-2139026.2 | 105 | 14 | 106 | 6 | 107 | 7 |
| AD-2138574.1 | 18 | 3 | 24 | 4 | 36 | 10 | AD-2138934.2 | 100 | 12 | 106 | 6 | 92 | 4 |
| AD-2138900.2 | 21 | 1 | 24 | 0 | 49 | 8 | AD-2138968.2 | 102 | 11 | 106 | 9 | 103 | 8 |
| AD-2138107.1 | 16 | 6 | 24 | 4 | 35 | 6 | AD-2139042.2 | 95 | 4 | 106 | 13 | 104 | 11 |
| AD-2138316.1 | 16 | 3 | 24 | 1 | 39 | 6 | AD-2139072.2 | 94 | 11 | 106 | 11 | 107 | 11 |
| AD-2138207.1 | 19 | 4 | 24 | 2 | 43 | 1 | AD-2138959.2 | 98 | 10 | 107 | 5 | 99 | 2 |
| AD-2138573.1 | 13 | 2 | 24 | 2 | 39 | 4 | AD-2138936.2 | 97 | 5 | 107 | 6 | 102 | 10 |
| AD-2138045.1 | 20 | 1 | 24 | 3 | 34 | 2 | AD-2139046.2 | 99 | 4 | 107 | 6 | 103 | 2 |
| AD-2138413.1 | 22 | 3 | 24 | 1 | 35 | 7 | AD-2138997.2 | 97 | 5 | 108 | 9 | 99 | 11 |
| AD-2138192.1 | 13 | 2 | 25 | 1 | 30 | 4 | AD-2138993.2 | 99 | 4 | 108 | 6 | 106 | 8 |
| AD-2138176.1 | 16 | 2 | 25 | 2 | 35 | 4 | AD-2139011.2 | 96 | 3 | 108 | 5 | 91 | 5 |
| AD-2138861.2 | 20 | 2 | 25 | 1 | 70 | 4 | AD-2138946.2 | 89 | 7 | 108 | 10 | 95 | 2 |
| AD-2138157.1 | 16 | 2 | 25 | 2 | 30 | 2 | AD-2138960.2 | 98 | 5 | 108 | 6 | 111 | 2 |
| AD-2138049.1 | 16 | 2 | 25 | 4 | 34 | 2 | AD-2138995.2 | 104 | 7 | 108 | 8 | 111 | 8 |
| AD-2138170.1 | 14 | 2 | 25 | 5 | 37 | 5 | AD-2139152.2 | 116 | 15 | 110 | 15 | 104 | 11 |
| AD-2138359.1 | 13 | 1 | 25 | 1 | 39 | 4 | AD-2138980.2 | 101 | 18 | 110 | 7 | 97 | 9 |
| AD-2138182.1 | 18 | 2 | 25 | 1 | 43 | 4 | AD-2139031.2 | 103 | 4 | 115 | 3 | 105 | 4 |
| AD-2138594.1 | 16 | 1 | 25 | 2 | 44 | 2 | AD-2139154.2 | 109 | 25 | 116 | 2 | 111 | 7 |
| AD-2138093.1 | 18 | 4 | 25 | 4 | 34 | 5 | AD-2139088.2 | 101 | 2 | 116 | 14 | 113 | 3 |
| AD-2138657.1 | 23 | 4 | 25 | 1 | 36 | 0 | AD-2139086.2 | 94 | 16 | 117 | 18 | 108 | 7 |
| AD-2138384.1 | 21 | 4 | 25 | 2 | 38 | 3 | AD-2139010.2 | 101 | 8 | 126 | 35 | 96 | 8 |

TABLE 12A
PCH Free Uptake Log Concentration

| | | | |
|---|---|---|---|
| AD-2315874.2 | AD-2315875.2 | AD-2315876.2 | AD-2315877.2 |

| siRNA | Log | % Message | | % Message | | % Message | | % Message | |
|---|---|---|---|---|---|---|---|---|---|
| Conc. (nM) | Conc. | Remaining | SD | Remaining | SD | Remaining | SD | Remaining | SD |
| 250 | 2 | 11 | 1 | 19 | 2 | 11 | 2 | 19 | 2 |
| 25 | 1 | 18 | 3 | 25 | 3 | 16 | 1 | 31 | 4 |
| 2.5 | 0 | 44 | 5 | 45 | 2 | 41 | 2 | 51 | 0 |
| 0.25 | −1 | 76 | 5 | 79 | 6 | 75 | 6 | 83 | 11 |
| 0.025 | −2 | 91 | 8 | 90 | 8 | 92 | 8 | 83 | 12 |
| 0.0025 | −3 | 90 | 8 | 84 | 4 | 88 | 4 | 71 | 7 |
| 0.00025 | −4 | 98 | 8 | 93 | 4 | 93 | 5 | 74 | 5 |
| 0.000025 | −5 | 98 | 8 | 101 | 7 | 99 | 7 | 94 | 2 |
| 0.0000025 | −6 | 99 | 1 | 102 | 10 | 99 | 13 | 95 | 9 |
| 0.00000025 | −7 | 104 | 5 | 98 | 10 | 107 | 6 | 97 | 6 |

| | | |
|---|---|---|
| AD-2315878.2 | AD-2315879.2 | AD-2315880.2 |

| siRNA | % Message | | % Message | | % Message | |
|---|---|---|---|---|---|---|
| Conc. (nM) | Remaining | SD | Remaining | SD | Remaining | SD |
| 250 | 16 | 1 | 40 | 4 | 27 | 3 |
| 25 | 26 | 4 | 52 | 8 | 39 | 1 |
| 2.5 | 49 | 4 | 72 | 12 | 68 | 3 |
| 0.25 | 77 | 6 | 87 | 12 | 90 | 6 |
| 0.025 | 87 | 10 | 96 | 6 | 87 | 8 |
| 0.0025 | 68 | 1 | 84 | 12 | 92 | 9 |
| 0.00025 | 77 | 8 | 87 | 11 | 98 | 10 |
| 0.000025 | 88 | 12 | 96 | 9 | 102 | 14 |
| 0.0000025 | 95 | 11 | 101 | 8 | 91 | 7 |
| 0.00000025 | 95 | 5 | 98 | 4 | 102 | 3 |

| | | | |
|---|---|---|---|
| AD-2315881.2 | AD-2315882.2 | AD-2315883.2 | AD-2315884.2 |

| siRNA | Log | % Message | | % Message | | % Message | | % Message | |
|---|---|---|---|---|---|---|---|---|---|
| Conc. (nM) | Conc. | Remaining | SD | Remaining | SD | Remaining | SD | Remaining | SD |
| 250 | 2 | 49 | 2 | 30 | 3 | 36 | 5 | 28 | 4 |
| 25 | 1 | 55 | 5 | 39 | 2 | 44 | 5 | 35 | 6 |
| 2.5 | 0 | 65 | 15 | 62 | 7 | 68 | 10 | 56 | 7 |
| 0.25 | −1 | 84 | 13 | 78 | 2 | 80 | 3 | 73 | 9 |
| 0.025 | −2 | 83 | 11 | 86 | 9 | 87 | 7 | 71 | 10 |
| 0.0025 | −3 | 79 | 3 | 77 | 11 | 77 | 11 | 64 | 2 |
| 0.00025 | −4 | 85 | 9 | 84 | 6 | 86 | 16 | 67 | 3 |
| 0.000025 | −5 | 87 | 7 | 84 | 4 | 90 | 8 | 85 | 5 |
| 0.0000025 | −6 | 95 | 4 | 96 | 5 | 97 | 8 | 90 | 10 |
| 0.00000025 | −7 | 95 | 7 | 89 | 2 | 87 | 6 | 89 | 6 |

| | AD-2315885.2 | | AD-2315886.2 | | AD-2315887.2 | |
|---|---|---|---|---|---|---|
| siRNA | % Message | | % Message | | % Message | |
| Conc. (nM) | Remaining | SD | Remaining | SD | Remaining | SD |
| 250 | 18 | 1 | 29 | 0 | 37 | 5 |
| 25 | 25 | 2 | 42 | 5 | 46 | 6 |
| 2.5 | 44 | 6 | 64 | 12 | 68 | 2 |
| 0.25 | 69 | 9 | 81 | 12 | 82 | 8 |
| 0.025 | 82 | 4 | 84 | 4 | 83 | 9 |
| 0.0025 | 64 | 0 | 73 | 7 | 81 | 9 |
| 0.00025 | 70 | 6 | 82 | 7 | 91 | 7 |
| 0.000025 | 83 | 6 | 88 | 9 | 85 | 8 |
| 0.0000025 | 97 | 14 | 95 | 17 | 94 | 15 |
| 0.00000025 | 96 | 15 | 96 | 13 | 93 | 5 |

TABLE 12B
PHH Free Uptake Log Concentration

| | | | |
|---|---|---|---|
| AD-2315874.2 | AD-2315875.2 | AD-2315876.2 | AD-2315877.2 |

| siRNA | Log | % Message | | % Message | | % Message | | % Message | |
|---|---|---|---|---|---|---|---|---|---|
| Conc. (nM) | Conc. | Remaining | SD | Remaining | SD | Remaining | SD | Remaining | SD |
| 250 | 2 | 6 | 2 | 12 | 2 | 8 | 1 | 8 | 2 |
| 25 | 1 | 16 | 2 | 19 | 3 | 21 | 2 | 18 | 2 |
| 2.5 | 0 | 35 | 8 | 49 | 7 | 49 | 10 | 51 | 3 |
| 0.25 | −1 | 88 | 15 | 79 | 7 | 91 | 7 | 89 | 6 |
| 0.025 | −2 | 106 | 6 | 95 | 7 | 99 | 10 | 115 | 10 |
| 0.0025 | −3 | 102 | 15 | 102 | 15 | 113 | 7 | 117 | 8 |
| 0.00025 | −4 | 96 | 5 | 94 | 9 | 97 | 12 | 119 | 16 |
| 0.000025 | −5 | 94 | 1 | 99 | 12 | 93 | 18 | 115 | 14 |
| 0.0000025 | −6 | 87 | 7 | 93 | 5 | 92 | 13 | 115 | 8 |
| 0.00000025 | −7 | 95 | 4 | 110 | 16 | 109 | 10 | 113 | 3 |

| | | |
|---|---|---|
| AD-2315878.2 | AD-2315879.2 | AD-2315880.2 |

| siRNA | % Message | | % Message | | % Message | |
|---|---|---|---|---|---|---|
| Conc. (nM) | Remaining | SD | Remaining | SD | Remaining | SD |
| 250 | 8 | 0 | 36 | 4 | 19 | 3 |
| 25 | 24 | 1 | 59 | 5 | 38 | 2 |
| 2.5 | 63 | 6 | 86 | 1 | 77 | 9 |
| 0.25 | 95 | 4 | 112 | 8 | 105 | 5 |
| 0.025 | 109 | 11 | 119 | 6 | 116 | 9 |
| 0.0025 | 115 | 8 | 117 | 9 | 122 | 5 |
| 0.00025 | 111 | 7 | 123 | 10 | 124 | 1 |
| 0.000025 | 111 | 7 | 120 | 9 | 118 | 2 |
| 0.0000025 | 105 | 15 | 109 | 11 | 122 | 9 |
| 0.00000025 | 120 | 7 | 121 | 8 | 122 | 11 |

| | | | |
|---|---|---|---|
| AD-2315881.2 | AD-2315882.2 | AD-2315883.2 | AD-2315884.2 |

| siRNA | Log | % Message | | % Message | | % Message | | % Message | |
|---|---|---|---|---|---|---|---|---|---|
| Conc. (nM) | Conc. | Remaining | SD | Remaining | SD | Remaining | SD | Remaining | SD |
| 250 | 2 | 35 | 4 | 26 | 4 | 24 | 3 | 15 | 2 |
| 25 | 1 | 60 | 8 | 47 | 4 | 50 | 3 | 38 | 7 |
| 2.5 | 0 | 84 | 7 | 83 | 8 | 81 | 9 | 79 | 8 |
| 0.25 | −1 | 101 | 14 | 100 | 6 | 115 | 6 | 109 | 5 |
| 0.025 | −2 | 89 | 12 | 118 | 3 | 118 | 5 | 126 | 7 |
| 0.0025 | −3 | 117 | 13 | 108 | 20 | 119 | 6 | 116 | 8 |
| 0.00025 | −4 | 97 | 18 | 99 | 8 | 101 | 16 | 130 | 8 |
| 0.000025 | −5 | 93 | 3 | 101 | 14 | 105 | 18 | 131 | 16 |
| 0.0000025 | −6 | 99 | 6 | 105 | 12 | 103 | 5 | 127 | 7 |
| 0.00000025 | −7 | 103 | 17 | 98 | 21 | 118 | 6 | 118 | 18 |

| | AD-2315885.2 | | AD-2315886.2 | | AD-2315887.2 | |
|---|---|---|---|---|---|---|
| siRNA | % Message | | % Message | | % Message | |
| Conc. (nM) | Remaining | SD | Remaining | SD | Remaining | SD |
| 250 | 16 | 2 | 17 | 3 | 21 | 2 |
| 25 | 38 | 8 | 36 | 10 | 48 | 1 |
| 2.5 | 78 | 13 | 81 | 7 | 83 | 15 |
| 0.25 | 96 | 18 | 116 | 7 | 108 | 15 |
| 0.025 | 119 | 6 | 120 | 13 | 120 | 7 |
| 0.0025 | 114 | 8 | 112 | 17 | 121 | 10 |
| 0.00025 | 113 | 11 | 113 | 9 | 124 | 9 |
| 0.000025 | 121 | 11 | 124 | 8 | 132 | 13 |
| 0.0000025 | 116 | 11 | 128 | 10 | 133 | 16 |
| 0.00000025 | 116 | 16 | 121 | 15 | 131 | 3 |

TABLE 12C
PHH Transfection Log Concentration

| | | | |
|---|---|---|---|
| AD-2315874.2 | AD-2315875.2 | AD-2315876.2 | AD-2315877.2 |

| siRNA | Log | % Message | | % Message | | % Message | | % Message | |
|---|---|---|---|---|---|---|---|---|---|
| Conc. (nM) | Conc. | Remaining | SD | Remaining | SD | Remaining | SD | Remaining | SD |
| 10 | 1 | 12 | 2 | 14 | 4 | 14 | 3 | 20 | 4 |
| 1 | 0 | 19 | 3 | 19 | 6 | 16 | 4 | 26 | 3 |
| 0.1 | −1 | 31 | 2 | 38 | 7 | 33 | 8 | 38 | 6 |
| 0.01 | −2 | 89 | 26 | 83 | 22 | 77 | 10 | 76 | 13 |
| 0.001 | −3 | 117 | 26 | 125 | 30 | 105 | 40 | 117 | 27 |
| 0.0001 | −4 | 107 | 26 | 82 | 13 | 120 | 20 | 107 | 19 |
| 0.00001 | −5 | 126 | 32 | 112 | 33 | 108 | 41 | 127 | 31 |
| 0.000001 | −6 | 96 | 4 | 121 | 19 | 98 | 22 | 135 | 23 |
| 0.0000001 | −7 | 85 | 14 | 93 | 17 | 114 | 11 | 132 | 21 |
| 0.00000001 | −8 | 83 | 9 | 106 | 20 | 100 | 17 | 118 | 25 |

| | | |
|---|---|---|
| AD-2315878.2 | AD-2315879.2 | AD-2315880.2 |

| siRNA | % Message | | % Message | | % Message | |
|---|---|---|---|---|---|---|
| Conc. (nM) | Remaining | SD | Remaining | SD | Remaining | SD |
| 10 | 18 | 4 | 26 | 4 | 21 | 2 |
| 1 | 17 | 2 | 38 | 8 | 29 | 6 |
| 0.1 | 41 | 7 | 71 | 17 | 46 | 10 |
| 0.01 | 98 | 22 | 124 | 9 | 127 | 32 |
| 0.001 | 132 | 9 | 119 | 27 | 135 | 7 |
| 0.0001 | 110 | 25 | 112 | 11 | 123 | 21 |
| 0.00001 | 107 | 15 | 150 | 12 | 108 | 28 |
| 0.000001 | 128 | 15 | 141 | 16 | 121 | 18 |
| 0.0000001 | 103 | 23 | 99 | 8 | 92 | 17 |
| 0.00000001 | 119 | 15 | 112 | 22 | 144 | 11 |

| | | | |
|---|---|---|---|
| AD-2315881.2 | AD-2315882.2 | AD-2315883.2 | AD-2315884.2 |

| siRNA | Log | % Message | | % Message | | % Message | | % Message | |
|---|---|---|---|---|---|---|---|---|---|
| Conc. (nM) | Conc. | Remaining | SD | Remaining | SD | Remaining | SD | Remaining | SD |
| 10 | 1 | 25 | 4 | 16 | 1 | 21 | 2 | 22 | 3 |
| 1 | 0 | 31 | 8 | 19 | 3 | 29 | 3 | 22 | 4 |
| 0.1 | −1 | 58 | 12 | 42 | 6 | 55 | 8 | 48 | 6 |
| 0.01 | −2 | 87 | 21 | 80 | 5 | 94 | 15 | 92 | 5 |
| 0.001 | −3 | 100 | 21 | 97 | 16 | 102 | 11 | 104 | 20 |
| 0.0001 | −4 | 89 | 17 | 89 | 22 | 112 | 15 | 116 | 9 |
| 0.00001 | −5 | 98 | 23 | 118 | 2 | 107 | 9 | 115 | 11 |
| 0.000001 | −6 | 84 | 21 | 85 | 22 | 107 | 6 | 115 | 19 |
| 0.0000001 | −7 | 93 | 12 | 105 | 7 | 102 | 13 | 121 | 8 |
| 0.00000001 | −8 | 103 | 4 | 100 | 10 | 104 | 13 | 110 | 6 |

| | AD-2315885.2 | | AD-2315886.2 | | AD-2315887.2 | |
|---|---|---|---|---|---|---|
| siRNA | % Message | | % Message | | % Message | |
| Conc. (nM) | Remaining | SD | Remaining | SD | Remaining | SD |
| 10 | 18 | 2 | 17 | 2 | 20 | 1 |
| 1 | 19 | 1 | 25 | 4 | 23 | 2 |
| 0.1 | 42 | 5 | 44 | 5 | 47 | 13 |
| 0.01 | 87 | 11 | 91 | 11 | 89 | 13 |
| 0.001 | 110 | 9 | 104 | 19 | 95 | 17 |
| 0.0001 | 104 | 22 | 103 | 16 | 105 | 15 |
| 0.00001 | 115 | 6 | 109 | 17 | 102 | 22 |
| 0.000001 | 111 | 16 | 100 | 16 | 105 | 14 |
| 0.0000001 | 111 | 7 | 110 | 8 | 106 | 26 |
| 0.00000001 | 109 | 10 | 108 | 9 | 122 | 11 |

TABLE 13
LogIC50 for PCH Free Uptake, PHH
Free Uptake, and PHH Transfection

| | PCH Free | PHH Free | PHH |
|---|---|---|---|
| | Uptake | Uptake | Transfection |
| Duplex ID | LogIC50 | LogIC50 | LogIC50 |
| AD-2315874.2 | −0.2573 | −0.2817 | −1.455 |
| AD-2315875.2 | −0.3135 | −0.1777 | −1.482 |
| AD-2315876.2 | −0.3371 | −0.0897 | −1.657 |
| AD-2315877.2 | 0.0306 | −0.2479 | −1.906 |
| AD-2315878.2 | 0.0065 | 0.1145 | −1.419 |
| AD-2315879.2 | 0.3894 | 0.4763 | −1.059 |
| AD-2315880.2 | 0.3065 | 0.2611 | −1.098 |
| AD-2315881.2 | 19.7000 | 0.9393 | −1.039 |
| AD-2315882.2 | 0.2335 | 0.5559 | −1.386 |
| AD-2315883.2 | 0.3199 | 0.5153 | −1.179 |
| AD-2315884.2 | 30.6600 | 0.3130 | −1.439 |
| AD-2315885.2 | 27.5500 | 0.4254 | −1.474 |
| AD-2315886.2 | 18.1700 | 0.2900 | −1.361 |
| AD-2315887.2 | 0.4277 | 0.7792 | −1.365 |

### Example 3. In vivo Single Dose Study in PXB mice

[0914] PXB mice having a humanized liver were administered a single dose, 0.5 mg/kg, of selected dsRNA duplexes. The baseline level of plasma human PLG was used as the control. Blood was obtained by retro-orbital bleed and plasma was tested by ELISA (Abcam, Human PLG ELISA ab108893) for human PLG levels at various time points after administration. The results in FIG. 2 are presented as percent plasma PLG remaining relative to the baseline (pre-dose) control.

[0915] PBX mice were administered an exemplary siRNA duplex, AD-2315878, at either 1 mg/kg or 3 mg/kg subcutaneous in a single dose at day 0. Blood was obtained and plasma hPLG levels were determined at days 0, 7, and 14 as described above. The results in FIG. 3 are presented as percent plasma PLG remaining relative to the baseline (pre-dose) control.

[0916] PBX mice were administered exemplary siRNA duplexes AD-2137018 or AD-2136718 at 0.3 mg/kg, 1 mg/kg, or 3 mg/kg subcutaneous in a single dose at day 0. Blood was obtained and plasma hPLG levels were determined at days 0, 7, 14, 21, 28, 35, 42, 49, 57, and 63 as described above. The percent plasma PLB remaining was determined. The results for AD-2137018 are presented in FIG. 4 and the results for AD-2136718 are presented in FIG. 5.

>NM_000301.5 Homo sapiens plasminogen (PLG), transcript
variant 1, mRNA
SEQ ID NO: 1
GTAAGTCAACAACATCCTGGGATTGGGACCCACTTTCTGGGCACTGCTGGCCAGTCCCAA
AATGGAACATAAGGAAGTGGTTCTTCTACTTCTTTTATTTCTGAAATCAGGTCAAGGAGA
GCCTCTGGATGACTATGTGAATACCCAGGGGGCTTCACTGTTCAGTGTCACTAAGAAGCA
GCTGGGAGCAGGAAGTATAGAAGAATGTGCAGCAAAATGTGAGGAGGACGAAGAATTCAC
CTGCAGGGCATTCCAATATCACAGTAAAGAGCAACAATGTGTGATAATGGCTGAAAACAG
GAAGTCCTCCATAATCATTAGGATGAGAGATGTAGTTTTATTTGAAAAGAAAGTGTATCT
CTCAGAGTGCAAGACTGGGAATGGAAAGAACTACAGAGGGACGATGTCCAAAACAAAAAA
TGGCATCACCTGTCAAAAATGGAGTTCCACTTCTCCCCACAGACCTAGATTCTCACCTGC
TACACACCCCTCAGAGGGACTGGAGGAGAACTACTGCAGGAATCCAGACAACGATCCGCA
GGGGCCCTGGTGCTATACTACTGATCCAGAAAAGAGATATGACTACTGCGACATTCTTGA
GTGTGAAGAGGAATGTATGCATTGCAGTGGAGAAAACTATGACGGCAAAATTTCCAAGAC
CATGTCTGGACTGGAATGCCAGGCCTGGGACTCTCAGAGCCCACACGCTCATGGATACAT
TCCTTCCAAATTTCCAAACAAGAACCTGAAGAAGAATTACTGTCGTAACCCCGATAGGGA
GCTGCGGCCTTGGTGTTTCACCACCGACCCCAACAAGCGCTGGGAACTTTGTGACATCCC
CCGCTGCACAACACCTCCACCATCTTCTGGTCCCACCTACCAGTGTCTGAAGGGAACAGG
TGAAAACTATCGCGGGAATGTGGCTGTTACCGTGTCCGGGCACACCTGTCAGCACTGGAG
TGCACAGACCCCTCACACACATAACAGGACACCAGAAAACTTCCCCTGCAAAAATTTGGA
TGAAAACTACTGCCGCAATCCTGACGGAAAAAGGGCCCCATGGTGCCATACAACCAACAG
CCAAGTGCGGTGGGAGTACTGTAAGATACCGTCCTGTGACTCCTCCCCAGTATCCACGGA
ACAATTGGCTCCCACAGCACCACCTGAGCTAACCCCTGTGGTCCAGGACTGCTACCATGG
TGATGGACAGAGCTACCGAGGCACATCCTCCACCACCACCACAGGAAAGAAGTGTCAGTC
TTGGTCATCTATGACACCACACCGGCACCAGAAGACCCCAGAAAACTACCCAAATGCTGG
CCTGACAATGAACTACTGCAGGAATCCAGATGCCGATAAAGGCCCCTGGTGTTTTACCAC
AGACCCCAGCGTCAGGTGGGAGTACTGCAACCTGAAAAAATGCTCAGGAACAGAAGCGAG
TGTTGTAGCACCTCCGCCTGTTGTCCTGCTTCCAGATGTAGAGACTCCTTCCGAAGAAGA
CTGTATGTTTGGGAATGGGAAAGGATACCGAGGCAAGAGGGCGACCACTGTTACTGGGAC
GCCATGCCAGGACTGGGCTGCCCAGGAGCCCCATAGACACAGCATTTTCACTCCAGAGAC
AAATCCACGGGCGGGTCTGGAAAAAAATTACTGCCGTAACCCTGATGGTGATGTAGGTGG
TCCCTGGTGCTACACGACAAATCCAAGAAAACTTTACGACTACTGTGATGTCCCTCAGTG
TGCGGCCCCTTCATTTGATTGTGGGAAGCCTCAAGTGGAGCCGAAGAAATGTCCTGGAAG
GGTTGTAGGGGGGTGTGTGGCCCACCCACATTCCTGGCCCTGGCAAGTCAGTCTTAGAAC
AAGGTTTGGAATGCACTTCTGTGGAGGCACCTTGATATCCCCAGAGTGGGTGTTGACTGC
TGCCCACTGCTTGGAGAAGTCCCCAAGGCCTTCATCCTACAAGGTCATCCTGGGTGCACA
CCAAGAAGTGAATCTCGAACCGCATGTTCAGGAAATAGAAGTGTCTAGGCTGTTCTTGGA
GCCCACACGAAAAGATATTGCCTTGCTAAAGCTAAGCAGTCCTGCCGTCATCACTGACAA
AGTAATCCCAGCTTGTCTGCCATCCCCAAATTATGTGGTCGCTGACCGGACCGAATGTTT
CATCACTGGCTGGGGAGAAACCCAAGGTACTTTTGGAGCTGGCCTTCTCAAGGAAGCCCA
GCTCCCTGTGATTGAGAATAAAGTGTGCAATCGCTATGAGTTTCTGAATGGAAGAGTCCA
ATCCACCGAACTCTGTGCTGGGCATTTGGCCGGAGGCACTGACAGTTGCCAGGGTGACAG
TGGAGGTCCTCTGGTTTGCTTCGAGAAGGACAAATACATTTTACAAGGAGTCACTTCTTG
GGGTCTTGGCTGTGCACGCCCCAATAAGCCTGGTGTCTATGTTCGTGTTTCAAGGTTTGT
TACTTGGATTGAGGGAGTGATGAGAAATAATTAATTGGACGGGAGACAGAGTGACGCACT
GACTCACCTAGAGGCTGGAACGTGGGTAGGGATTTAGCATGCTGGAAATAACTGGCAGTA
ATCAAACGAAGACACTGTCCCCAGCTACCAGCTACGCCAAACCTCGGCATTTTTTGTGTT
ATTTTCTGACTGCTGGATTCTGTAGTAAGGTGACATAGCTATGACATTTGTTAAAAATAA
ACTCTGTACTTAACTTTGATTTGAGTAAATTTTGGTTTTGGTCTTCAACATTTTCATGCT
CTTTGTTCACCCCACCAATTTTTAAATGGGCAGATGGGGGGATTTAGCTGCTTTTGATAA
GGAACAGCTGCACAAAGGACTGAGCAGGCTGCAAGGTCACAGAGGGGAGAGCCAAGAAGT
TGTCCACGCATTTACCTCATCAGCTAACGAGGGCTTGACATGCATTTTTACTGTCTTTAT
TCCTGACACTGAGATGAATGTTTTCAAAGCTGCAACATGTATGGGGAGTCATGCAAACCG
ATTCTGTTATTGGGAATGAAATCTGTCACCGACTGCTTGACTTGAGCCCAGGGGACACGG
AGCAGAGAGCTGTATATGATGGAGTGAACCGGTCCATGGATGTGTAACACAAGACCAACT
GAGAGTCTGAATGTTATTCTGGGGCACACGTGAGTCTAGGATTGGTGCCAAGAGCATGTA
AATGAACAACAAGCAAATATTGAAGGTGGACCACTTATTTCCCATTGCTAATTGCCTGCC
CGGTTTTGAAACAGTCTGCAGTACACACGGTCACAGGAGAATGACCTGTGGGAGAGATAC
ATGTTTAGAAGGAAGAGAAAGGACAAAGGCACACGTTTTACCATTTAAAATATTGTTACC
AAACAAAAATATCCATTCAAAATACAATTTAACAATGCAACAGTCATCTTACAGCAGAGA
AATGCAGAGAAAAGCAAAACTGCAAGTGACTGTGAATAAAGGGTGAATGTAGTCTCAAAT
CCTCAAAGAGCTGTGTTTATTTCATTGACAAATAGATTATTTGTATTCAA
>Reverse complement of SEQ ID NO: 1
SEQ ID NO: 2
TTGAATACAAATAATCTATTTGTCAATGAAATAAACACAGCTCTTTGAGGATTTGAGACT
ACATTCACCCTTTATTCACAGTCACTTGCAGTTTTGCTTTTCTCTGCATTTCTCTGCTGT
AAGATGACTGTTGCATTGTTAAATTGTATTTTGAATGGATATTTTTGTTTGGTAACAATA
TTTTAAATGGTAAAACGTGTGCCTTTGTCCTTTCTCTTCCTTCTAAACATGTATCTCTCC
CACAGGTCATTCTCCTGTGACCGTGTGTACTGCAGACTGTTTCAAAACCGGGCAGGCAAT
TAGCAATGGGAAATAAGTGGTCCACCTTCAATATTTGCTTGTTGTTCATTTACATGCTCT
TGGCACCAATCCTAGACTCACGTGTGCCCCAGAATAACATTCAGACTCTCAGTTGGTCTT
GTGTTACACATCCATGGACCGGTTCACTCCATCATATACAGCTCTCTGCTCCGTGTCCCC
TGGGCTCAAGTCAAGCAGTCGGTGACAGATTTCATTCCCAATAACAGAATCGGTTTGCAT
GACTCCCCATACATGTTGCAGCTTTGAAAACATTCATCTCAGTGTCAGGAATAAAGACAG
TAAAAATGCATGTCAAGCCCTCGTTAGCTGATGAGGTAAATGCGTGGACAACTTCTTGGC
TCTCCCCTCTGTGACCTTGCAGCCTGCTCAGTCCTTTGTGCAGCTGTTCCTTATCAAAAG
CAGCTAAATCCCCCCATCTGCCCATTTAAAAATTGGTGGGGTGAACAAAGAGCATGAAAA
TGTTGAAGACCAAAACCAAAATTTACTCAAATCAAAGTTAAGTACAGAGTTTATTTTTAA
CAAATGTCATAGCTATGTCACCTTACTACAGAATCCAGCAGTCAGAAAATAACACAAAAA
ATGCCGAGGTTTGGCGTAGCTGGTAGCTGGGGACAGTGTCTTCGTTTGATTACTGCCAGT
TATTTCCAGCATGCTAAATCCCTACCCACGTTCCAGCCTCTAGGTGAGTCAGTGCGTCAC
TCTGTCTCCCGTCCAATTAATTATTTCTCATCACTCCCTCAATCCAAGTAACAAACCTTG
AAACACGAACATAGACACCAGGCTTATTGGGGCGTGCACAGCCAAGACCCCAAGAAGTGA
CTCCTTGTAAAATGTATTTGTCCTTCTCGAAGCAAACCAGAGGACCTCCACTGTCACCCT
GGCAACTGTCAGTGCCTCCGGCCAAATGCCCAGCACAGAGTTCGGTGGATTGGACTCTTC
CATTCAGAAACTCATAGCGATTGCACACTTTATTCTCAATCACAGGGAGCTGGGCTTCCT
TGAGAAGGCCAGCTCCAAAAGTACCTTGGGTTTCTCCCCAGCCAGTGATGAAACATTCGG
TCCGGTCAGCGACCACATAATTTGGGGATGGCAGACAAGCTGGGATTACTTTGTCAGTGA
TGACGGCAGGACTGCTTAGCTTTAGCAAGGCAATATCTTTTCGTGTGGGCTCCAAGAACA
GCCTAGACACTTCTATTTCCTGAACATGCGGTTCGAGATTCACTTCTTGGTGTGCACCCA
GGATGACCTTGTAGGATGAAGGCCTTGGGGACTTCTCCAAGCAGTGGGCAGCAGTCAACA
CCCACTCTGGGGATATCAAGGTGCCTCCACAGAAGTGCATTCCAAACCTTGTTCTAAGAC
TGACTTGCCAGGGCCAGGAATGTGGGTGGGCCACACACCCCCCTACAACCCTTCCAGGAC
ATTTCTTCGGCTCCACTTGAGGCTTCCCACAATCAAATGAAGGGGCCGCACACTGAGGGA
CATCACAGTAGTCGTAAAGTTTTCTTGGATTTGTCGTGTAGCACCAGGGACCACCTACAT
CACCATCAGGGTTACGGCAGTAATTTTTTTCCAGACCCGCCCGTGGATTTGTCTCTGGAG
TGAAAATGCTGTGTCTATGGGGCTCCTGGGCAGCCCAGTCCTGGCATGGCGTCCCAGTAA
CAGTGGTCGCCCTCTTGCCTCGGTATCCTTTCCCATTCCCAAACATACAGTCTTCTTCGG
AAGGAGTCTCTACATCTGGAAGCAGGACAACAGGCGGAGGTGCTACAACACTCGCTTCTG
TTCCTGAGCATTTTTTCAGGTTGCAGTACTCCCACCTGACGCTGGGGTCTGTGGTAAAAC
ACCAGGGGCCTTTATCGGCATCTGGATTCCTGCAGTAGTTCATTGTCAGGCCAGCATTTG
GGTAGTTTTCTGGGGTCTTCTGGTGCCGGTGTGGTGTCATAGATGACCAAGACTGACACT
TCTTTCCTGTGGTGGTGGTGGAGGATGTGCCTCGGTAGCTCTGTCCATCACCATGGTAGC
AGTCCTGGACCACAGGGGTTAGCTCAGGTGGTGCTGTGGGAGCCAATTGTTCCGTGGATA
CTGGGGAGGAGTCACAGGACGGTATCTTACAGTACTCCCACCGCACTTGGCTGTTGGTTG
TATGGCACCATGGGGCCCTTTTTCCGTCAGGATTGCGGCAGTAGTTTTCATCCAAATTTT
TGCAGGGGAAGTTTTCTGGTGTCCTGTTATGTGTGTGAGGGGTCTGTGCACTCCAGTGCT
GACAGGTGTGCCCGGACACGGTAACAGCCACATTCCCGCGATAGTTTTCACCTGTTCCCT
TCAGACACTGGTAGGTGGGACCAGAAGATGGTGGAGGTGTTGTGCAGCGGGGGATGTCAC
AAAGTTCCCAGCGCTTGTTGGGGTCGGTGGTGAAACACCAAGGCCGCAGCTCCCTATCGG
GGTTACGACAGTAATTCTTCTTCAGGTTCTTGTTTGGAAATTTGGAAGGAATGTATCCAT
GAGCGTGTGGGCTCTGAGAGTCCCAGGCCTGGCATTCCAGTCCAGACATGGTCTTGGAAA
TTTTGCCGTCATAGTTTTCTCCACTGCAATGCATACATTCCTCTTCACACTCAAGAATGT
CGCAGTAGTCATATCTCTTTTCTGGATCAGTAGTATAGCACCAGGGCCCCTGCGGATCGT
TGTCTGGATTCCTGCAGTAGTTCTCCTCCAGTCCCTCTGAGGGGTGTGTAGCAGGTGAGA
ATCTAGGTCTGTGGGGAGAAGTGGAACTCCATTTTTGACAGGTGATGCCATTTTTTGTTT
TGGACATCGTCCCTCTGTAGTTCTTTCCATTCCCAGTCTTGCACTCTGAGAGATACACTT
TCTTTTCAAATAAAACTACATCTCTCATCCTAATGATTATGGAGGACTTCCTGTTTTCAG
CCATTATCACACATTGTTGCTCTTTACTGTGATATTGGAATGCCCTGCAGGTGAATTCTT
CGTCCTCCTCACATTTTGCTGCACATTCTTCTATACTTCCTGCTCCCAGCTGCTTCTTAG
TGACACTGAACAGTGAAGCCCCCTGGGTATTCACATAGTCATCCAGAGGCTCTCCTTGAC
CTGATTTCAGAAATAAAAGAAGTAGAAGAACCACTTCCTTATGTTCCATTTTGGGACTGG
CCAGCAGTGCCCAGAAAGTGGGTCCCAATCCCAGGATGTTGTTGACTTAC
>NM_001168338.1 Homo sapiens plasminogen (PLG),
transcript variant 2, mRNA
SEQ ID NO: 3
GAATCATTAACTTAATTTGACTATCTGGTTTGTGGATGCGTTTACTCTCATGTAAGTCAA
CAACATCCTGGGATTGGGACCCACTTTCTGGGCACTGCTGGCCAGTCCCAAAATGGAACA
TAAGGAAGTGGTTCTTCTACTTCTTTTATTTCTGAAATCAGGTCAAGGAGAGCCTCTGGA
TGACTATGTGAATACCCAGGGGGCTTCACTGTTCAGTGTCACTAAGAAGCAGCTGGGAGC
AGGAAGTATAGAAGAATGTGCAGCAAAATGTGAGGAGGACGAAGAATTCACCTGCAGGGC
ATTCCAATATCACAGTAAAGAGCAACAATGTGTGATAATGGCTGAAAACAGGAAGTCCTC
CATAATCATTAGGATGAGAGATGTAGTTTTATTTGAAAAGAAAGTGTATCTCTCAGAGTG
CAAGACTGGGAATGGAAAGAACTACAGAGGGACGATGTCCAAAACAAAAAATGGCATCAC
CTGTCAAAAATGGAGTTCCACTTCTCCCCACAGACCTAGGTAAGACATTCCCTTTCATCT
TTGTGTTCATCTACTGTAAAGTTGTCCCTCTGTGTCTGTGAGGGATTGGTTCCAGGACCC
CTGTGGCTACCAAAATCCATGCTTCTCAAGTCCCTTATATAAAATGGTGCAGTATTTGCA
TATAACCTACATACCTTCTCTTGTATAATCCCTAATATAATGTAAATGCTATTTAATCGT
TGTTATACTGTATTGTTTTTATTTGTATTATGTTTTATTGTCATATTGTTATTTTCTGTC
ATCTTTTTCAAGTCTTTTCCATCCACAGTTGGTTGAATTTGTGGATCTGGAACCCATGGA
TACAGAGGGCCAACTGTATTTAGGATAATTTCATCACTTTTAATTCAAACCACAATATGT
GAATAAGCAGATAGAAAGAATCTTTTTGATGTCGATGTTCAACTATTTTTGGCACCATAG
TAGAACATGGTTGCTTTCTATTTTTTCTTGGATATGGAGGTTTCTTGAAGACCTAGAACA
TAGAAGAATGCCTAGTTTAAAAAAAATCAATGAAACTATGAGTTTTAGGCCAAATCTGAG
AAAAGATCAAAGATGACTATGTTTGGGACTGAAGTAAGCATATCAGGTTAGAACTCTCAT
CACATGTTCGACTCAAATTGTGGAGCAAAAGAGTAAATAAGATATAAAAATGAAAATGAA
>Reverse complement of SEQ ID NO: 3
SEQ ID NO: 4
TTCATTTTCATTTTTATATCTTATTTACTCTTTTGCTCCACAATTTGAGTCGAACATGTG
ATGAGAGTTCTAACCTGATATGCTTACTTCAGTCCCAAACATAGTCATCTTTGATCTTTT
CTCAGATTTGGCCTAAAACTCATAGTTTCATTGATTTTTTTTAAACTAGGCATTCTTCTA
TGTTCTAGGTCTTCAAGAAACCTCCATATCCAAGAAAAAATAGAAAGCAACCATGTTCTA
CTATGGTGCCAAAAATAGTTGAACATCGACATCAAAAAGATTCTTTCTATCTGCTTATTC
ACATATTGTGGTTTGAATTAAAAGTGATGAAATTATCCTAAATACAGTTGGCCCTCTGTA
TCCATGGGTTCCAGATCCACAAATTCAACCAACTGTGGATGGAAAAGACTTGAAAAAGAT
GACAGAAAATAACAATATGACAATAAAACATAATACAAATAAAAACAATACAGTATAACA
ACGATTAAATAGCATTTACATTATATTAGGGATTATACAAGAGAAGGTATGTAGGTTATA
TGCAAATACTGCACCATTTTATATAAGGGACTTGAGAAGCATGGATTTTGGTAGCCACAG
GGGTCCTGGAACCAATCCCTCACAGACACAGAGGGACAACTTTACAGTAGATGAACACAA
AGATGAAAGGGAATGTCTTACCTAGGTCTGTGGGGAGAAGTGGAACTCCATTTTTGACAG
GTGATGCCATTTTTTGTTTTGGACATCGTCCCTCTGTAGTTCTTTCCATTCCCAGTCTTG
CACTCTGAGAGATACACTTTCTTTTCAAATAAAACTACATCTCTCATCCTAATGATTATG
GAGGACTTCCTGTTTTCAGCCATTATCACACATTGTTGCTCTTTACTGTGATATTGGAAT
GCCCTGCAGGTGAATTCTTCGTCCTCCTCACATTTTGCTGCACATTCTTCTATACTTCCT
GCTCCCAGCTGCTTCTTAGTGACACTGAACAGTGAAGCCCCCTGGGTATTCACATAGTCA
TCCAGAGGCTCTCCTTGACCTGATTTCAGAAATAAAAGAAGTAGAAGAACCACTTCCTTA
TGTTCCATTTTGGGACTGGCCAGCAGTGCCCAGAAAGTGGGTCCCAATCCCAGGATGTTG
TTGACTTACATGAGAGTAAACGCATCCACAAACCAGATAGTCAAATTAAGTTAATGATTC
>XM_005551498.2 PREDICTED: Macaca fascicularis plasminogen
(PLG), mRNA
SEQ ID NO: 685
GGGATTGGGACACACTTTCTGGGCACTGCTGGCCAGTCCCAAAATGGAACATAAGGAAGT
GGTTCTTCTACTTCTTTTATTTCTGAAATCAGGTCAAGGAGAGCCTCTGGATGACTATGT
GAATACCAAGGGGGCTTCACTGTTCAGCATCACTAAGAAGCAGCTGGGGGCAGGAAGCAT
AGAAGAATGCGCAGCAAAATGTGAGGAGGAGGAAGAATTCACCTGCAGGTCATTCCAATA
TCACAGTAAAGAGCAACAATGTGTGATAATGGCTGAAAACAGGAAGTCCTCCATAGTCTT
TAGGATGAGAGATGTCGTTTTATTTGAAAAGAAAGTGTATCTTTCAGAGTGCAAGACTGG
GAATGGAAAGAGTTACAGAGGGACAATGTCCAAAACAAGAACCGGCATCACCTGTCAAAA
ATGGAGTTCCACTTCTCCCCACAGACCTAAATTCTCACCTGCTACACACCCTTCAGAGGG
ACTGGAAGAGAACTACTGCAGGAACCCAGACAACGATGGGCTGGGGCCCTGGTGCTACAC
TACTGATCCAGAAGAGAGATTTGACTACTGCGACATTCCCGAGTGTGAAGATGAATGTAT
GCATTGCAGTGGAGAAAATTATGATGGCAAAATTTCCAAGACCATGTCTGGACTGGAATG
CCAGGCCTGGGACTCTCAGAGCCCACACGCTCACGGATACATTCCTTCCAAATTTCCAAA
CAAGAACCTGAAGAAGAATTACTGTCGTAACCCCGATGGGGAGCCACGGCCTTGGTGTTT
CACCACCGACCCCAACAAGCGCTGGGAACTTTGTGACATCCCCCGCTGCACAACACCTCC
ACCATCTTCTGGTCCCACCTACCAGTGTCTGAAGGGAACAGGTGAAAACTATCGTGGGGA
TGTGGCTGTTACCGTGTCTGGGCACACCTGTCAGCGCTGGAGTGCACAGACCCCTCACAC
ACATAACAGGACACCAGAAAACTTTCCCTGCAAAAATTTGGATGAAAACTACTGCCGCAA
TCCTGATGGAGAAAAGGCCCCATGGTGCTATACAACCAACAGCCAAGTGCGGTGGGAGTA
CTGTAAGATACCGTCCTGTGAGTCCTCCCCAGTATCCACGGAACCATTGGATCCCACAGC
ACCACCTGAGCTTACTCCTGTGGTCCAGGAGTGCTACCATGGTGATGGGCAGAGCTACCG
AGGCACATCCTCCACCACCACCACAGGAAAGAAGTGTCAGTCTTGGTCATCTATGACACC
ACACTGGCATGAGAAGACCCCAGAAAACTTCCCAAATGCTGGCCTGACAATGAACTACTG
CAGGAATCCAGATGCCGATAAAGGTCCCTGGTGTTTTACCACGGACCCCAGCGTCAGGTG
GGAGTACTGCAACCTGAAAAAATGCTCAGGAACAGAAGGGAGTGTTGCAGCACCTCCGCC
TGTTGCCCAACTTCCAGATGCAGAGACTCCTTCCGAGGAAGACTGTATGTTTGGGAATGG
GAAAGGATACCGAGGCAAGAAGGCAACCACTGTTACTGGGACACCATGCCAGGAATGGGC
TGCCCAGGAGCCCCACAGCCACCGCATTTTCACTCCAGAGACAAATCCACGGGCAGGTCT
GGAAAAAAACTACTGCCGTAACCCTGATGGTGATATAGGTGGTCCCTGGTGCTACACGAC
AAATCCAAGAAAACTTTTCGACTACTGTGATGTCCCTCAGTGTGCGGCCTCTTCATTTGA
TTGTGGGAAGCCTCAAGTGGAGCCGAAGAAATGTCCTGGAAGGGTTGTAGGGGGGTGTGT
GGCCTACCCACATTCCTGGCCCTGGCAAATCAGTCTTAGAACAAGGCTTGGAATGCACTT
CTGTGGAGGCACCTTGATATCCCCAGAGTGGGTGCTGACTGCTGCCCACTGCTTGGAGAA
GTCCTCAAGGCCTTCATTCTACAAGGTCATCCTGGGTGCACACCGAGAAGTGCATCTCGA
ACCACATGTTCAGGAAATAGAAGTATCTAAGATGTTCTCGGAGCCCGCAAGAGCAGATAT
TGCCTTGCTAAAGCTAAGCAGTCCTGCCATCATCACTGACAAAGTAATCCCAGCTTGTCT
GCCATCCCCAAATTATGTGGTCGCTGACCGGACCGAATGTTTCATCACTGGCTGGGGAGA
AACCCAAGGTACCTATGGGGCTGGCCTTCTCAAGGAAGCCCGGCTCCCCGTGATTGAGAA
TAAAGTGTGCAATCGCTATGAGTTTCTGAATGGAAGAGTCAAAACCACCGAGCTCTGTGC
TGGGCATTTGGCCGGAGGCACTGACAGTTGCCAGGGTGACAGTGGAGGGCCTCTGGTTTG
CTTCGAGAAGGACAAATACATTTTACAAGGAGTTACTTCTTGGGGTCTTGGCTGTGCGCG
TCCCAATAAGCCAGGTGTCTATGTTCGTGTTTCAAGGTTTGTCACTTGGATCGAGGGAGT
GATGAGAAATAATTAATTGGACGGGATTACAGAGTGAAGCATTGACTCACCTAGAGGCTG
GAACATGGGTAGGGATTTAGCATGCTGGAAATAACTGACAGTAAACAAACGAGGACATTG
TCCCCAGCTACCAGGGAAGCCAAACCTCAGCATTTTTTGTATTATTTTCTGACTGCTGGA
TTCTGTAATAAGGTGACATAGCTATGACCATTTGTTAAAAATAAACTCTGTACTTAACCT
TAA
>Reverse complement of SEQ ID NO: 685
SEQ ID NO: 686
TTAAGGTTAAGTACAGAGTTTATTTTTAACAAATGGTCATAGCTATGTCACCTTATTACA
GAATCCAGCAGTCAGAAAATAATACAAAAAATGCTGAGGTTTGGCTTCCCTGGTAGCTGG
GGACAATGTCCTCGTTTGTTTACTGTCAGTTATTTCCAGCATGCTAAATCCCTACCCATG
TTCCAGCCTCTAGGTGAGTCAATGCTTCACTCTGTAATCCCGTCCAATTAATTATTTCTC
ATCACTCCCTCGATCCAAGTGACAAACCTTGAAACACGAACATAGACACCTGGCTTATTG
GGACGCGCACAGCCAAGACCCCAAGAAGTAACTCCTTGTAAAATGTATTTGTCCTTCTCG
AAGCAAACCAGAGGCCCTCCACTGTCACCCTGGCAACTGTCAGTGCCTCCGGCCAAATGC
CCAGCACAGAGCTCGGTGGTTTTGACTCTTCCATTCAGAAACTCATAGCGATTGCACACT
TTATTCTCAATCACGGGGAGCCGGGCTTCCTTGAGAAGGCCAGCCCCATAGGTACCTTGG
GTTTCTCCCCAGCCAGTGATGAAACATTCGGTCCGGTCAGCGACCACATAATTTGGGGAT
GGCAGACAAGCTGGGATTACTTTGTCAGTGATGATGGCAGGACTGCTTAGCTTTAGCAAG
GCAATATCTGCTCTTGCGGGCTCCGAGAACATCTTAGATACTTCTATTTCCTGAACATGT
GGTTCGAGATGCACTTCTCGGTGTGCACCCAGGATGACCTTGTAGAATGAAGGCCTTGAG
GACTTCTCCAAGCAGTGGGCAGCAGTCAGCACCCACTCTGGGGATATCAAGGTGCCTCCA
CAGAAGTGCATTCCAAGCCTTGTTCTAAGACTGATTTGCCAGGGCCAGGAATGTGGGTAG
GCCACACACCCCCCTACAACCCTTCCAGGACATTTCTTCGGCTCCACTTGAGGCTTCCCA
CAATCAAATGAAGAGGCCGCACACTGAGGGACATCACAGTAGTCGAAAAGTTTTCTTGGA
TTTGTCGTGTAGCACCAGGGACCACCTATATCACCATCAGGGTTACGGCAGTAGTTTTTT
TCCAGACCTGCCCGTGGATTTGTCTCTGGAGTGAAAATGCGGTGGCTGTGGGGCTCCTGG
GCAGCCCATTCCTGGCATGGTGTCCCAGTAACAGTGGTTGCCTTCTTGCCTCGGTATCCT
TTCCCATTCCCAAACATACAGTCTTCCTCGGAAGGAGTCTCTGCATCTGGAAGTTGGGCA
ACAGGCGGAGGTGCTGCAACACTCCCTTCTGTTCCTGAGCATTTTTTCAGGTTGCAGTAC
TCCCACCTGACGCTGGGGTCCGTGGTAAAACACCAGGGACCTTTATCGGCATCTGGATTC
CTGCAGTAGTTCATTGTCAGGCCAGCATTTGGGAAGTTTTCTGGGGTCTTCTCATGCCAG
TGTGGTGTCATAGATGACCAAGACTGACACTTCTTTCCTGTGGTGGTGGTGGAGGATGTG
CCTCGGTAGCTCTGCCCATCACCATGGTAGCACTCCTGGACCACAGGAGTAAGCTCAGGT
GGTGCTGTGGGATCCAATGGTTCCGTGGATACTGGGGAGGACTCACAGGACGGTATCTTA
CAGTACTCCCACCGCACTTGGCTGTTGGTTGTATAGCACCATGGGGCCTTTTCTCCATCA
GGATTGCGGCAGTAGTTTTCATCCAAATTTTTGCAGGGAAAGTTTTCTGGTGTCCTGTTA
TGTGTGTGAGGGGTCTGTGCACTCCAGCGCTGACAGGTGTGCCCAGACACGGTAACAGCC
ACATCCCCACGATAGTTTTCACCTGTTCCCTTCAGACACTGGTAGGTGGGACCAGAAGAT
GGTGGAGGTGTTGTGCAGCGGGGGATGTCACAAAGTTCCCAGCGCTTGTTGGGGTCGGTG
GTGAAACACCAAGGCCGTGGCTCCCCATCGGGGTTACGACAGTAATTCTTCTTCAGGTTC
TTGTTTGGAAATTTGGAAGGAATGTATCCGTGAGCGTGTGGGCTCTGAGAGTCCCAGGCC
TGGCATTCCAGTCCAGACATGGTCTTGGAAATTTTGCCATCATAATTTTCTCCACTGCAA
TGCATACATTCATCTTCACACTCGGGAATGTCGCAGTAGTCAAATCTCTCTTCTGGATCA
GTAGTGTAGCACCAGGGCCCCAGCCCATCGTTGTCTGGGTTCCTGCAGTAGTTCTCTTCC
AGTCCCTCTGAAGGGTGTGTAGCAGGTGAGAATTTAGGTCTGTGGGGAGAAGTGGAACTC
CATTTTTGACAGGTGATGCCGGTTCTTGTTTTGGACATTGTCCCTCTGTAACTCTTTCCA
TTCCCAGTCTTGCACTCTGAAAGATACACTTTCTTTTCAAATAAAACGACATCTCTCATC
CTAAAGACTATGGAGGACTTCCTGTTTTCAGCCATTATCACACATTGTTGCTCTTTACTG
TGATATTGGAATGACCTGCAGGTGAATTCTTCCTCCTCCTCACATTTTGCTGCGCATTCT
TCTATGCTTCCTGCCCCCAGCTGCTTCTTAGTGATGCTGAACAGTGAAGCCCCCTTGGTA
TTCACATAGTCATCCAGAGGCTCTCCTTGACCTGATTTCAGAAATAAAAGAAGTAGAAGA
ACCACTTCCTTATGTTCCATTTTGGGACTGGCCAGCAGTGCCCAGAAAGTGTGTCCCAAT
CCC
>NM_008877.3 Mus musculus plasminogen (Plg), mRNA
SEQ ID NO: 687
TTTAAGTCAACACCAGGAACTAGGACACAGTTGTCCAGGTGCTGTTGGCCAGTCCCAACA
TGGACCATAAGGAAGTAATCCTTCTGTTTCTCTTGCTTCTGAAACCAGGACAAGGGGACT
CGCTGGATGGCTACATAAGCACACAAGGGGCTTCACTGTTCAGTCTCACCAAGAAGCAGC
TCGCAGCAGGAGGTGTCTCGGACTGTTTGGCCAAATGTGAAGGGGAAACAGACTTTGTCT
GCAGGTCATTCCAGTACCACAGCAAAGAGCAGCAATGCGTGATCATGGCGGAGAACAGCA
AGACTTCCTCCATCATCCGGATGAGAGACGTCATCTTATTCGAAAAGAGAGTGTATCTGT
CAGAATGTAAGACCGGCATCGGCAACGGCTACAGAGGAACCATGTCCAGGACAAAGAGTG
GTGTTGCCTGTCAAAAGTGGGGTGCCACGTTCCCCCACGTACCCAACTACTCTCCCAGTA
CACATCCCAATGAGGGACTAGAAGAGAACTACTGTAGGAACCCAGACAATGATGAACAAG
GGCCTTGGTGCTACACTACAGATCCGGACAAGAGATATGACTACTGCAACATTCCTGAAT
GTGAAGAGGAATGCATGTACTGCAGTGGAGAAAAGTATGAGGGCAAAATCTCCAAGACCA
TGTCTGGACTTGACTGCCAGGCCTGGGATTCTCAGAGCCCACATGCTCATGGATACATCC
CTGCCAAATTTCCAAGCAAGAACCTGAAGATGAATTATTGCCGCAACCCTGACGGGGAGC
CAAGGCCCTGGTGCTTCACAACAGACCCCACCAAACGCTGGGAATACTGTGACATCCCCC
GCTGCACAACACCCCCGCCCCCACCCAGCCCAACCTACCAATGTCTGAAAGGAAGAGGTG
AAAATTACCGAGGGACCGTGTCTGTCACCGTGTCTGGGAAAACCTGTCAGCGCTGGAGTG
AGCAAACCCCTCATAGGCACAACAGGACACCAGAAAATTTCCCCTGCAAAAATCTGGAAG
AGAACTACTGCCGGAACCCAGATGGAGAAACTGCTCCCTGGTGCTATACCACTGACAGCC
AGCTGAGGTGGGAGTACTGTGAGATTCCATCCTGCGAGTCCTCAGCATCACCAGACCAGT
CAGATTCCTCAGTTCCACCAGAGGAGCAAACACCTGTGGTCCAGGAATGCTACCAGAGCG
ATGGGCAGAGCTATCGGGGTACATCGTCCACTACCATCACAGGGAAGAAGTGCCAGTCCT
GGGCAGCTATGTTTCCACACAGGCATTCGAAGACCCCAGAGAACTTCCCAGATGCTGGCT
TGGAGATGAACTACTGCAGGAACCCGGATGGTGACAAGGGCCCTTGGTGCTACACCACTG
ACCCGAGCGTCAGGTGGGAATACTGCAACCTGAAGCGGTGCTCAGAGACAGGAGGGAGTG
TTGTGGAATTGCCCACAGTTTCCCAGGAACCAAGTGGGCCGAGCGACTCTGAGACAGACT
GCATGTATGGGAATGGCAAAGACTATCGGGGCAAAACGGCCGTCACTGCAGCTGGCACCC
CCTGCCAGGGATGGGCTGCCCAGGAGCCCCACAGGCACAGCATCTTCACCCCACAGACAA
ACCCACGGGCAGGTCTGGAAAAGAACTACTGCCGAAACCCAGATGGGGATGTGAATGGTC
CTTGGTGCTATACAACAAACCCCAGAAAACTTTATGACTATTGTGACATCCCCCTGTGTG
CATCAGCATCATCCTTTGAGTGCGGGAAACCTCAGGTGGAACCGAAGAAATGCCCTGGGA
GGGTGGTGGGTGGCTGCGTGGCCAACCCTCACTCCTGGCCCTGGCAAATCAGCCTTAGAA
CAAGATTTACCGGACAGCACTTCTGTGGCGGTACTTTAATAGCCCCAGAGTGGGTTCTGA
CTGCTGCCCACTGTTTGGAGAAATCTTCAAGACCTGAATTCTACAAGGTTATCCTGGGTG
CGCACGAAGAATATATCCGTGGGTTGGATGTTCAGGAAATATCAGTAGCCAAACTGATCT
TGGAGCCCAACAACCGTGACATTGCCCTGCTGAAACTAAGCCGCCCAGCCACCATCACGG
ATAAAGTCATTCCAGCTTGTCTGCCATCTCCAAATTACATGGTTGCTGACCGGACAATAT
GTTACATCACCGGCTGGGGAGAGACTCAAGGGACTTTCGGTGCCGGTCGTCTCAAGGAGG
CTCAGCTGCCTGTGATTGAGAACAAGGTGTGCAACCGCGTCGAGTATCTGAACAACAGAG
TCAAATCCACGGAGCTCTGTGCCGGGCAACTGGCTGGTGGCGTCGACAGCTGCCAGGGCG
ACAGTGGAGGACCTCTGGTTTGCTTCGAGAAGGACAAGTACATTTTACAAGGAGTCACTT
CTTGGGGTCTTGGCTGTGCTCGCCCCAATAAGCCTGGTGTCTACGTTCGTGTCTCACGGT
TTGTTGATTGGATTGAAAGGGAGATGAGGAATAACTGACTAGGTGGAAGGCCGAGCAAAA
CCTCTGCTTACTAAAGCTTACTGAATATGGGGAGAGGGCTTAGGGTGTTTGGAAAAACTG
ACAGTAATCAAACTGGGACACTACACTGAACCACAGCTTCCTGTCGCCCCTCAGCCCCTC
CCCTTTTTTTGTATTATTGTGGGTAAAATTTTCCTGTCTGTGGACTTCTGGATTTTGTGA
CAATAGACCATCACTGCTGTGACCTTTGTTGAAAATAAACTCGATACTTACTTTG
>Reverse complement of SEQ ID NO: 687
SEQ ID NO: 688
CAAAGTAAGTATCGAGTTTATTTTCAACAAAGGTCACAGCAGTGATGGTCTATTGTCACA
AAATCCAGAAGTCCACAGACAGGAAAATTTTACCCACAATAATACAAAAAAAGGGGAGGG
GCTGAGGGGCGACAGGAAGCTGTGGTTCAGTGTAGTGTCCCAGTTTGATTACTGTCAGTT
TTTCCAAACACCCTAAGCCCTCTCCCCATATTCAGTAAGCTTTAGTAAGCAGAGGTTTTG
CTCGGCCTTCCACCTAGTCAGTTATTCCTCATCTCCCTTTCAATCCAATCAACAAACCGT
GAGACACGAACGTAGACACCAGGCTTATTGGGGCGAGCACAGCCAAGACCCCAAGAAGTG
ACTCCTTGTAAAATGTACTTGTCCTTCTCGAAGCAAACCAGAGGTCCTCCACTGTCGCCC
TGGCAGCTGTCGACGCCACCAGCCAGTTGCCCGGCACAGAGCTCCGTGGATTTGACTCTG
TTGTTCAGATACTCGACGCGGTTGCACACCTTGTTCTCAATCACAGGCAGCTGAGCCTCC
TTGAGACGACCGGCACCGAAAGTCCCTTGAGTCTCTCCCCAGCCGGTGATGTAACATATT
GTCCGGTCAGCAACCATGTAATTTGGAGATGGCAGACAAGCTGGAATGACTTTATCCGTG
ATGGTGGCTGGGCGGCTTAGTTTCAGCAGGGCAATGTCACGGTTGTTGGGCTCCAAGATC
AGTTTGGCTACTGATATTTCCTGAACATCCAACCCACGGATATATTCTTCGTGCGCACCC
AGGATAACCTTGTAGAATTCAGGTCTTGAAGATTTCTCCAAACAGTGGGCAGCAGTCAGA
ACCCACTCTGGGGCTATTAAAGTACCGCCACAGAAGTGCTGTCCGGTAAATCTTGTTCTA
AGGCTGATTTGCCAGGGCCAGGAGTGAGGGTTGGCCACGCAGCCACCCACCACCCTCCCA
GGGCATTTCTTCGGTTCCACCTGAGGTTTCCCGCACTCAAAGGATGATGCTGATGCACAC
AGGGGGATGTCACAATAGTCATAAAGTTTTCTGGGGTTTGTTGTATAGCACCAAGGACCA
TTCACATCCCCATCTGGGTTTCGGCAGTAGTTCTTTTCCAGACCTGCCCGTGGGTTTGTC
TGTGGGGTGAAGATGCTGTGCCTGTGGGGCTCCTGGGCAGCCCATCCCTGGCAGGGGGTG
CCAGCTGCAGTGACGGCCGTTTTGCCCCGATAGTCTTTGCCATTCCCATACATGCAGTCT
GTCTCAGAGTCGCTCGGCCCACTTGGTTCCTGGGAAACTGTGGGCAATTCCACAACACTC
CCTCCTGTCTCTGAGCACCGCTTCAGGTTGCAGTATTCCCACCTGACGCTCGGGTCAGTG
GTGTAGCACCAAGGGCCCTTGTCACCATCCGGGTTCCTGCAGTAGTTCATCTCCAAGCCA
GCATCTGGGAAGTTCTCTGGGGTCTTCGAATGCCTGTGTGGAAACATAGCTGCCCAGGAC
TGGCACTTCTTCCCTGTGATGGTAGTGGACGATGTACCCCGATAGCTCTGCCCATCGCTC
TGGTAGCATTCCTGGACCACAGGTGTTTGCTCCTCTGGTGGAACTGAGGAATCTGACTGG
TCTGGTGATGCTGAGGACTCGCAGGATGGAATCTCACAGTACTCCCACCTCAGCTGGCTG
TCAGTGGTATAGCACCAGGGAGCAGTTTCTCCATCTGGGTTCCGGCAGTAGTTCTCTTCC
AGATTTTTGCAGGGGAAATTTTCTGGTGTCCTGTTGTGCCTATGAGGGGTTTGCTCACTC
CAGCGCTGACAGGTTTTCCCAGACACGGTGACAGACACGGTCCCTCGGTAATTTTCACCT
CTTCCTTTCAGACATTGGTAGGTTGGGCTGGGTGGGGGCGGGGGTGTTGTGCAGCGGGGG
ATGTCACAGTATTCCCAGCGTTTGGTGGGGTCTGTTGTGAAGCACCAGGGCCTTGGCTCC
CCGTCAGGGTTGCGGCAATAATTCATCTTCAGGTTCTTGCTTGGAAATTTGGCAGGGATG
TATCCATGAGCATGTGGGCTCTGAGAATCCCAGGCCTGGCAGTCAAGTCCAGACATGGTC
TTGGAGATTTTGCCCTCATACTTTTCTCCACTGCAGTACATGCATTCCTCTTCACATTCA
GGAATGTTGCAGTAGTCATATCTCTTGTCCGGATCTGTAGTGTAGCACCAAGGCCCTTGT
TCATCATTGTCTGGGTTCCTACAGTAGTTCTCTTCTAGTCCCTCATTGGGATGTGTACTG
GGAGAGTAGTTGGGTACGTGGGGGAACGTGGCACCCCACTTTTGACAGGCAACACCACTC
TTTGTCCTGGACATGGTTCCTCTGTAGCCGTTGCCGATGCCGGTCTTACATTCTGACAGA
TACACTCTCTTTTCGAATAAGATGACGTCTCTCATCCGGATGATGGAGGAAGTCTTGCTG
TTCTCCGCCATGATCACGCATTGCTGCTCTTTGCTGTGGTACTGGAATGACCTGCAGACA
AAGTCTGTTTCCCCTTCACATTTGGCCAAACAGTCCGAGACACCTCCTGCTGCGAGCTGC
TTCTTGGTGAGACTGAACAGTGAAGCCCCTTGTGTGCTTATGTAGCCATCCAGCGAGTCC
CCTTGTCCTGGTTTCAGAAGCAAGAGAAACAGAAGGATTACTTCCTTATGGTCCATGTTG
GGACTGGCCAACAGCACCTGGACAACTGTGTCCTAGTTCCTGGTGTTGACTTAAA
>NM_053491.2 Rattus norvegicus plasminogen (Plg), mRNA
SEQ ID NO: 689
GGACACAGTTGTCCAGGTGCTGTTGGCCAGTCCCAACATGGACCATAAGGAAATAATCCT
TCTGTTTCTCTTGTTTCTGAAACCAGGACAAGGGGACTCACTGGATGGCTATGTAAGCAC
ACAGGGGGCTTCACTGCATAGCCTCACCAAGAAGCAGCTAGCGGCAGGAAGCATAGCAGA
CTGTTTGGCCAAATGTGAAGGGGAAACAGACTTCATCTGCAGGTCATTCCAGTACCACAG
CAAAGAGCAGCAGTGCGTGATCATGGCCGAGAACAGCAAGACTTCCTCCATCATCCGGAT
GAGAGATGTCATCTTATTCGAAAAGAGAGTGTATCTGTCAGAGTGTAAGACTGGCATCGG
CAAGGGCTACAGAGGAACCATGTCCAAGACAAAGACTGGTGTTACCTGTCAAAAGTGGAG
TGACACGTCCCCCCACGTACCCAAATACTCCCCCAGCACACACCCCAGCGAGGGACTAGA
GGAGAACTACTGTAGGAACCCAGACAATGATGAACAAGGGCCCTGGTGCTACACAACAGA
CCCGGACCAGAGATATGAGTACTGCAACATCCCCGAATGCGAAGAGGAATGCATGTACTG
CAGTGGAGAAAAGTACGAGGGCAAAATCTCCAAGACCATGTCTGGACTCGACTGCCAGTC
CTGGGATTCTCAGAGCCCACATGCTCACGGATACATCCCTGCCAAATTTCCAAGCAAGAA
CTTGAAGATGAATTACTGTCGCAACCCTGACGGGGAGCCGCGGCCCTGGTGCTTCACCAC
AGACCCCAACAAACGCTGGGAATACTGTGACATCCCCCGCTGCACAACACCCCCACCCCC
ACCGGGCCCAACCTACCAATGTCTGAAGGGGAGAGGTGAAAATTACCGAGGGACCGTGTC
TGTCACTGCGTCTGGGAAAACCTGTCAGCGCTGGAGTGAGCAAACACCTCATAGGCACAA
CAGGACGCCAGAAAACTTCCCCTGCAAAAATCTGGAAGAGAACTACTGCCGGAACCCAGA
TGGAGAAACTGCTCCCTGGTGCTATACCACTGACAGCCAGCTGAGGTGGGAGTACTGTGA
GATTCCGTCCTGCGGGTCCTCGGTATCACCAGACCAGTCAGATTCCTCAGTTCTTCCGGA
GCAAACACCTGTGGTCCAGGAGTGCTACCAGGGCAATGGAAAGAGCTATCGGGGCACATC
GTCCACTACCAACACAGGGAAGAAGTGCCAGTCCTGGGTATCTATGACTCCACATAGTCA
CTCGAAGACCCCAGCGAACTTCCCAGATGCTGGCTTGGAGATGAACTACTGCAGGAACCC
AGATAATGACCAGAGGGGCCCTTGGTGCTTCACCACTGACCCGAGCGTCAGGTGGGAATA
CTGCAACCTGAAGCGGTGCTCGGAGACAGGAGGGGGTGTTGCGGAATCAGCCATAGTCCC
CCAAGTTCCCAGTGCGCCAGGCACCTCTGAGACAGACTGCATGTATGGGAATGGCAAAGA
ATATCGGGGCAAAACGGCCGTCACTGCAGCTGGAACCCCCTGCCAGGAATGGGCTGCCCA
GGAGCCCCACAGTCACAGAATCTTCACCCCACAGACAAACCCACGGGCAGGTCTGGAAAA
GAATTACTGCCGAAACCCGGATGGGGATGTCAATGGGCCCTGGTGCTATACAATGAACCC
CAGAAAACTTTACGACTATTGTAACATTCCCCTTTGTGCATCATTATCGTCCTTTGAATG
TGGGAAGCCTCAGGTGGAGCCGAAGAAATGCCCTGGGAGGGTGGTGGGTGGCTGTGTGGC
CAACCCTCACTCCTGGCCCTGGCAAATCAGCCTTAGAACAAGATTTTCTGGACAGCACTT
CTGTGGCGGTACTTTAATATCCCCAGAGTGGGTGCTGACTGCCGCTCACTGCTTGGAGAA
ATCTTCGAGACCTGAATTCTACAAGGTTATCCTGGGAGCACACGAAGAACGAATCCTTGG
GTCAGATGTTCAGCAAATAGCAGTAACCAAACTGGTCTTGGAACCCAACGACGCTGACAT
TGCCCTGCTGAAGCTAAGCCGCCCAGCCACCATCACAGATAATGTCATCCCAGCTTGTCT
GCCATCTCCAAATTATGTGGTTGCCGACCGGACACTGTGTTACATCACCGGCTGGGGAGA
AACGAAAGGGACTCCAGGTGCCGGCCGTCTCAAGGAGGCCCAGCTGCCCGTGATCGAGAA
CAAGGTGTGCAACCGCGCTGAGTATCTAAACAACAGAGTCAAATCCACCGAGCTCTGTGC
CGGGCATCTGGCTGGTGGCATCGACAGTTGCCAGGGCGACAGTGGAGGACCTCTGGTTTG
CTTCGAGAAGGACAAGTATATTTTACAAGGAGTCACTTCTTGGGGTCTTGGCTGTGCTCG
CCCCAATAAGCCTGGTGTCTATGTTCGTGTTTCCCGGTACGTTAATTGGATTGAAAGGGA
GATGAGGAATGACTAATTGGGTGGGAGGCAGAACAAAACTACTAAATATGGGGAGGGGAT
TAGGGCGCTTGAAAAAAAACCTGACAGCAATCAAACCAAAGACACTACACTGGACCACTA
CTTCCTGTCACCCCTCAGCTCCTCCCTCTTTTTGTATTATTGTGGGTAAAATTTTCCTGT
CCCTGGACTTCTGGATTTTGTGACAATAGACCATCACTTCTGTGACCTTTGTTGAAAATA
AACTCGATACTTACTTTAAAAAAAAAAAAAAAAAAAAAAAAAAAAAAAAAAA
>Reverse complement of SEQ ID NO: 689
SEQ ID NO: 690
TTTTTTTTTTTTTTTTTTTTTTTTTTTTTTTTTTTAAAGTAAGTATCGAGTTTATTTTCA
ACAAAGGTCACAGAAGTGATGGTCTATTGTCACAAAATCCAGAAGTCCAGGGACAGGAAA
ATTTTACCCACAATAATACAAAAAGAGGGAGGAGCTGAGGGGTGACAGGAAGTAGTGGTC
CAGTGTAGTGTCTTTGGTTTGATTGCTGTCAGGTTTTTTTTCAAGCGCCCTAATCCCCTC
CCCATATTTAGTAGTTTTGTTCTGCCTCCCACCCAATTAGTCATTCCTCATCTCCCTTTC
AATCCAATTAACGTACCGGGAAACACGAACATAGACACCAGGCTTATTGGGGCGAGCACA
GCCAAGACCCCAAGAAGTGACTCCTTGTAAAATATACTTGTCCTTCTCGAAGCAAACCAG
AGGTCCTCCACTGTCGCCCTGGCAACTGTCGATGCCACCAGCCAGATGCCCGGCACAGAG
CTCGGTGGATTTGACTCTGTTGTTTAGATACTCAGCGCGGTTGCACACCTTGTTCTCGAT
CACGGGCAGCTGGGCCTCCTTGAGACGGCCGGCACCTGGAGTCCCTTTCGTTTCTCCCCA
GCCGGTGATGTAACACAGTGTCCGGTCGGCAACCACATAATTTGGAGATGGCAGACAAGC
TGGGATGACATTATCTGTGATGGTGGCTGGGCGGCTTAGCTTCAGCAGGGCAATGTCAGC
GTCGTTGGGTTCCAAGACCAGTTTGGTTACTGCTATTTGCTGAACATCTGACCCAAGGAT
TCGTTCTTCGTGTGCTCCCAGGATAACCTTGTAGAATTCAGGTCTCGAAGATTTCTCCAA
GCAGTGAGCGGCAGTCAGCACCCACTCTGGGGATATTAAAGTACCGCCACAGAAGTGCTG
TCCAGAAAATCTTGTTCTAAGGCTGATTTGCCAGGGCCAGGAGTGAGGGTTGGCCACACA
GCCACCCACCACCCTCCCAGGGCATTTCTTCGGCTCCACCTGAGGCTTCCCACATTCAAA
GGACGATAATGATGCACAAAGGGGAATGTTACAATAGTCGTAAAGTTTTCTGGGGTTCAT
TGTATAGCACCAGGGCCCATTGACATCCCCATCCGGGTTTCGGCAGTAATTCTTTTCCAG
ACCTGCCCGTGGGTTTGTCTGTGGGGTGAAGATTCTGTGACTGTGGGGCTCCTGGGCAGC
CCATTCCTGGCAGGGGGTTCCAGCTGCAGTGACGGCCGTTTTGCCCCGATATTCTTTGCC
ATTCCCATACATGCAGTCTGTCTCAGAGGTGCCTGGCGCACTGGGAACTTGGGGGACTAT
GGCTGATTCCGCAACACCCCCTCCTGTCTCCGAGCACCGCTTCAGGTTGCAGTATTCCCA
CCTGACGCTCGGGTCAGTGGTGAAGCACCAAGGGCCCCTCTGGTCATTATCTGGGTTCCT
GCAGTAGTTCATCTCCAAGCCAGCATCTGGGAAGTTCGCTGGGGTCTTCGAGTGACTATG
TGGAGTCATAGATACCCAGGACTGGCACTTCTTCCCTGTGTTGGTAGTGGACGATGTGCC
CCGATAGCTCTTTCCATTGCCCTGGTAGCACTCCTGGACCACAGGTGTTTGCTCCGGAAG
AACTGAGGAATCTGACTGGTCTGGTGATACCGAGGACCCGCAGGACGGAATCTCACAGTA
CTCCCACCTCAGCTGGCTGTCAGTGGTATAGCACCAGGGAGCAGTTTCTCCATCTGGGTT
CCGGCAGTAGTTCTCTTCCAGATTTTTGCAGGGGAAGTTTTCTGGCGTCCTGTTGTGCCT
ATGAGGTGTTTGCTCACTCCAGCGCTGACAGGTTTTCCCAGACGCAGTGACAGACACGGT
CCCTCGGTAATTTTCACCTCTCCCCTTCAGACATTGGTAGGTTGGGCCCGGTGGGGGTGG
GGGTGTTGTGCAGCGGGGGATGTCACAGTATTCCCAGCGTTTGTTGGGGTCTGTGGTGAA
GCACCAGGGCCGCGGCTCCCCGTCAGGGTTGCGACAGTAATTCATCTTCAAGTTCTTGCT
TGGAAATTTGGCAGGGATGTATCCGTGAGCATGTGGGCTCTGAGAATCCCAGGACTGGCA
GTCGAGTCCAGACATGGTCTTGGAGATTTTGCCCTCGTACTTTTCTCCACTGCAGTACAT
GCATTCCTCTTCGCATTCGGGGATGTTGCAGTACTCATATCTCTGGTCCGGGTCTGTTGT
GTAGCACCAGGGCCCTTGTTCATCATTGTCTGGGTTCCTACAGTAGTTCTCCTCTAGTCC
CTCGCTGGGGTGTGTGCTGGGGGAGTATTTGGGTACGTGGGGGGACGTGTCACTCCACTT
TTGACAGGTAACACCAGTCTTTGTCTTGGACATGGTTCCTCTGTAGCCCTTGCCGATGCC
AGTCTTACACTCTGACAGATACACTCTCTTTTCGAATAAGATGACATCTCTCATCCGGAT
GATGGAGGAAGTCTTGCTGTTCTCGGCCATGATCACGCACTGCTGCTCTTTGCTGTGGTA
CTGGAATGACCTGCAGATGAAGTCTGTTTCCCCTTCACATTTGGCCAAACAGTCTGCTAT
GCTTCCTGCCGCTAGCTGCTTCTTGGTGAGGCTATGCAGTGAAGCCCCCTGTGTGCTTAC
ATAGCCATCCAGTGAGTCCCCTTGTCCTGGTTTCAGAAACAAGAGAAACAGAAGGATTAT
TTCCTTATGGTCCATGTTGGGACTGGCCAACAGCACCTGGACAACTGTGTCC

1. A double stranded ribonucleic acid (dsRNA) agent, or salt thereof, for inhibiting expression of plasminogen (PLG) in a cell,
wherein said dsRNA agent comprises a sense strand and an antisense strand forming a double stranded region,
wherein the nucleotide sequence of the sense strand differs by no more than 4 bases from the nucleotide sequence of 5′-usgscaauCfgCfUfAfugaguuucua-3′ (SEQ ID. NO: 881) and the nucleotide sequence of the antisense strand differs by no more than 4 bases from the nucleotide sequence of 5′-usAfsgaaAfcucauagCfgAfuugcascsa-3′ (SEQ ID. NO: 1257),
wherein a, c, g, and u are 2′-O-methyl (2′-OMe) A, C, G, and U, respectively Af, Cf, Gf and Uf are 2′-fluoro A, C, G and U, respectively; s is a phosphorothioate linkage, and
wherein at least one strand is conjugated to a ligand.

2-71. (canceled)

72. The dsRNA agent, or salt thereof, of claim 1, wherein the nucleotide sequence of the sense strand differs by no more than 3 bases from the nucleotide sequence of 5′-usgscaauCfgCfUfAfugaguuucua-3′ (SEQ ID NO: 881) and the nucleotide sequence of the antisense strand differs by no more than 3 bases from the nucleotide sequence of 5′-usAfsgaaAfcucauagCfgAfuugcascsa-3′ (SEQ ID NO: 1257).

73. The dsRNA agent, or salt thereof, of claim 1, wherein the nucleotide sequence of the sense strand differs by no more than 2 bases from the nucleotide sequence of 5′-usgscaauCfgCfUfAfugaguuucua-3′ (SEQ ID NO: 881) and the nucleotide sequence of the antisense strand differs by no more than 2 bases from the nucleotide sequence of 5′-usAfsgaaAfcucauagCfgAfuugcascsa-3′ (SEQ ID NO: 1257).

74. The dsRNA agent, or salt thereof, of claim 1, wherein the nucleotide sequence of the sense strand differs by no more than 1 base from the nucleotide sequence of 5′-usgscaauCfgCfUfAfugaguuucua-3′ (SEQ ID NO: 881) and the nucleotide sequence of the antisense strand differs by no more than 1 base from the nucleotide sequence of 5′-usAfsgaaAfcucauagCfgAfuugcascsa-3′ (SEQ ID NO: 1257).

75. The dsRNA agent, or salt thereof, of claim 1, wherein the ligand is conjugated to the 3′ end of the sense strand of the dsRNA agent.

76. The dsRNA agent, or salt thereof, of claim 1, wherein the ligand is an N-acetylgalactosamine (GalNAc) derivative.

77. The dsRNA agent, or salt thereof, of claim 1, wherein the ligand is one or more GalNAc derivatives attached through a monovalent, bivalent, or trivalent branched linker.

78. The dsRNA agent, or salt thereof, of claim 77, wherein the ligand is

[chemical structure]

79. The dsRNA agent, or salt thereof, of claim 78, wherein the dsRNA agent is conjugated to the ligand as shown in the following schematic [chemical structure]
and, wherein X is O or S.

80. The dsRNA agent, or salt thereof, of claim 79, wherein the X is O.

81. A double stranded ribonucleic acid (dsRNA) agent, or salt thereof, for inhibiting expression of plasminogen (PLG) in a cell,
wherein the dsRNA agent comprises a sense strand and an antisense strand forming a double stranded region,
wherein the sense strand comprises the nucleotide sequence of 5′-usgscaauCfgCfUfAfugaguuucua-3′ (SEQ ID NO: 881) and the antisense strand comprises the nucleotide sequence of 5′-usAfsgaaAfcucauagCfgAfuugcascsa-3′ (SEQ ID NO: 1257),
wherein a, c, g, and u are 2′-O-methyl (2′-OMe) A, C, G, and U, respectively; Af, Cf, Gf and Uf are 2′-fluoro A, C, G and U, respectively; s is a phosphorothioate linkage, and
wherein at least one strand is conjugated to a ligand.

82. The dsRNA agent, or salt thereof, of claim 81, wherein the sense strand consists of the nucleotide sequence of 5′-usgscaauCfgCfUfAfugaguuucua-3′ (SEQ ID NO: 881) and the antisense strand consists of the nucleotide sequence of 5′-usAfsgaaAfcucauagCfgAfuugcascsa-3′ (SEQ ID NO: 1257).

83. The dsRNA agent, or salt thereof, of claim 81, wherein the ligand is conjugated to the 3′ end of the sense strand of the dsRNA agent.

84. The dsRNA agent, or salt thereof, of claim 81, wherein the ligand is an N-acetylgalactosamine (GalNAc) derivative.

85. The dsRNA agent, or salt thereof, of claim 81, wherein the ligand is one or more GalNAc derivatives attached through a monovalent, bivalent, or trivalent branched linker.

86. The dsRNA agent, or salt thereof, of claim 85, wherein the ligand is

[chemical structure]

87. The dsRNA agent, or salt thereof, of claim 86, wherein the dsRNA agent is conjugated to the ligand as shown in the following schematic [chemical structure]
and, wherein X is O or S.

88. The dsRNA agent, or salt thereof, of claim 87, wherein the X is O.

89. A double stranded ribonucleic acid (dsRNA) agent, or salt thereof, for inhibiting expression of plasminogen (PLG) in a cell,
wherein the dsRNA agent comprises a sense strand and an antisense strand forming a double stranded region,
wherein the sense strand comprises the nucleotide sequence of 5′-usgscaauCfgCfUfAfugaguuucua-3′ (SEQ ID NO: 881) and the antisense strand comprises the nucleotide sequence of 5′-usAfsgaaAfcucauagCfgAfuugcascsa-3′ (SEQ ID NO: 1257),
wherein a, c, g, and u are 2′-O-methyl (2′-OMe) A, C, G, and U, respectively; Af, Cf, Gf and Uf are 2′-fluoro A, C, G and U, respectively; s is a phosphorothioate linkage, and
wherein the dsRNA agent is conjugated to a ligand as shown in the following schematic

[chemical structure]

90. The dsRNA agent, or salt thereof, of claim 89, wherein the sense strand consists of the nucleotide sequence of 5′-usgscaauCfgCfUfAfugaguuucua-3′ (SEQ ID NO: 881) and the antisense strand consists of the nucleotide sequence of 5′-usAfsgaaAfcucauagCfgAfuugcascsa-3′ (SEQ ID NO: 1257).

91. A cell containing the dsRNA agent, or salt thereof, of claim 1.

92. A pharmaceutical composition for inhibiting expression of a gene encoding plasminogen (PLG) comprising the dsRNA agent, or salt thereof, of claim 1 and a pharmaceutically acceptable carrier.

93. The pharmaceutical composition of claim 92, wherein dsRNA agent, or salt thereof, is in an unbuffered solution.

94. The pharmaceutical composition of claim 93, wherein the unbuffered solution is saline or water.

95. The pharmaceutical composition of claim 92, wherein the dsRNA agent, or salt thereof, is in a buffer solution.

96. The pharmaceutical composition of claim 95, wherein the buffer solution comprises acetate, citrate, prolamine, carbonate, or phosphate, or any combination thereof.

97. The pharmaceutical composition of claim 95, wherein the buffer solution is phosphate buffered saline (PBS).

98. The pharmaceutical composition of claim 92, wherein the dsRNA agent is in a salt form.

99. The pharmaceutical composition of claim 92, wherein the dsRNA agent is in a sodium salt form.

100. The pharmaceutical composition of claim 92, wherein the dsRNA agent is in a free acid form.

The application's sequence listing, which the Patent Office published only in electronic form, follows.

SEQUENCE LISTING (5664 sequences)

SEQ ID NO: 1 - RNA, 3530 nt, Homo sapiens
  source 1..3530: mol_type = mRNA
gtaagtcaacaacatcctgggattgggacccactttctgggcactgctggccagtcccaaaatggaacataaggaagtggttcttctacttcttttatttctgaaatcaggtcaaggagagcctctggatgactatgtgaatacccagggggcttcactgttcagtgtcactaagaagcagctgggagcaggaagtatagaagaatgtgcagcaaaatgtgaggaggacgaagaattcacctgcagggcattccaatatcacagtaaagagcaacaatgtgtgataatggctgaaaacaggaagtcctccataatcattaggatgagagatgtagttttatttgaaaagaaagtgtatctctcagagtgcaagactgggaatggaaagaactacagagggacgatgtccaaaacaaaaaatggcatcacctgtcaaaaatggagttccacttctccccacagacctagattctcacctgctacacacccctcagagggactggaggagaactactgcaggaatccagacaacgatccgcaggggccctggtgctatactactgatccagaaaagagatatgactactgcgacattcttgagtgtgaagaggaatgtatgcattgcagtggagaaaactatgacggcaaaatttccaagaccatgtctggactggaatgccaggcctgggactctcagagcccacacgctcatggatacattccttccaaatttccaaacaagaacctgaagaagaattactgtcgtaaccccgatagggagctgcggccttggtgtttcaccaccgaccccaacaagcgctgggaactttgtgacatcccccgctgcacaacacctccaccatcttctggtcccacctaccagtgtctgaagggaacaggtgaaaactatcgcgggaatgtggctgttaccgtgtccgggcacacctgtcagcactggagtgcacagacccctcacacacataacaggacaccagaaaacttcccctgcaaaaatttggatgaaaactactgccgcaatcctgacggaaaaagggccccatggtgccatacaaccaacagccaagtgcggtgggagtactgtaagataccgtcctgtgactcctccccagtatccacggaacaattggctcccacagcaccacctgagctaacccctgtggtccaggactgctaccatggtgatggacagagctaccgaggcacatcctccaccaccaccacaggaaagaagtgtcagtcttggtcatctatgacaccacaccggcaccagaagaccccagaaaactacccaaatgctggcctgacaatgaactactgcaggaatccagatgccgataaaggcccctggtgttttaccacagaccccagcgtcaggtgggagtactgcaacctgaaaaaatgctcaggaacagaagcgagtgttgtagcacctccgcctgttgtcctgcttccagatgtagagactccttccgaagaagactgtatgtttgggaatgggaaaggataccgaggcaagagggcgaccactgttactgggacgccatgccaggactgggctgcccaggagccccatagacacagcattttcactccagagacaaatccacgggcgggtctggaaaaaaattactgccgtaaccctgatggtgatgtaggtggtccctggtgctacacgacaaatccaagaaaactttacgactactgtgatgtccctcagtgtgcggccccttcatttgattgtgggaagcctcaagtggagccgaagaaatgtcctggaagggttgtaggggggtgtgtggcccacccacattcctggccctggcaagtcagtcttagaacaaggtttggaatgcacttctgtggaggcaccttgatatccccagagtgggtgttgactgctgcccactgcttggagaagtccccaaggccttcatcctacaaggtcatcctgggtgcacaccaagaagtgaatctcgaaccgcatgttcaggaaatagaagtgtctaggctgttcttggagcccacacgaaaagatattgccttgctaaagctaagcagtcctgccgtcatcactgacaaagtaatcccagcttgtctgccatccccaaattatgtggtcgctgaccggaccgaatgtttcatcactggctggggagaaacccaaggtacttttggagctggccttctcaaggaagcccagctccctgtgattgagaataaagtgtgcaatcgctatgagtttctgaatggaagagtccaatccaccgaactctgtgctgggcatttggccggaggcactgacagttgccagggtgacagtggaggtcctctggtttgcttcgagaaggacaaatacattttacaaggagtcacttcttggggtcttggctgtgcacgccccaataagcctggtgtctatgttcgtgtttcaaggtttgttacttggattgagggagtgatgagaaataattaattggacgggagacagagtgacgcactgactcacctagaggctggaacgtgggtagggatttagcatgctggaaataactggcagtaatcaaacgaagacactgtccccagctaccagctacgccaaacctcggcattttttgtgttattttctgactgctggattctgtagtaaggtgacatagctatgacatttgttaaaaataaactctgtacttaactttgatttgagtaaattttggttttggtcttcaacattttcatgctctttgttcaccccaccaatttttaaatgggcagatggggggatttagctgcttttgataaggaacagctgcacaaaggactgagcaggctgcaaggtcacagaggggagagccaagaagttgtccacgcatttacctcatcagctaacgagggcttgacatgcatttttactgtctttattcctgacactgagatgaatgttttcaaagctgcaacatgtatggggagtcatgcaaaccgattctgttattgggaatgaaatctgtcaccgactgcttgacttgagcccaggggacacggagcagagagctgtatatgatggagtgaaccggtccatggatgtgtaacacaagaccaactgagagtctgaatgttattctggggcacacgtgagtctaggattggtgccaagagcatgtaaatgaacaacaagcaaatattgaaggtggaccacttatttcccattgctaattgcctgcccggttttgaaacagtctgcagtacacacggtcacaggagaatgacctgtgggagagatacatgtttagaaggaagagaaaggacaaaggcacacgttttaccatttaaaatattgttaccaaacaaaaatatccattcaaaatacaatttaacaatgcaacagtcatcttacagcagagaaatgcagagaaaagcaaaactgcaagtgactgtgaataaagggtgaatgtagtctcaaatcctcaaagagctgtgtttatttcattgacaaatagattatttgtattcaa

SEQ ID NO: 2 - RNA, 3530 nt, Homo sapiens
  source 1..3530: mol_type = mRNA
ttgaatacaaataatctatttgtcaatgaaataaacacagctctttgaggatttgagactacattcaccctttattcacagtcacttgcagttttgcttttctctgcatttctctgctgtaagatgactgttgcattgttaaattgtattttgaatggatatttttgtttggtaacaatattttaaatggtaaaacgtgtgcctttgtcctttctcttccttctaaacatgtatctctcccacaggtcattctcctgtgaccgtgtgtactgcagactgtttcaaaaccgggcaggcaattagcaatgggaaataagtggtccaccttcaatatttgcttgttgttcatttacatgctcttggcaccaatcctagactcacgtgtgccccagaataacattcagactctcagttggtcttgtgttacacatccatggaccggttcactccatcatatacagctctctgctccgtgtcccctgggctcaagtcaagcagtcggtgacagatttcattcccaataacagaatcggtttgcatgactccccatacatgttgcagctttgaaaacattcatctcagtgtcaggaataaagacagtaaaaatgcatgtcaagccctcgttagctgatgaggtaaatgcgtggacaacttcttggctctcccctctgtgaccttgcagcctgctcagtcctttgtgcagctgttccttatcaaaagcagctaaatccccccatctgcccatttaaaaattggtggggtgaacaaagagcatgaaaatgttgaagaccaaaaccaaaatttactcaaatcaaagttaagtacagagtttatttttaacaaatgtcatagctatgtcaccttactacagaatccagcagtcagaaaataacacaaaaaatgccgaggtttggcgtagctggtagctggggacagtgtcttcgtttgattactgccagttatttccagcatgctaaatccctacccacgttccagcctctaggtgagtcagtgcgtcactctgtctcccgtccaattaattatttctcatcactccctcaatccaagtaacaaaccttgaaacacgaacatagacaccaggcttattggggcgtgcacagccaagaccccaagaagtgactccttgtaaaatgtatttgtccttctcgaagcaaaccagaggacctccactgtcaccctggcaactgtcagtgcctccggccaaatgcccagcacagagttcggtggattggactcttccattcagaaactcatagcgattgcacactttattctcaatcacagggagctgggcttccttgagaaggccagctccaaaagtaccttgggtttctccccagccagtgatgaaacattcggtccggtcagcgaccacataatttggggatggcagacaagctgggattactttgtcagtgatgacggcaggactgcttagctttagcaaggcaatatcttttcgtgtgggctccaagaacagcctagacacttctatttcctgaacatgcggttcgagattcacttcttggtgtgcacccaggatgaccttgtaggatgaaggccttggggacttctccaagcagtgggcagcagtcaacacccactctggggatatcaaggtgcctccacagaagtgcattccaaaccttgttctaagactgacttgccagggccaggaatgtgggtgggccacacacccccctacaacccttccaggacatttcttcggctccacttgaggcttcccacaatcaaatgaaggggccgcacactgagggacatcacagtagtcgtaaagttttcttggatttgtcgtgtagcaccagggaccacctacatcaccatcagggttacggcagtaatttttttccagacccgcccgtggatttgtctctggagtgaaaatgctgtgtctatggggctcctgggcagcccagtcctggcatggcgtcccagtaacagtggtcgccctcttgcctcggtatcctttcccattcccaaacatacagtcttcttcggaaggagtctctacatctggaagcaggacaacaggcggaggtgctacaacactcgcttctgttcctgagcattttttcaggttgcagtactcccacctgacgctggggtctgtggtaaaacaccaggggcctttatcggcatctggattcctgcagtagttcattgtcaggccagcatttgggtagttttctggggtcttctggtgccggtgtggtgtcatagatgaccaagactgacacttctttcctgtggtggtggtggaggatgtgcctcggtagctctgtccatcaccatggtagcagtcctggaccacaggggttagctcaggtggtgctgtgggagccaattgttccgtggatactggggaggagtcacaggacggtatcttacagtactcccaccgcacttggctgttggttgtatggcaccatggggccctttttccgtcaggattgcggcagtagttttcatccaaatttttgcaggggaagttttctggtgtcctgttatgtgtgtgaggggtctgtgcactccagtgctgacaggtgtgcccggacacggtaacagccacattcccgcgatagttttcacctgttcccttcagacactggtaggtgggaccagaagatggtggaggtgttgtgcagcgggggatgtcacaaagttcccagcgcttgttggggtcggtggtgaaacaccaaggccgcagctccctatcggggttacgacagtaattcttcttcaggttcttgtttggaaatttggaaggaatgtatccatgagcgtgtgggctctgagagtcccaggcctggcattccagtccagacatggtcttggaaattttgccgtcatagttttctccactgcaatgcatacattcctcttcacactcaagaatgtcgcagtagtcatatctcttttctggatcagtagtatagcaccagggcccctgcggatcgttgtctggattcctgcagtagttctcctccagtccctctgaggggtgtgtagcaggtgagaatctaggtctgtggggagaagtggaactccatttttgacaggtgatgccattttttgttttggacatcgtccctctgtagttctttccattcccagtcttgcactctgagagatacactttcttttcaaataaaactacatctctcatcctaatgattatggaggacttcctgttttcagccattatcacacattgttgctctttactgtgatattggaatgccctgcaggtgaattcttcgtcctcctcacattttgctgcacattcttctatacttcctgctcccagctgcttcttagtgacactgaacagtgaagccccctgggtattcacatagtcatccagaggctctccttgacctgatttcagaaataaaagaagtagaagaaccacttccttatgttccattttgggactggccagcagtgcccagaaagtgggtcccaatcccaggatgttgttgacttac

SEQ ID NO: 3 - RNA, 1200 nt, Homo sapiens
  source 1..1200: mol_type = mRNA
gaatcattaacttaatttgactatctggtttgtggatgcgtttactctcatgtaagtcaacaacatcctgggattgggacccactttctgggcactgctggccagtcccaaaatggaacataaggaagtggttcttctacttcttttatttctgaaatcaggtcaaggagagcctctggatgactatgtgaatacccagggggcttcactgttcagtgtcactaagaagcagctgggagcaggaagtatagaagaatgtgcagcaaaatgtgaggaggacgaagaattcacctgcagggcattccaatatcacagtaaagagcaacaatgtgtgataatggctgaaaacaggaagtcctccataatcattaggatgagagatgtagttttatttgaaaagaaagtgtatctctcagagtgcaagactgggaatggaaagaactacagagggacgatgtccaaaacaaaaaatggcatcacctgtcaaaaatggagttccacttctccccacagacctaggtaagacattccctttcatctttgtgttcatctactgtaaagttgtccctctgtgtctgtgagggattggttccaggacccctgtggctaccaaaatccatgcttctcaagtcccttatataaaatggtgcagtatttgcatataacctacataccttctcttgtataatccctaatataatgtaaatgctatttaatcgttgttatactgtattgtttttatttgtattatgttttattgtcatattgttattttctgtcatctttttcaagtcttttccatccacagttggttgaatttgtggatctggaacccatggatacagagggccaactgtatttaggataatttcatcacttttaattcaaaccacaatatgtgaataagcagatagaaagaatctttttgatgtcgatgttcaactatttttggcaccatagtagaacatggttgctttctattttttcttggatatggaggtttcttgaagacctagaacatagaagaatgcctagtttaaaaaaaatcaatgaaactatgagttttaggccaaatctgagaaaagatcaaagatgactatgtttgggactgaagtaagcatatcaggttagaactctcatcacatgttcgactcaaattgtggagcaaaagagtaaataagatataaaaatgaaaatgaa

SEQ ID NO: 4 - RNA, 1200 nt, Homo sapiens
  source 1..1200: mol_type = mRNA
ttcattttcatttttatatcttatttactcttttgctccacaatttgagtcgaacatgtgatgagagttctaacctgatatgcttacttcagtcccaaacatagtcatctttgatcttttctcagatttggcctaaaactcatagtttcattgattttttttaaactaggcattcttctatgttctaggtcttcaagaaacctccatatccaagaaaaaatagaaagcaaccatgttctactatggtgccaaaaatagttgaacatcgacatcaaaaagattctttctatctgcttattcacatattgtggtttgaattaaaagtgatgaaattatcctaaatacagttggccctctgtatccatgggttccagatccacaaattcaaccaactgtggatggaaaagacttgaaaaagatgacagaaaataacaatatgacaataaaacataatacaaataaaaacaatacagtataacaacgattaaatagcatttacattatattagggattatacaagagaaggtatgtaggttatatgcaaatactgcaccattttatataagggacttgagaagcatggattttggtagccacaggggtcctggaaccaatccctcacagacacagagggacaactttacagtagatgaacacaaagatgaaagggaatgtcttacctaggtctgtggggagaagtggaactccatttttgacaggtgatgccattttttgttttggacatcgtccctctgtagttctttccattcccagtcttgcactctgagagatacactttcttttcaaataaaactacatctctcatcctaatgattatggaggacttcctgttttcagccattatcacacattgttgctctttactgtgatattggaatgccctgcaggtgaattcttcgtcctcctcacattttgctgcacattcttctatacttcctgctcccagctgcttcttagtgacactgaacagtgaagccccctgggtattcacatagtcatccagaggctctccttgacctgatttcagaaataaaagaagtagaagaaccacttccttatgttccattttgggactggccagcagtgcccagaaagtgggtcccaatcccaggatgttgttgacttacatgagagtaaacgcatccacaaaccagatagtcaaattaagttaatgattc

SEQ ID NO: 5 - protein, 16 aa, synthetic construct
AAVALLPAVLLALLAP

SEQ ID NO: 6 - protein, 11 aa, synthetic construct
AALLPVLLAAP

SEQ ID NO: 7 - protein, 13 aa, synthetic construct
GRKKRRQRRRPPQ

SEQ ID NO: 8 - protein, 16 aa, synthetic construct
RQIKIWFQNRRMKWKK

SEQ ID NO: 9 - RNA, 21 nt, synthetic construct
  source 1..21: mol_type = other RNA
gtcaacaacatcctgggattt

SEQ ID NO: 10 - RNA, 21 nt, synthetic construct
  source 1..21: mol_type = other RNA
cttttatttctgaaatcaggt

SEQ ID NO: 11 - RNA, 21 nt, synthetic construct
  source 1..21: mol_type = other RNA
gatgactatgtgaatacccat

SEQ ID NO: 12 - RNA, 21 nt, synthetic construct
  source 1..21: mol_type = other RNA
tcactgttcagtgtcactaat

SEQ ID NO: 13 - RNA, 21 nt, synthetic construct
  source 1..21: mol_type = other RNA
agcaggaagtatagaagaatt

SEQ ID NO: 14 - RNA, 21 nt, synthetic construct
  source 1..21: mol_type = other RNA
aatgtgcagcaaaatgtgagt

SEQ ID NO: 15 - RNA, 21 nt, synthetic construct
  source 1..21: mol_type = other RNA
ggaggacgaagaattcacctt

SEQ ID NO: 16 - RNA, 21 nt, synthetic construct
  source 1..21: mol_type = other RNA
cattccaatatcacagtaaat

SEQ ID NO: 17 - RNA, 21 nt, synthetic construct
  source 1..21: mol_type = other RNA
gagcaacaatgtgtgataatt

SEQ ID NO: 18 - RNA, 21 nt, synthetic construct
  source 1..21: mol_type = other RNA
ggctgaaaacaggaagtcctt

SEQ ID NO: 19 - RNA, 21 nt, synthetic construct
  source 1..21: mol_type = other RNA
tcctccataatcattaggatt

SEQ ID NO: 20 - RNA, 21 nt, synthetic construct
  source 1..21: mol_type = other RNA
gagagatgtagttttatttgt

SEQ ID NO: 21 - RNA, 21 nt, synthetic construct
  source 1..21: mol_type = other RNA
gtatctctcagagtgcaagat

SEQ ID NO: 22 - RNA, 21 nt, synthetic construct
  source 1..21: mol_type = other RNA
actgggaatggaaagaactat

SEQ ID NO: 23 - RNA, 21 nt, synthetic construct
  source 1..21: mol_type = other RNA
gggacgatgtccaaaacaaat

SEQ ID NO: 24 - RNA, 21 nt, synthetic construct
  source 1..21: mol_type = other RNA
gacctagattctcacctgctt

SEQ ID NO: 25 - RNA, 21 nt, synthetic construct
  source 1..21: mol_type = other RNA
tgcaggaatccagacaacgat

SEQ ID NO: 26 - RNA, 21 nt, synthetic construct
  source 1..21: mol_type = other RNA
gctatactactgatccagaat

SEQ ID NO: 27 - RNA, 21 nt, synthetic construct
  source 1..21: mol_type = other RNA
atatgactactgcgacattct

SEQ ID NO: 28 - RNA, 21 nt, synthetic construct
  source 1..21: mol_type = other RNA
ttcttgagtgtgaagaggaat

SEQ ID NO: 29 - RNA, 21 nt, synthetic construct
  source 1..21: mol_type = other RNA
aggaatgtatgcattgcagtt

SEQ ID NO: 30 - RNA, 21 nt, synthetic construct
  source 1..21: mol_type = other RNA
cagtggagaaaactatgacgt

SEQ ID NO: 31 - RNA, 21 nt, synthetic construct
  source 1..21: mol_type = other RNA
ggcaaaatttccaagaccatt

SEQ ID NO: 32 - RNA, 21 nt, synthetic construct
  source 1..21: mol_type = other RNA
acgctcatggatacattcctt

SEQ ID NO: 33 - RNA, 21 nt, synthetic construct
  source 1..21: mol_type = other RNA
ttccttccaaatttccaaact

SEQ ID NO: 34 - RNA, 21 nt, synthetic construct
  source 1..21: mol_type = other RNA
gaacctgaagaagaattactt

SEQ ID NO: 35 - RNA, 21 nt, synthetic construct
  source 1..21: mol_type = other RNA
cttggtgtttcaccaccgact

SEQ ID NO: 36 - RNA, 21 nt, synthetic construct
  source 1..21: mol_type = other RNA
ctgggaactttgtgacatcct

SEQ ID NO: 37 - RNA, 21 nt, synthetic construct
  source 1..21: mol_type = other RNA
cacctccaccatcttctggtt

SEQ ID NO: 38 - RNA, 21 nt, synthetic construct
  source 1..21: mol_type = other RNA
cccacctaccagtgtctgaat

SEQ ID NO: 39 - RNA, 21 nt, synthetic construct
  source 1..21: mol_type = other RNA
ctgaagggaacaggtgaaaat

SEQ ID NO: 40 - RNA, 21 nt, synthetic construct
  source 1..21: mol_type = other RNA
gcgggaatgtggctgttacct

SEQ ID NO: 41 - RNA, 21 nt, synthetic construct
  source 1..21: mol_type = other RNA
acaggacaccagaaaacttct

SEQ ID NO: 42 - RNA, 21 nt, synthetic construct
  source 1..21: mol_type = other RNA
atttggatgaaaactactgct

SEQ ID NO: 43 - RNA, 21 nt, synthetic construct
  source 1..21: mol_type = other RNA
tgccgcaatcctgacggaaat

SEQ ID NO: 44 - RNA, 21 nt, synthetic construct
  source 1..21: mol_type = other RNA
gtgccatacaaccaacagcct

SEQ ID NO: 45 - RNA, 21 nt, synthetic construct
  source 1..21: mol_type = other RNA
gtactgtaagataccgtcctt

SEQ ID NO: 46 - RNA, 21 nt, synthetic construct
  source 1..21: mol_type = other RNA
acaggaaagaagtgtcagtct

SEQ ID NO: 47 - RNA, 21 nt, synthetic construct
  source 1..21: mol_type = other RNA
cagtcttggtcatctatgact

SEQ ID NO: 48 - RNA, 21 nt, synthetic construct
  source 1..21: mol_type = other RNA
tgctggcctgacaatgaactt

SEQ ID NO: 49 - RNA, 21 nt, synthetic construct
  source 1..21: mol_type = other RNA
ggaatccagatgccgataaat

SEQ ID NO: 50 - RNA, 21 nt, synthetic construct
  source 1..21: mol_type = other RNA
ctggtgttttaccacagacct

SEQ ID NO: 51 - RNA, 21 nt, synthetic construct
  source 1..21: mol_type = other RNA
gggagtactgcaacctgaaat

SEQ ID NO: 52 - RNA, 21 nt, synthetic construct
  source 1..21: mol_type = other RNA
gaacagaagcgagtgttgtat

SEQ ID NO: 53 - RNA, 21 nt, synthetic construct
  source 1..21: mol_type = other RNA
ccgcctgttgtcctgcttcct

SEQ ID NO: 54 - RNA, 21 nt, synthetic construct
  source 1..21: mol_type = other RNA
tccagatgtagagactccttt

SEQ ID NO: 55 - RNA, 21 nt, synthetic construct
  source 1..21: mol_type = other RNA
ccgaagaagactgtatgtttt

SEQ ID NO: 56 - RNA, 21 nt, synthetic construct
  source 1..21: mol_type = other RNA
tagacacagcattttcactct

SEQ ID NO: 57 - RNA, 21 nt, synthetic construct
  source 1..21: mol_type = other RNA
cactccagagacaaatccact

SEQ ID NO: 58 - RNA, 21 nt, synthetic construct
  source 1..21: mol_type = other RNA
gccgtaaccctgatggtgatt

SEQ ID NO: 59 - RNA, 21 nt, synthetic construct
  source 1..21: mol_type = other RNA
gtgctacacgacaaatccaat

SEQ ID NO: 60 - RNA, 21 nt, synthetic construct
  source 1..21: mol_type = other RNA
tccaagaaaactttacgactt

SEQ ID NO: 61 - RNA, 21 nt, synthetic construct
  source 1..21: mol_type = other RNA
gactactgtgatgtccctcat

SEQ ID NO: 62 - RNA, 21 nt, synthetic construct
  source 1..21: mol_type = other RNA
gcaagtcagtcttagaacaat

SEQ ID NO: 63 - RNA, 21 nt, synthetic construct
  source 1..21: mol_type = other RNA
aacaaggtttggaatgcactt

SEQ ID NO: 64 - RNA, 21 nt, synthetic construct
  source 1..21: mol_type = other RNA
tgcccactgcttggagaagtt

SEQ ID NO: 65 - RNA, 21 nt, synthetic construct
  source 1..21: mol_type = other RNA
accaagaagtgaatctcgaat

SEQ ID NO: 66 - RNA, 21 nt, synthetic construct
  source 1..21: mol_type = other RNA
ccgcatgttcaggaaatagat

SEQ ID NO: 67 - RNA, 21 nt, synthetic construct
  source 1..21: mol_type = other RNA
gaaaagatattgccttgctat

SEQ ID NO: 68 - RNA, 21 nt, synthetic construct
  source 1..21: mol_type = other RNA
tgctaaagctaagcagtcctt

SEQ ID NO: 69 - RNA, 21 nt, synthetic construct
  source 1..21: mol_type = other RNA
tcatcactgacaaagtaatct

SEQ ID NO: 70 - RNA, 21 nt, synthetic construct
  source 1..21: mol_type = other RNA
cgaatgtttcatcactggctt

SEQ ID NO: 71 - RNA, 21 nt, synthetic construct
  source 1..21: mol_type = other RNA
gagaaacccaaggtacttttt

SEQ ID NO: 72 - RNA, 21 nt, synthetic construct
  source 1..21: mol_type = other RNA
cctgtgattgagaataaagtt

SEQ ID NO: 73 - RNA, 21 nt, synthetic construct
  source 1..21: mol_type = other RNA
atcgctatgagtttctgaatt

SEQ ID NO: 74 - RNA, 21 nt, synthetic construct
  source 1..21: mol_type = other RNA
tgaatggaagagtccaatcct

SEQ ID NO: 75 - RNA, 21 nt, synthetic construct
  source 1..21: mol_type = other RNA
ggtcctctggtttgcttcgat

SEQ ID NO: 76 - RNA, 21 nt, synthetic construct
  source 1..21: mol_type = other RNA
gtctatgttcgtgtttcaagt

SEQ ID NO: 77 - RNA, 21 nt, synthetic construct
  source 1..21: mol_type = other RNA
gagtgatgagaaataattaat

SEQ ID NO: 78 - RNA, 21 nt, synthetic construct
  source 1..21: mol_type = other RNA
gacgcactgactcacctagat

SEQ ID NO: 79 - RNA, 21 nt, synthetic construct
  source 1..21: mol_type = other RNA
tagcatgctggaaataactgt

SEQ ID NO: 80 - RNA, 21 nt, synthetic construct
  source 1..21: mol_type = other RNA
aatcaaacgaagacactgtct

SEQ ID NO: 81 - RNA, 21 nt, synthetic construct
  source 1..21: mol_type = other RNA
accagctacgccaaacctcgt

SEQ ID NO: 82 - RNA, 21 nt, synthetic construct
  source 1..21: mol_type = other RNA
ctcggcattttttgtgttatt

SEQ ID NO: 83 - RNA, 21 nt, synthetic construct
  source 1..21: mol_type = other RNA
gactgctggattctgtagtat

SEQ ID NO: 84 - RNA, 21 nt, synthetic construct
  source 1..21: mol_type = other RNA
tagtaaggtgacatagctatt

SEQ ID NO: 85 - RNA, 21 nt, synthetic construct
  source 1..21: mol_type = other RNA
tctgtacttaactttgatttt

SEQ ID NO: 86 - RNA, 21 nt, synthetic construct
  source 1..21: mol_type = other RNA
attttggttttggtcttcaat

SEQ ID NO: 87 - RNA, 21 nt, synthetic construct
  source 1..21: mol_type = other RNA
ttcaacattttcatgctcttt

SEQ ID NO: 88 - RNA, 21 nt, synthetic construct
  source 1..21: mol_type = other RNA
caccaatttttaaatgggcat

SEQ ID NO: 89 - RNA, 21 nt, synthetic construct
  source 1..21: mol_type = other RNA
agctgcttttgataaggaact

SEQ ID NO: 90 - RNA, 21 nt, synthetic construct
  source 1..21: mol_type = other RNA
ctgcacaaaggactgagcagt

SEQ ID NO: 91 - RNA, 21 nt, synthetic construct
  source 1..21: mol_type = other RNA
gaagttgtccacgcatttact

SEQ ID NO: 92 - RNA, 21 nt, synthetic construct
  source 1..21: mol_type = other RNA
ttacctcatcagctaacgagt

SEQ ID NO: 93 - RNA, 21 nt, synthetic construct
  source 1..21: mol_type = other RNA
tgacatgcatttttactgtct

SEQ ID NO: 94 - RNA, 21 nt, synthetic construct
  source 1..21: mol_type = other RNA
ctgtctttattcctgacactt

SEQ ID NO: 95 - RNA, 21 nt, synthetic construct
  source 1..21: mol_type = other RNA
ctgagatgaatgttttcaaat

SEQ ID NO: 96 - RNA, 21 nt, synthetic construct
  source 1..21: mol_type = other RNA
tcaaagctgcaacatgtatgt

SEQ ID NO: 97 - RNA, 21 nt, synthetic construct
  source 1..21: mol_type = other RNA
tcatgcaaaccgattctgttt

SEQ ID NO: 98 - RNA, 21 nt, synthetic construct
  source 1..21: mol_type = other RNA
tattgggaatgaaatctgtct

SEQ ID NO: 99 - RNA, 21 nt, synthetic construct
  source 1..21: mol_type = other RNA
caccgactgcttgacttgagt

SEQ ID NO: 100 - RNA, 21 nt, synthetic construct
  source 1..21: mol_type = other RNA
ctgtatatgatggagtgaact

SEQ ID NO: 101 - RNA, 21 nt, synthetic construct
  source 1..21: mol_type = other RNA
gatgtgtaacacaagaccaat

SEQ ID NO: 102 - RNA, 21 nt, synthetic construct
  source 1..21: mol_type = other RNA
actgagagtctgaatgttatt

SEQ ID NO: 103 - RNA, 21 nt, synthetic construct
  source 1..21: mol_type = other RNA
cacacgtgagtctaggattgt

SEQ ID NO: 104 - RNA, 21 nt, synthetic construct
  source 1..21: mol_type = other RNA
aagagcatgtaaatgaacaat

SEQ ID NO: 105 - RNA, 21 nt, synthetic construct
  source 1..21: mol_type = other RNA
aacaacaagcaaatattgaat

SEQ ID NO: 106 - RNA, 21 nt, synthetic construct
  source 1..21: mol_type = other RNA
ccacttatttcccattgctat

SEQ ID NO: 107 - RNA, 21 nt, synthetic construct
  source 1..21: mol_type = other RNA
gcccggttttgaaacagtctt

SEQ ID NO: 108 - RNA, 21 nt, synthetic construct
  source 1..21: mol_type = other RNA
tcacaggagaatgacctgtgt

SEQ ID NO: 109 - RNA, 21 nt, synthetic construct
  source 1..21: mol_type = other RNA
ggagagatacatgtttagaat

SEQ ID NO: 110 - RNA, 21 nt, synthetic construct
  source 1..21: mol_type = other RNA
gaagagaaaggacaaaggcat

SEQ ID NO: 111 - RNA, 21 nt, synthetic construct
  source 1..21: mol_type = other RNA
cacgttttaccatttaaaatt

SEQ ID NO: 112 - RNA, 21 nt, synthetic construct
  source 1..21: mol_type = other RNA
caatgcaacagtcatcttact

SEQ ID NO: 113 - RNA, 21 nt, synthetic construct
  source 1..21: mol_type = other RNA
ttacagcagagaaatgcagat

SEQ ID NO: 114 - RNA, 21 nt, synthetic construct
  source 1..21: mol_type = other RNA
gcagagaaaagcaaaactgct

SEQ ID NO: 115 - RNA, 21 nt, synthetic construct
  source 1..21: mol_type = other RNA
actgtgaataaagggtgaatt

SEQ ID NO: 116 - RNA, 21 nt, synthetic construct
  source 1..21: mol_type = other RNA
tagtctcaaatcctcaaagat

SEQ ID NO: 117 - RNA, 21 nt, synthetic construct
  source 1..21: mol_type = other RNA
agagctgtgtttatttcattt

SEQ ID NO: 118 - RNA, 23 nt, synthetic construct
  source 1..23: mol_type = other RNA
aaatcccaggatgttgttgactt

SEQ ID NO: 119 - RNA, 23 nt, synthetic construct
  source 1..23: mol_type = other RNA
acctgatttcagaaataaaagaa

SEQ ID NO: 120 - RNA, 23 nt, synthetic construct
  source 1..23: mol_type = other RNA
atgggtattcacatagtcatcca

SEQ ID NO: 121 - RNA, 23 nt, synthetic construct
  source 1..23: mol_type = other RNA
attagtgacactgaacagtgaag

SEQ ID NO: 122 - RNA, 23 nt, synthetic construct
  source 1..23: mol_type = other RNA
aattcttctatacttcctgctcc

SEQ ID NO: 123 - RNA, 23 nt, synthetic construct
  source 1..23: mol_type = other RNA
actcacattttgctgcacattct

SEQ ID NO: 124 - RNA, 23 nt, synthetic construct
  source 1..23: mol_type = other RNA
aaggtgaattcttcgtcctcctc

SEQ ID NO: 125 - RNA, 23 nt, synthetic construct
  source 1..23: mol_type = other RNA
atttactgtgatattggaatgcc

SEQ ID NO: 126 - RNA, 23 nt, synthetic construct
  source 1..23: mol_type = other RNA
aattatcacacattgttgctctt

SEQ ID NO: 127 - RNA, 23 nt, synthetic construct
  source 1..23: mol_type = other RNA
aaggacttcctgttttcagccat

SEQ ID NO: 128 - RNA, 23 nt, synthetic construct
  source 1..23: mol_type = other RNA
aatcctaatgattatggaggact

SEQ ID NO: 129 - RNA, 23 nt, synthetic construct
  source 1..23: mol_type = other RNA
acaaataaaactacatctctcat

SEQ ID NO: 130 - RNA, 23 nt, synthetic construct
  source 1..23: mol_type = other RNA
atcttgcactctgagagatacac

SEQ ID NO: 131 - RNA, 23 nt, synthetic construct
  source 1..23: mol_type = other RNA
atagttctttccattcccagtct

SEQ ID NO: 132 - RNA, 23 nt, synthetic construct
  source 1..23: mol_type = other RNA
atttgttttggacatcgtccctc

SEQ ID NO: 133 - RNA, 23 nt, synthetic construct
  source 1..23: mol_type = other RNA
aagcaggtgagaatctaggtctg

SEQ ID NO: 134 - RNA, 23 nt, synthetic construct
  source 1..23: mol_type = other RNA
atcgttgtctggattcctgcagt

SEQ ID NO: 135 - RNA, 23 nt, synthetic construct
  source 1..23: mol_type = other RNA
attctggatcagtagtatagcac

SEQ ID NO: 136 - RNA, 23 nt, synthetic construct
  source 1..23: mol_type = other RNA
agaatgtcgcagtagtcatatct

SEQ ID NO: 137 - RNA, 23 nt, synthetic construct
  source 1..23: mol_type = other RNA
attcctcttcacactcaagaatg

SEQ ID NO: 138 - RNA, 23 nt, synthetic construct
  source 1..23: mol_type = other RNA
aactgcaatgcatacattcctct

SEQ ID NO: 139 - RNA, 23 nt, synthetic construct
  source 1..23: mol_type = other RNA
acgtcatagttttctccactgca

SEQ ID NO: 140 - RNA, 23 nt, synthetic construct
  source 1..23: mol_type = other RNA
aatggtcttggaaattttgccgt

SEQ ID NO: 141 - RNA, 23 nt, synthetic construct
  source 1..23: mol_type = other RNA
aaggaatgtatccatgagcgtgt

SEQ ID NO: 142 - RNA, 23 nt, synthetic construct
  source 1..23: mol_type = other RNA
agtttggaaatttggaaggaatg

SEQ ID NO: 143 - RNA, 23 nt, synthetic construct
  source 1..23: mol_type = other RNA
aagtaattcttcttcaggttctt

SEQ ID NO: 144 - RNA, 23 nt, synthetic construct
  source 1..23: mol_type = other RNA
agtcggtggtgaaacaccaaggc

SEQ ID NO: 145 - RNA, 23 nt, synthetic construct
  source 1..23: mol_type = other RNA
aggatgtcacaaagttcccagcg

SEQ ID NO: 146 - RNA, 23 nt, synthetic construct
  source 1..23: mol_type = other RNA
aaccagaagatggtggaggtgtt

SEQ ID NO: 147 - RNA, 23 nt, synthetic construct
  source 1..23: mol_type = other RNA
attcagacactggtaggtgggac

SEQ ID NO: 148 - RNA, 23 nt, synthetic construct
  source 1..23: mol_type = other RNA
attttcacctgttcccttcagac

SEQ ID NO: 149 - RNA, 23 nt, synthetic construct
  source 1..23: mol_type = other RNA
aggtaacagccacattcccgcga

SEQ ID NO: 150 - RNA, 23 nt, synthetic construct
  source 1..23: mol_type = other RNA
agaagttttctggtgtcctgtta

SEQ ID NO: 151 - RNA, 23 nt, synthetic construct
  source 1..23: mol_type = other RNA
agcagtagttttcatccaaattt

SEQ ID NO: 152 - RNA, 23 nt, synthetic construct
  source 1..23: mol_type = other RNA
atttccgtcaggattgcggcagt

SEQ ID NO: 153 - RNA, 23 nt, synthetic construct
  source 1..23: mol_type = other RNA
aggctgttggttgtatggcacca

SEQ ID NO: 154 - RNA, 23 nt, synthetic construct
  source 1..23: mol_type = other RNA
aaggacggtatcttacagtactc

SEQ ID NO: 155 - RNA, 23 nt, synthetic construct
  source 1..23: mol_type = other RNA
agactgacacttctttcctgtgg

SEQ ID NO: 156 - RNA, 23 nt, synthetic construct
  source 1..23: mol_type = other RNA
agtcatagatgaccaagactgac

SEQ ID NO: 157 - RNA, 23 nt, synthetic construct
  source 1..23: mol_type = other RNA
aagttcattgtcaggccagcatt

SEQ ID NO: 158 - RNA, 23 nt, synthetic construct
  source 1..23: mol_type = other RNA
atttatcggcatctggattcctg

SEQ ID NO: 159 - RNA, 23 nt, synthetic construct
  source 1..23: mol_type = other RNA
aggtctgtggtaaaacaccaggg

SEQ ID NO: 160 - RNA, 23 nt, synthetic construct
  source 1..23: mol_type = other RNA
atttcaggttgcagtactcccac

SEQ ID NO: 161 - RNA, 23 nt, synthetic construct
  source 1..23: mol_type = other RNA
atacaacactcgcttctgttcct

SEQ ID NO: 162 - RNA, 23 nt, synthetic construct
  source 1..23: mol_type = other RNA
aggaagcaggacaacaggcggag

SEQ ID NO: 163 - RNA, 23 nt, synthetic construct
  source 1..23: mol_type = other RNA
aaaggagtctctacatctggaag

SEQ ID NO: 164 - RNA, 23 nt, synthetic construct
  source 1..23: mol_type = other RNA
aaaacatacagtcttcttcggaa

SEQ ID NO: 165 - RNA, 23 nt, synthetic construct
  source 1..23: mol_type = other RNA
agagtgaaaatgctgtgtctatg

SEQ ID NO: 166 - RNA, 23 nt, synthetic construct
  source 1..23: mol_type = other RNA
agtggatttgtctctggagtgaa

SEQ ID NO: 167 - RNA, 23 nt, synthetic construct
  source 1..23: mol_type = other RNA
aatcaccatcagggttacggcag

SEQ ID NO: 168 - RNA, 23 nt, synthetic construct
  source 1..23: mol_type = other RNA
attggatttgtcgtgtagcacca

SEQ ID NO: 169 - RNA, 23 nt, synthetic construct
  source 1..23: mol_type = other RNA
aagtcgtaaagttttcttggatt

SEQ ID NO: 170 - RNA, 23 nt, synthetic construct
  source 1..23: mol_type = other RNA
atgagggacatcacagtagtcgt

SEQ ID NO: 171 - RNA, 23 nt, synthetic construct
  source 1..23: mol_type = other RNA
attgttctaagactgacttgcca

SEQ ID NO: 172 - RNA, 23 nt, synthetic construct
  source 1..23: mol_type = other RNA
aagtgcattccaaaccttgttct

SEQ ID NO: 173 - RNA, 23 nt, synthetic construct
  source 1..23: mol_type = other RNA
aacttctccaagcagtgggcagc

SEQ ID NO: 174 - RNA, 23 nt, synthetic construct
  source 1..23: mol_type = other RNA
attcgagattcacttcttggtgt

SEQ ID NO: 175 - RNA, 23 nt, synthetic construct
  source 1..23: mol_type = other RNA
atctatttcctgaacatgcggtt

SEQ ID NO: 176 - RNA, 23 nt, synthetic construct
  source 1..23: mol_type = other RNA
atagcaaggcaatatcttttcgt

SEQ ID NO: 177 - RNA, 23 nt, synthetic construct
  source 1..23: mol_type = other RNA
aaggactgcttagctttagcaag

SEQ ID NO: 178 - RNA, 23 nt, synthetic construct
  source 1..23: mol_type = other RNA
agattactttgtcagtgatgacg

SEQ ID NO: 179 - RNA, 23 nt, synthetic construct
  source 1..23: mol_type = other RNA
aagccagtgatgaaacattcggt

SEQ ID NO: 180 - RNA, 23 nt, synthetic construct
  source 1..23: mol_type = other RNA
aaaaagtaccttgggtttctccc

SEQ ID NO: 181 - RNA, 23 nt, synthetic construct
  source 1..23: mol_type = other RNA
aactttattctcaatcacaggga

SEQ ID NO: 182 - RNA, 23 nt, synthetic construct
  source 1..23: mol_type = other RNA
aattcagaaactcatagcgattg

SEQ ID NO: 183 - RNA, 23 nt, synthetic construct
  source 1..23: mol_type = other RNA
aggattggactcttccattcaga

SEQ ID NO: 184 - RNA, 23 nt, synthetic construct
  source 1..23: mol_type = other RNA
atcgaagcaaaccagaggacctc

SEQ ID NO: 185 - RNA, 23 nt, synthetic construct
  source 1..23: mol_type = other RNA
acttgaaacacgaacatagacac

SEQ ID NO: 186 - RNA, 23 nt, synthetic construct
  source 1..23: mol_type = other RNA
attaattatttctcatcactccc

SEQ ID NO: 187 - RNA, 23 nt, synthetic construct
  source 1..23: mol_type = other RNA
atctaggtgagtcagtgcgtcac

SEQ ID NO: 188 - RNA, 23 nt, synthetic construct
  source 1..23: mol_type = other RNA
acagttatttccagcatgctaaa

SEQ ID NO: 189 - RNA, 23 nt, synthetic construct
  source 1..23: mol_type = other RNA
agacagtgtcttcgtttgattac

SEQ ID NO: 190 - RNA, 23 nt, synthetic construct
  source 1..23: mol_type = other RNA
acgaggtttggcgtagctggtag

SEQ ID NO: 191 - RNA, 23 nt, synthetic construct
  source 1..23: mol_type = other RNA
aataacacaaaaaatgccgaggt

SEQ ID NO: 192 - RNA, 23 nt, synthetic construct
  source 1..23: mol_type = other RNA
atactacagaatccagcagtcag

SEQ ID NO: 193 - RNA, 23 nt, synthetic construct
  source 1..23: mol_type = other RNA
aatagctatgtcaccttactaca

SEQ ID NO: 194 - RNA, 23 nt, synthetic construct
  source 1..23: mol_type = other RNA
aaaatcaaagttaagtacagagt

SEQ ID NO: 195 - RNA, 23 nt, synthetic construct
  source 1..23: mol_type = other RNA
attgaagaccaaaaccaaaattt

SEQ ID NO: 196 - RNA, 23 nt, synthetic construct
  source 1..23: mol_type = other RNA
aaagagcatgaaaatgttgaaga

SEQ ID NO: 197 - RNA, 23 nt, synthetic construct
  source 1..23: mol_type = other RNA
atgcccatttaaaaattggtggg

SEQ ID NO: 198 - RNA, 23 nt, synthetic construct
  source 1..23: mol_type = other RNA
agttccttatcaaaagcagctaa

SEQ ID NO: 199 - RNA, 23 nt, synthetic construct
  source 1..23: mol_type = other RNA
actgctcagtcctttgtgcagct

SEQ ID NO: 200 - RNA, 23 nt, synthetic construct
  source 1..23: mol_type = other RNA
agtaaatgcgtggacaacttctt

SEQ ID NO: 201 - RNA, 23 nt, synthetic construct
  source 1..23: mol_type = other RNA
actcgttagctgatgaggtaaat

SEQ ID NO: 202 - RNA, 23 nt, synthetic construct
  source 1..23: mol_type = other RNA
agacagtaaaaatgcatgtcaag

SEQ ID NO: 203 - RNA, 23 nt, synthetic construct
  source 1..23: mol_type = other RNA
aagtgtcaggaataaagacagta

SEQ ID NO: 204 - RNA, 23 nt, synthetic construct
  source 1..23: mol_type = other RNA
atttgaaaacattcatctcagtg

SEQ ID NO: 205 - RNA, 23 nt, synthetic construct
  source 1..23: mol_type = other RNA
acatacatgttgcagctttgaaa

SEQ ID NO: 206 - RNA, 23 nt, synthetic construct
  source 1..23: mol_type = other RNA
aaacagaatcggtttgcatgact

SEQ ID NO: 207 - RNA, 23 nt, synthetic construct
  source 1..23: mol_type = other RNA
agacagatttcattcccaataac

SEQ ID NO: 208 - RNA, 23 nt, synthetic construct
  source 1..23: mol_type = other RNA
actcaagtcaagcagtcggtgac

SEQ ID NO: 209 - RNA, 23 nt, synthetic construct
  source 1..23: mol_type = other RNA
agttcactccatcatatacagct

SEQ ID NO: 210 - RNA, 23 nt, synthetic construct
  source 1..23: mol_type = other RNA
attggtcttgtgttacacatcca

SEQ ID NO: 211 - RNA, 23 nt, synthetic construct
  source 1..23: mol_type = other RNA
aataacattcagactctcagttg

SEQ ID NO: 212 - RNA, 23 nt, synthetic construct
  source 1..23: mol_type = other RNA
acaatcctagactcacgtgtgcc

SEQ ID NO: 213 - RNA, 23 nt, synthetic construct
  source 1..23: mol_type = other RNA
attgttcatttacatgctcttgg

SEQ ID NO: 214 - RNA, 23 nt, synthetic construct
  source 1..23: mol_type = other RNA
attcaatatttgcttgttgttca

SEQ ID NO: 215 - RNA, 23 nt, synthetic construct
  source 1..23: mol_type = other RNA
atagcaatgggaaataagtggtc

SEQ ID NO: 216 - RNA, 23 nt, synthetic construct
  source 1..23: mol_type = other RNA
aagactgtttcaaaaccgggcag

SEQ ID NO: 217 - RNA, 23 nt, synthetic construct
  source 1..23: mol_type = other RNA
acacaggtcattctcctgtgacc

SEQ ID NO: 218 - RNA, 23 nt, synthetic construct
  source 1..23: mol_type = other RNA
attctaaacatgtatctctccca

SEQ ID NO: 219 - RNA, 23 nt, synthetic construct
  source 1..23: mol_type = other RNA
atgcctttgtcctttctcttcct

SEQ ID NO: 220 - RNA, 23 nt, synthetic construct
  source 1..23: mol_type = other RNA
aattttaaatggtaaaacgtgtg

SEQ ID NO: 221 - RNA, 23 nt, synthetic construct
  source 1..23: mol_type = other RNA
agtaagatgactgttgcattgtt

SEQ ID NO: 222 - RNA, 23 nt, synthetic construct
  source 1..23: mol_type = other RNA
atctgcatttctctgctgtaaga

SEQ ID NO: 223 - RNA, 23 nt, synthetic construct
  source 1..23: mol_type = other RNA
agcagttttgcttttctctgcat

SEQ ID NO: 224 - RNA, 23 nt, synthetic construct
  source 1..23: mol_type = other RNA
aattcaccctttattcacagtca

SEQ ID NO: 225 - RNA, 23 nt, synthetic construct
  source 1..23: mol_type = other RNA
atctttgaggatttgagactaca

SEQ ID NO: 226 - RNA, 23 nt, synthetic construct
  source 1..23: mol_type = other RNA
aaatgaaataaacacagctcttt

SEQ ID NO: 227 - RNA, 21 nt, synthetic construct
  source 1..21: mol_type = other RNA
acttaatttgactatctggtt

SEQ ID NO: 228 - RNA, 21 nt, synthetic construct
  source 1..21: mol_type = other RNA
ctcatgtaagtcaacaacatt

SEQ ID NO: 229 - RNA, 21 nt, synthetic construct
  source 1..21: mol_type = other RNA
taagacattccctttcatctt

SEQ ID NO: 230 - RNA, 21 nt, synthetic construct
  source 1..21: mol_type = other RNA
catctttgtgttcatctactt

SEQ ID NO: 231 - RNA, 21 nt, synthetic construct
  source 1..21: mol_type = other RNA
atgcttctcaagtcccttatt

SEQ ID NO: 232 - RNA, 21 nt, synthetic construct
  source 1..21: mol_type = other RNA
tttgcatataacctacatact

SEQ ID NO: 233 - RNA, 21 nt, synthetic construct
  source 1..21: mol_type = other RNA
ataccttctcttgtataatct

SEQ ID NO: 234 - RNA, 21 nt, synthetic construct
  source 1..21: mol_type = other RNA
aaatgctatttaatcgttgtt

SEQ ID NO: 235 - RNA, 21 nt, synthetic construct
  source 1..21: mol_type = other RNA
gttgttatactgtattgtttt

SEQ ID NO: 236 - RNA, 21 nt, synthetic construct
  source 1..21: mol_type = other RNA
catattgttattttctgtcat

SEQ ID NO: 237 - RNA, 21 nt, synthetic construct
  source 1..21: mol_type = other RNA
gtcatctttttcaagtctttt

SEQ ID NO: 238 - RNA, 21 nt, synthetic construct
  source 1..21: mol_type = other RNA
catccacagttggttgaattt

SEQ ID NO: 239 - RNA, 21 nt, synthetic construct
  source 1..21: mol_type = other RNA
actgtatttaggataatttct

SEQ ID NO: 240 - RNA, 21 nt, synthetic construct
  source 1..21: mol_type = other RNA
catcacttttaattcaaacct

SEQ ID NO: 241 - RNA, 21 nt, synthetic construct
  source 1..21: mol_type = other RNA
aaaccacaatatgtgaataat

SEQ ID NO: 242 - RNA, 21 nt, synthetic construct
  source 1..21: mol_type = other RNA
agcagatagaaagaatctttt

SEQ ID NO: 243 - RNA, 21 nt, synthetic construct
  source 1..21: mol_type = other RNA
gtcgatgttcaactatttttt

SEQ ID NO: 244 - RNA, 21 nt, synthetic construct
  source 1..21: mol_type = other RNA
aacatggttgctttctatttt

SEQ ID NO: 245 - RNA, 21 nt, synthetic construct
  source 1..21: mol_type = other RNA
tcttggatatggaggtttctt

SEQ ID NO: 246 - RNA, 21 nt, synthetic construct
  source 1..21: mol_type = other RNA
ttcttgaagacctagaacatt

SEQ ID NO: 247 - RNA, 21 nt, synthetic construct
  source 1..21: mol_type = other RNA
acatagaagaatgcctagttt

SEQ ID NO: 248 - RNA, 21 nt, synthetic construct
  source 1..21: mol_type = other RNA
tatgagttttaggccaaatct

SEQ ID NO: 249 - RNA, 21 nt, synthetic construct
  source 1..21: mol_type = other RNA
aaatctgagaaaagatcaaat

SEQ ID NO: 250 - RNA, 21 nt, synthetic construct
  source 1..21: mol_type = other RNA
taagcatatcaggttagaact

SEQ ID NO: 251 - RNA, 21 nt, synthetic construct
  source 1..21: mol_type = other RNA
agaactctcatcacatgttct

SEQ ID NO: 252 - RNA, 21 nt, synthetic construct
  source 1..21: mol_type = other RNA
tggagcaaaagagtaaataat

SEQ ID NO: 253 - RNA, 23 nt, synthetic construct
  source 1..23: mol_type = other RNA
aaccagatagtcaaattaagtta

SEQ ID NO: 254 - RNA, 23 nt, synthetic construct
  source 1..23: mol_type = other RNA
aatgttgttgacttacatgagag

SEQ ID NO: 255 - RNA, 23 nt, synthetic construct
  source 1..23: mol_type = other RNA
aagatgaaagggaatgtcttacc

SEQ ID NO: 256 - RNA, 23 nt, synthetic construct
  source 1..23: mol_type = other RNA
aagtagatgaacacaaagatgaa

SEQ ID NO: 257 - RNA, 23 nt, synthetic construct
  source 1..23: mol_type = other RNA
aataagggacttgagaagcatgg

SEQ ID NO: 258 - RNA, 23 nt, synthetic construct
  source 1..23: mol_type = other RNA
agtatgtaggttatatgcaaata

SEQ ID NO: 259 - RNA, 23 nt, synthetic construct
  source 1..23: mol_type = other RNA
agattatacaagagaaggtatgt

SEQ ID NO: 260 - RNA, 23 nt, synthetic construct
  source 1..23: mol_type = other RNA
aacaacgattaaatagcatttac

SEQ ID NO: 261 - RNA, 23 nt, synthetic construct
  source 1..23: mol_type = other RNA
aaaacaatacagtataacaacga

SEQ ID NO: 262 - RNA, 23 nt, synthetic construct
  source 1..23: mol_type = other RNA
atgacagaaaataacaatatgac

SEQ ID NO: 263 - RNA, 23 nt, synthetic construct
  source 1..23: mol_type = other RNA
aaaagacttgaaaaagatgacag

SEQ ID NO: 264 - RNA, 23 nt, synthetic construct
  source 1..23: mol_type = other RNA
aaattcaaccaactgtggatgga

SEQ ID NO: 265 - RNA, 23 nt, synthetic construct
  source 1..23: mol_type = other RNA
agaaattatcctaaatacagttg

SEQ ID NO: 266 - RNA, 23 nt, synthetic construct
  source 1..23: mol_type = other RNA
aggtttgaattaaaagtgatgaa

SEQ ID NO: 267 - RNA, 23 nt, synthetic construct
  source 1..23: mol_type = other RNA
attattcacatattgtggtttga

SEQ ID NO: 268 - RNA, 23 nt, synthetic construct
  source 1..23: mol_type = other RNA
aaaagattctttctatctgctta

SEQ ID NO: 269 - RNA, 23 nt, synthetic construct
  source 1..23: mol_type = other RNA
aaaaaatagttgaacatcgacat

SEQ ID NO: 270 - RNA, 23 nt, synthetic construct
  source 1..23: mol_type = other RNA
aaaatagaaagcaaccatgttct

SEQ ID NO: 271 - RNA, 23 nt, synthetic construct
  source 1..23: mol_type = other RNA
aagaaacctccatatccaagaaa

SEQ ID NO: 272 - RNA, 23 nt, synthetic construct
  source 1..23: mol_type = other RNA
aatgttctaggtcttcaagaaac

SEQ ID NO: 273 - RNA, 23 nt, synthetic construct
  source 1..23: mol_type = other RNA
aaactaggcattcttctatgttc

SEQ ID NO: 274 - RNA, 23 nt, synthetic construct
  source 1..23: mol_type = other RNA
agatttggcctaaaactcatagt

SEQ ID NO: 275 - RNA, 23 nt, synthetic construct
  source 1..23: mol_type = other RNA
atttgatcttttctcagatttgg

SEQ ID NO: 276 - RNA, 23 nt, synthetic construct
  source 1..23: mol_type = other RNA
agttctaacctgatatgcttact

SEQ ID NO: 277 - RNA, 23 nt, synthetic construct
  source 1..23: mol_type = other RNA
agaacatgtgatgagagttctaa

SEQ ID NO: 278 - RNA, 23 nt, synthetic construct
  source 1..23: mol_type = other RNA
attatttactcttttgctccaca

SEQ ID NO: 279 - RNA, 21 nt, synthetic construct
  source 1..21: mol_type = other RNA
  modified_base 1: mod_base = OTHER; note = 2'-O-methylguanosine-3'-phosphorothioate
  modified_base 2: mod_base = OTHER; note = 2'-O-methyluridine-3'-phosphorothioate
  modified_base 3: mod_base = OTHER; note = 2'-O-methylcytidine-3'-phosphate
  modified_base 4: mod_base = OTHER; note = 2'-O-methyladenosine-3'-phosphate
  modified_base 5: mod_base = OTHER; note = 2'-O-methyladenosine-3'-phosphate
  modified_base 6: mod_base = OTHER; note = 2'-O-methylcytidine-3'-phosphate
  modified_base 7: mod_base = OTHER; note = 2'-deoxy-2'-fluoroadenosine-3'-phosphate
  modified_base 8: mod_base = OTHER; note = 2'-O-methyladenosine-3'-phosphate
  modified_base 9: mod_base = OTHER; note = 2'-deoxy-2'-fluorocytidine-3'-phosphate
  modified_base 10: mod_base = OTHER; note = 2'-deoxy-2'-fluoroadenosine-3'-phosphate
  modified_base 11: mod_base = OTHER; note = 2'-deoxy-2'-fluorouridine-3'-phosphate
  modified_base 12: mod_base = OTHER; note = 2'-O-methylcytidine-3'-phosphate
  modified_base 13: mod_base = OTHER; note = 2'-O-methylcytidine-3'-phosphate
  modified_base 14: mod_base = OTHER; note = 2'-O-methyluridine-3'-phosphate
  modified_base 15: mod_base = OTHER; note = 2'-O-methylguanosine-3'-phosphate
  modified_base 16: mod_base = OTHER; note = 2'-O-methylguanosine-3'-phosphate
  modified_base 17: mod_base = OTHER; note = 2'-O-methylguanosine-3'-phosphate
  modified_base 18: mod_base = OTHER; note = 2'-O-methyladenosine-3'-phosphate
  modified_base 19: mod_base = OTHER; note = 2'-O-methyluridine-3'-phosphate
  modified_base 20: mod_base = OTHER; note = 2'-O-methyluridine-3'-phosphate
  modified_base 21: mod_base = OTHER; note = 2'-O-methyluridine-3'-phosphate ((2S,4R)-1-[29-[[2-(acetylamino)-2-deoxy-beta-D-galactopyra nosyl]oxy]-14,14-bis[[3-[[3-[[5-[[2-(acetylamino)-2-deoxy-b eta-D-galactopyranosyl]oxy]-1-oxopentyl]amino]propyl]amino] -3-oxopropoxy]methyl]-1,12,19,25-tetraoxo-16-oxa-13,20,24-t riazanonacos-1-yl]-4-hydroxy-2-pyrrolidinyl)methyl ester
gtcaacaacatcctgggattt

SEQ ID NO: 280 - RNA, 21 nt, synthetic construct
  source 1..21: mol_type = other RNA
  modified_base 1: mod_base = OTHER; note = 2'-O-methylcytidine-3'-phosphorothioate
  modified_base 2: mod_base = OTHER; note = 2'-O-methyluridine-3'-phosphorothioate
  modified_base 3: mod_base = OTHER; note = 2'-O-methyluridine-3'-phosphate
  modified_base 4: mod_base = OTHER; note = 2'-O-methyluridine-3'-phosphate
  modified_base 5: mod_base = OTHER; note = 2'-O-methyluridine-3'-phosphate
  modified_base 6: mod_base = OTHER; note = 2'-O-methyladenosine-3'-phosphate
  modified_base 7: mod_base = OTHER; note = 2'-deoxy-2'-fluorouridine-3'-phosphate
  modified_base 8: mod_base = OTHER; note = 2'-O-methyluridine-3'-phosphate
  modified_base 9: mod_base = OTHER; note = 2'-deoxy-2'-fluorouridine-3'-phosphate
  modified_base 10: mod_base = OTHER; note = 2'-deoxy-2'-fluorocytidine-3'-phosphate
  modified_base 11: mod_base = OTHER; note = 2'-deoxy-2'-fluorouridine-3'-phosphate
  modified_base 12: mod_base = OTHER; note = 2'-O-methylguanosine-3'-phosphate
  modified_base 13: mod_base = OTHER; note = 2'-O-methyladenosine-3'-phosphate
  modified_base 14: mod_base = OTHER; note = 2'-O-methyladenosine-3'-phosphate
  modified_base 15: mod_base = OTHER; note = 2'-O-methyladenosine-3'-phosphate
  modified_base 16: mod_base = OTHER; note = 2'-O-methyluridine-3'-phosphate
  modified_base 17: mod_base = OTHER; note = 2'-O-methylcytidine-3'-phosphate
  modified_base 18: mod_base = OTHER; note = 2'-O-methyladenosine-3'-phosphate
  modified_base 19: mod_base = OTHER; note = 2'-O-methylguanosine-3'-phosphate
  modified_base 20: mod_base = OTHER; note = 2'-O-methylguanosine-3'-phosphate
  modified_base 21: mod_base = OTHER; note = 2'-O-methyluridine-3'-phosphate ((2S,4R)-1-[29-[[2-(acetylamino)-2-deoxy-beta-D-galactopyra nosyl]oxy]-14,14-bis[[3-[[3-[[5-[[2-(acetylamino)-2-deoxy-b eta-D-galactopyranosyl]oxy]-1-oxopentyl]amino]propyl]amino] -3-oxopropoxy]methyl]-1,12,19,25-tetraoxo-16-oxa-13,20,24-t riazanonacos-1-yl]-4-hydroxy-2-pyrrolidinyl)methyl ester
cttttatttctgaaatcaggt

SEQ ID NO: 281 - RNA, 21 nt, synthetic construct
  source 1..21: mol_type = other RNA
  modified_base 1: mod_base = OTHER; note = 2'-O-methylguanosine-3'-phosphorothioate
  modified_base 2: mod_base = OTHER; note = 2'-O-methyladenosine-3'-phosphorothioate
  modified_base 3: mod_base = OTHER; note = 2'-O-methyluridine-3'-phosphate
  modified_base 4: mod_base = OTHER; note = 2'-O-methylguanosine-3'-phosphate
  modified_base 5: mod_base = OTHER; note = 2'-O-methyladenosine-3'-phosphate
  modified_base 6: mod_base = OTHER; note = 2'-O-methylcytidine-3'-phosphate
  modified_base 7: mod_base = OTHER; note = 2'-deoxy-2'-fluorouridine-3'-phosphate
  modified_base 8: mod_base = OTHER; note = 2'-O-methyladenosine-3'-phosphate
  modified_base 9: mod_base = OTHER; note = 2'-deoxy-2'-fluorouridine-3'-phosphate
  modified_base 10: mod_base = OTHER; note = 2'-deoxy-2'-fluoroguanosine-3'-phosphate
  modified_base 11: mod_base = OTHER; note = 2'-deoxy-2'-fluorouridine-3'-phosphate
  modified_base 12: mod_base = OTHER; note = 2'-O-methylguanosine-3'-phosphate
  modified_base 13: mod_base = OTHER; note = 2'-O-methyladenosine-3'-phosphate
  modified_base 14: mod_base = OTHER; note = 2'-O-methyladenosine-3'-phosphate
  modified_base 15: mod_base = OTHER; note = 2'-O-methyluridine-3'-phosphate
  modified_base 16: mod_base = OTHER; note = 2'-O-methyladenosine-3'-phosphate
  modified_base 17: mod_base = OTHER; note = 2'-O-methylcytidine-3'-phosphate
  modified_base 18: mod_base = OTHER; note = 2'-O-methylcytidine-3'-phosphate
  modified_base 19: mod_base = OTHER; note = 2'-O-methylcytidine-3'-phosphate
  modified_base 20: mod_base = OTHER; note = 2'-O-methyladenosine-3'-phosphate
  modified_base 21: mod_base = OTHER; note = 2'-O-methyluridine-3'-phosphate ((2S,4R)-1-[29-[[2-(acetylamino)-2-deoxy-beta-D-galactopyra nosyl]oxy]-14,14-bis[[3-[[3-[[5-[[2-(acetylamino)-2-deoxy-b eta-D-galactopyranosyl]oxy]-1-oxopentyl]amino]propyl]amino] -3-oxopropoxy]methyl]-1,12,19,25-tetraoxo-16-oxa-13,20,24-t riazanonacos-1-yl]-4-hydroxy-2-pyrrolidinyl)methyl ester
gatgactatgtgaatacccat

SEQ ID NO: 282 - RNA, 21 nt, synthetic construct
  source 1..21: mol_type = other RNA
  modified_base 1: mod_base = OTHER; note = 2'-O-methyluridine-3'-phosphorothioate
  modified_base 2: mod_base = OTHER; note = 2'-O-methylcytidine-3'-phosphorothioate
  modified_base 3: mod_base = OTHER; note = 2'-O-methyladenosine-3'-phosphate
  modified_base 4: mod_base = OTHER; note = 2'-O-methylcytidine-3'-phosphate
  modified_base 5: mod_base = OTHER; note = 2'-O-methyluridine-3'-phosphate
  modified_base 6: mod_base = OTHER; note = 2'-O-methylguanosine-3'-phosphate
  modified_base 7: mod_base = OTHER; note = 2'-deoxy-2'-fluorouridine-3'-phosphate
  modified_base 8: mod_base = OTHER; note = 2'-O-methyluridine-3'-phosphate
  modified_base 9: mod_base = OTHER; note = 2'-deoxy-2'-fluorocytidine-3'-phosphate
  modified_base 10: mod_base = OTHER; note = 2'-deoxy-2'-fluoroadenosine-3'-phosphate
  modified_base 11: mod_base = OTHER; note = 2'-deoxy-2'-fluoroguanosine-3'-phosphate
  modified_base 12: mod_base = OTHER; note = 2'-O-methyluridine-3'-phosphate
  modified_base 13: mod_base = OTHER; note = 2'-O-methylguanosine-3'-phosphate
  modified_base 14: mod_base = OTHER; note = 2'-O-methyluridine-3'-phosphate
  modified_base 15: mod_base = OTHER; note = 2'-O-methylcytidine-3'-phosphate
  modified_base 16: mod_base = OTHER; note = 2'-O-methyladenosine-3'-phosphate
  modified_base 17: mod_base = OTHER; note = 2'-O-methylcytidine-3'-phosphate
  modified_base 18: mod_base = OTHER; note = 2'-O-methyluridine-3'-phosphate
  modified_base 19: mod_base = OTHER; note = 2'-O-methyladenosine-3'-phosphate
  modified_base 20: mod_base = OTHER; note = 2'-O-methyladenosine-3'-phosphate
  modified_base 21: mod_base = OTHER; note = 2'-O-methyluridine-3'-phosphate ((2S,4R)-1-[29-[[2-(acetylamino)-2-deoxy-beta-D-galactopyra nosyl]oxy]-14,14-bis[[3-[[3-[[5-[[2-(acetylamino)-2-deoxy-b eta-D-galactopyranosyl]oxy]-1-oxopentyl]amino]propyl]amino] -3-oxopropoxy]methyl]-1,12,19,25-tetraoxo-16-oxa-13,20,24-t riazanonacos-1-yl]-4-hydroxy-2-pyrrolidinyl)methyl ester
tcactgttcagtgtcactaat

SEQ ID NO: 283 - RNA, 21 nt, synthetic construct
  source 1..21: mol_type = other RNA
  modified_base 1: mod_base = OTHER; note = 2'-O-methyladenosine-3'-phosphorothioate
  modified_base 2: mod_base = OTHER; note = 2'-O-methylguanosine-3'-phosphorothioate
  modified_base 3: mod_base = OTHER; note = 2'-O-methylcytidine-3'-phosphate
  modified_base 4: mod_base = OTHER; note = 2'-O-methyladenosine-3'-phosphate
  modified_base 5: mod_base = OTHER; note = 2'-O-methylguanosine-3'-phosphate
  modified_base 6: mod_base = OTHER; note = 2'-O-methylguanosine-3'-phosphate
  modified_base 7: mod_base = OTHER; note = 2'-deoxy-2'-fluoroadenosine-3'-phosphate
  modified_base 8: mod_base = OTHER; note = 2'-O-methyladenosine-3'-phosphate
  modified_base 9: mod_base = OTHER; note = 2'-deoxy-2'-fluoroguanosine-3'-phosphate
  modified_base 10: mod_base = OTHER; note = 2'-deoxy-2'-fluorouridine-3'-phosphate
  modified_base 11: mod_base = OTHER; note = 2'-deoxy-2'-fluoroadenosine-3'-phosphate
  modified_base 12: mod_base = OTHER; note = 2'-O-methyluridine-3'-phosphate
  modified_base 13: mod_base = OTHER; note = 2'-O-methyladenosine-3'-phosphate
  modified_base 14: mod_base = OTHER; note = 2'-O-methylguanosine-3'-phosphate
  modified_base 15: mod_base = OTHER; note = 2'-O-methyladenosine-3'-phosphate
  modified_base 16: mod_base = OTHER; note = 2'-O-methyladenosine-3'-phosphate
  modified_base 17: mod_base = OTHER; note = 2'-O-methylguanosine-3'-phosphate
  modified_base 18: mod_base = OTHER; note = 2'-O-methyladenosine-3'-phosphate
  modified_base 19: mod_base = OTHER; note = 2'-O-methyladenosine-3'-phosphate
  modified_base 20: mod_base = OTHER; note = 2'-O-methyluridine-3'-phosphate
  modified_base 21: mod_base = OTHER; note = 2'-O-methyluridine-3'-phosphate ((2S,4R)-1-[29-[[2-(acetylamino)-2-deoxy-beta-D-galactopyra nosyl]oxy]-14,14-bis[[3-[[3-[[5-[[2-(acetylamino)-2-deoxy-b eta-D-galactopyranosyl]oxy]-1-oxopentyl]amino]propyl]amino] -3-oxopropoxy]methyl]-1,12,19,25-tetraoxo-16-oxa-13,20,24-t riazanonacos-1-yl]-4-hydroxy-2-pyrrolidinyl)methyl ester
agcaggaagtatagaagaatt

SEQ ID NO: 284 - RNA, 21 nt, synthetic construct
  source 1..21: mol_type = other RNA
  modified_base 1: mod_base = OTHER; note = 2'-O-methyladenosine-3'-phosphorothioate
  modified_base 2: mod_base = OTHER; note = 2'-O-methyladenosine-3'-phosphorothioate
  modified_base 3: mod_base = OTHER; note = 2'-O-methyluridine-3'-phosphate
  modified_base 4: mod_base = OTHER; note = 2'-O-methylguanosine-3'-phosphate
  modified_base 5: mod_base = OTHER; note = 2'-O-methyluridine-3'-phosphate
  modified_base 6: mod_base = OTHER; note = 2'-O-methylguanosine-3'-phosphate
  modified_base 7: mod_base = OTHER; note = 2'-deoxy-2'-fluorocytidine-3'-phosphate
  modified_base 8: mod_base = OTHER; note = 2'-O-methyladenosine-3'-phosphate
  modified_base 9: mod_base = OTHER; note = 2'-deoxy-2'-fluoroguanosine-3'-phosphate
  modified_base 10: mod_base = OTHER; note = 2'-deoxy-2'-fluorocytidine-3'-phosphate
  modified_base 11: mod_base = OTHER; note = 2'-deoxy-2'-fluoroadenosine-3'-phosphate
  modified_base 12: mod_base = OTHER; note = 2'-O-methyladenosine-3'-phosphate
  modified_base 13: mod_base = OTHER; note = 2'-O-methyladenosine-3'-phosphate
  modified_base 14: mod_base = OTHER; note = 2'-O-methyladenosine-3'-phosphate
  modified_base 15: mod_base = OTHER; note = 2'-O-methyluridine-3'-phosphate
  modified_base 16: mod_base = OTHER; note = 2'-O-methylguanosine-3'-phosphate
  modified_base 17: mod_base = OTHER; note = 2'-O-methyluridine-3'-phosphate
  modified_base 18: mod_base = OTHER; note = 2'-O-methylguanosine-3'-phosphate
  modified_base 19: mod_base = OTHER; note = 2'-O-methyladenosine-3'-phosphate
  modified_base 20: mod_base = OTHER; note = 2'-O-methylguanosine-3'-phosphate
  modified_base 21: mod_base = OTHER; note = 2'-O-methyluridine-3'-phosphate ((2S,4R)-1-[29-[[2-(acetylamino)-2-deoxy-beta-D-galactopyra nosyl]oxy]-14,14-bis[[3-[[3-[[5-[[2-(acetylamino)-2-deoxy-b eta-D-galactopyranosyl]oxy]-1-oxopentyl]amino]propyl]amino] -3-oxopropoxy]methyl]-1,12,19,25-tetraoxo-16-oxa-13,20,24-t riazanonacos-1-yl]-4-hydroxy-2-pyrrolidinyl)methyl ester
aatgtgcagcaaaatgtgagt

SEQ ID NO: 285 - RNA, 21 nt, synthetic construct
  source 1..21: mol_type = other RNA
  modified_base 1: mod_base = OTHER; note = 2'-O-methylguanosine-3'-phosphorothioate
  modified_base 2: mod_base = OTHER; note = 2'-O-methylguanosine-3'-phosphorothioate
  modified_base 3: mod_base = OTHER; note = 2'-O-methyladenosine-3'-phosphate
  modified_base 4: mod_base = OTHER; note = 2'-O-methylguanosine-3'-phosphate
  modified_base 5: mod_base = OTHER; note = 2'-O-methylguanosine-3'-phosphate
  modified_base 6: mod_base = OTHER; note = 2'-O-methyladenosine-3'-phosphate
  modified_base 7: mod_base = OTHER; note = 2'-deoxy-2'-fluorocytidine-3'-phosphate
  modified_base 8: mod_base = OTHER; note = 2'-O-methylguanosine-3'-phosphate
  modified_base 9: mod_base = OTHER; note = 2'-deoxy-2'-fluoroadenosine-3'-phosphate
  modified_base 10: mod_base = OTHER; note = 2'-deoxy-2'-fluoroadenosine-3'-phosphate
  modified_base 11: mod_base = OTHER; note = 2'-deoxy-2'-fluoroguanosine-3'-phosphate
  modified_base 12: mod_base = OTHER; note = 2'-O-methyladenosine-3'-phosphate
  modified_base 13: mod_base = OTHER; note = 2'-O-methyladenosine-3'-phosphate
  modified_base 14: mod_base = OTHER; note = 2'-O-methyluridine-3'-phosphate
  modified_base 15: mod_base = OTHER; note = 2'-O-methyluridine-3'-phosphate
  modified_base 16: mod_base = OTHER; note = 2'-O-methylcytidine-3'-phosphate
  modified_base 17: mod_base = OTHER; note = 2'-O-methyladenosine-3'-phosphate
  modified_base 18: mod_base = OTHER; note = 2'-O-methylcytidine-3'-phosphate
  modified_base 19: mod_base = OTHER; note = 2'-O-methylcytidine-3'-phosphate
  modified_base 20: mod_base = OTHER; note = 2'-O-methyluridine-3'-phosphate
  modified_base 21: mod_base = OTHER; note = 2'-O-methyluridine-3'-phosphate ((2S,4R)-1-[29-[[2-(acetylamino)-2-deoxy-beta-D-galactopyra nosyl]oxy]-14,14-bis[[3-[[3-[[5-[[2-(acetylamino)-2-deoxy-b eta-D-galactopyranosyl]oxy]-1-oxopentyl]amino]propyl]amino] -3-oxopropoxy]methyl]-1,12,19,25-tetraoxo-16-oxa-13,20,24-t riazanonacos-1-yl]-4-hydroxy-2-pyrrolidinyl)methyl ester
ggaggacgaagaattcacctt

SEQ ID NO: 286 - RNA, 21 nt, synthetic construct
  source 1..21: mol_type = other RNA
  modified_base 1: mod_base = OTHER; note = 2'-O-methylcytidine-3'-phosphorothioate
  modified_base 2: mod_base = OTHER; note = 2'-O-methyladenosine-3'-phosphorothioate
  modified_base 3: mod_base = OTHER; note = 2'-O-methyluridine-3'-phosphate
  modified_base 4: mod_base = OTHER; note = 2'-O-methyluridine-3'-phosphate
  modified_base 5: mod_base = OTHER; note = 2'-O-methylcytidine-3'-phosphate
  modified_base 6: mod_base = OTHER; note = 2'-O-methylcytidine-3'-phosphate
  modified_base 7: mod_base = OTHER; note = 2'-deoxy-2'-fluoroadenosine-3'-phosphate
  modified_base 8: mod_base = OTHER; note = 2'-O-methyladenosine-3'-phosphate
  modified_base 9: mod_base = OTHER; note = 2'-deoxy-2'-fluorouridine-3'-phosphate
  modified_base 10: mod_base = OTHER; note = 2'-deoxy-2'-fluoroadenosine-3'-phosphate
  modified_base 11: mod_base = OTHER; note = 2'-deoxy-2'-fluorouridine-3'-phosphate
  modified_base 12: mod_base = OTHER; note = 2'-O-methylcytidine-3'-phosphate
  modified_base 13: mod_base = OTHER; note = 2'-O-methyladenosine-3'-phosphate
  modified_base 14: mod_base = OTHER; note = 2'-O-methylcytidine-3'-phosphate
  modified_base 15: mod_base = OTHER; note = 2'-O-methyladenosine-3'-phosphate
  modified_base 16: mod_base = OTHER; note = 2'-O-methylguanosine-3'-phosphate
  modified_base 17: mod_base = OTHER; note = 2'-O-methyluridine-3'-phosphate
  modified_base 18: mod_base = OTHER; note = 2'-O-methyladenosine-3'-phosphate
  modified_base 19: mod_base = OTHER; note = 2'-O-methyladenosine-3'-phosphate
  modified_base 20: mod_base = OTHER; note = 2'-O-methyladenosine-3'-phosphate
  modified_base 21: mod_base = OTHER; note = 2'-O-methyluridine-3'-phosphate ((2S,4R)-1-[29-[[2-(acetylamino)-2-deoxy-beta-D-galactopyra nosyl]oxy]-14,14-bis[[3-[[3-[[5-[[2-(acetylamino)-2-deoxy-b eta-D-galactopyranosyl]oxy]-1-oxopentyl]amino]propyl]amino] -3-oxopropoxy]methyl]-1,12,19,25-tetraoxo-16-oxa-13,20,24-t riazanonacos-1-yl]-4-hydroxy-2-pyrrolidinyl)methyl ester
cattccaatatcacagtaaat

SEQ ID NO: 287 - RNA, 21 nt, synthetic construct
  source 1..21: mol_type = other RNA
  modified_base 1: mod_base = OTHER; note = 2'-O-methylguanosine-3'-phosphorothioate
  modified_base 2: mod_base = OTHER; note = 2'-O-methyladenosine-3'-phosphorothioate
  modified_base 3: mod_base = OTHER; note = 2'-O-methylguanosine-3'-phosphate
  modified_base 4: mod_base = OTHER; note = 2'-O-methylcytidine-3'-phosphate
  modified_base 5: mod_base = OTHER; note = 2'-O-methyladenosine-3'-phosphate
  modified_base 6: mod_base = OTHER; note = 2'-O-methyladenosine-3'-phosphate
  modified_base 7: mod_base = OTHER; note = 2'-deoxy-2'-fluorocytidine-3'-phosphate
  modified_base 8: mod_base = OTHER; note = 2'-O-methyladenosine-3'-phosphate
  modified_base 9: mod_base = OTHER; note = 2'-deoxy-2'-fluoroadenosine-3'-phosphate
  modified_base 10: mod_base = OTHER; note = 2'-deoxy-2'-fluorouridine-3'-phosphate
  modified_base 11: mod_base = OTHER; note = 2'-deoxy-2'-fluoroguanosine-3'-phosphate
  modified_base 12: mod_base = OTHER; note = 2'-O-methyluridine-3'-phosphate
  modified_base 13: mod_base = OTHER; note = 2'-O-methylguanosine-3'-phosphate
  modified_base 14: mod_base = OTHER; note = 2'-O-methyluridine-3'-phosphate
  modified_base 15: mod_base = OTHER; note = 2'-O-methylguanosine-3'-phosphate
  modified_base 16: mod_base = OTHER; note = 2'-O-methyladenosine-3'-phosphate
  modified_base 17: mod_base = OTHER; note = 2'-O-methyluridine-3'-phosphate
  modified_base 18: mod_base = OTHER; note = 2'-O-methyladenosine-3'-phosphate
  modified_base 19: mod_base = OTHER; note = 2'-O-methyladenosine-3'-phosphate
  modified_base 20: mod_base = OTHER; note = 2'-O-methyluridine-3'-phosphate
  modified_base 21: mod_base = OTHER; note = 2'-O-methyluridine-3'-phosphate ((2S,4R)-1-[29-[[2-(acetylamino)-2-deoxy-beta-D-galactopyra nosyl]oxy]-14,14-bis[[3-[[3-[[5-[[2-(acetylamino)-2-deoxy-b eta-D-galactopyranosyl]oxy]-1-oxopentyl]amino]propyl]amino] -3-oxopropoxy]methyl]-1,12,19,25-tetraoxo-16-oxa-13,20,24-t riazanonacos-1-yl]-4-hydroxy-2-pyrrolidinyl)methyl ester
gagcaacaatgtgtgataatt

SEQ ID NO: 288 - RNA, 21 nt, synthetic construct
  source 1..21: mol_type = other RNA
  modified_base 1: mod_base = OTHER; note = 2'-O-methylguanosine-3'-phosphorothioate
  modified_base 2: mod_base = OTHER; note = 2'-O-methylguanosine-3'-phosphorothioate
  modified_base 3: mod_base = OTHER; note = 2'-O-methylcytidine-3'-phosphate
  modified_base 4: mod_base = OTHER; note = 2'-O-methyluridine-3'-phosphate
  modified_base 5: mod_base = OTHER; note = 2'-O-methylguanosine-3'-phosphate
  modified_base 6: mod_base = OTHER; note = 2'-O-methyladenosine-3'-phosphate
  modified_base 7: mod_base = OTHER; note = 2'-deoxy-2'-fluoroadenosine-3'-phosphate
  modified_base 8: mod_base = OTHER; note = 2'-O-methyladenosine-3'-phosphate
  modified_base 9: mod_base = OTHER; note = 2'-deoxy-2'-fluoroadenosine-3'-phosphate
  modified_base 10: mod_base = OTHER; note = 2'-deoxy-2'-fluorocytidine-3'-phosphate
  modified_base 11: mod_base = OTHER; note = 2'-deoxy-2'-fluoroadenosine-3'-phosphate
  modified_base 12: mod_base = OTHER; note = 2'-O-methylguanosine-3'-phosphate
  modified_base 13: mod_base = OTHER; note = 2'-O-methylguanosine-3'-phosphate
  modified_base 14: mod_base = OTHER; note = 2'-O-methyladenosine-3'-phosphate
  modified_base 15: mod_base = OTHER; note = 2'-O-methyladenosine-3'-phosphate
  modified_base 16: mod_base = OTHER; note = 2'-O-methylguanosine-3'-phosphate
  modified_base 17: mod_base = OTHER; note = 2'-O-methyluridine-3'-phosphate
  modified_base 18: mod_base = OTHER; note = 2'-O-methylcytidine-3'-phosphate
  modified_base 19: mod_base = OTHER; note = 2'-O-methylcytidine-3'-phosphate
  modified_base 20: mod_base = OTHER; note = 2'-O-methyluridine-3'-phosphate
  modified_base 21: mod_base = OTHER; note = 2'-O-methyluridine-3'-phosphate ((2S,4R)-1-[29-[[2-(acetylamino)-2-deoxy-beta-D-galactopyra nosyl]oxy]-14,14-bis[[3-[[3-[[5-[[2-(acetylamino)-2-deoxy-b eta-D-galactopyranosyl]oxy]-1-oxopentyl]amino]propyl]amino] -3-oxopropoxy]methyl]-1,12,19,25-tetraoxo-16-oxa-13,20,24-t riazanonacos-1-yl]-4-hydroxy-2-pyrrolidinyl)methyl ester
ggctgaaaacaggaagtcctt

SEQ ID NO: 289 - RNA, 21 nt, synthetic construct
  source 1..21: mol_type = other RNA
  modified_base 1: mod_base = OTHER; note = 2'-O-methyluridine-3'-phosphorothioate
  modified_base 2: mod_base = OTHER; note = 2'-O-methylcytidine-3'-phosphorothioate
  modified_base 3: mod_base = OTHER; note = 2'-O-methylcytidine-3'-phosphate
  modified_base 4: mod_base = OTHER; note = 2'-O-methyluridine-3'-phosphate
  modified_base 5: mod_base = OTHER; note = 2'-O-methylcytidine-3'-phosphate
  modified_base 6: mod_base = OTHER; note = 2'-O-methylcytidine-3'-phosphate
  modified_base 7: mod_base = OTHER; note = 2'-deoxy-2'-fluoroadenosine-3'-phosphate
  modified_base 8: mod_base = OTHER; note = 2'-O-methyluridine-3'-phosphate
  modified_base 9: mod_base = OTHER; note = 2'-deoxy-2'-fluoroadenosine-3'-phosphate
  modified_base 10: mod_base = OTHER; note = 2'-deoxy-2'-fluoroadenosine-3'-phosphate
  modified_base 11: mod_base = OTHER; note = 2'-deoxy-2'-fluorouridine-3'-phosphate
  modified_base 12: mod_base = OTHER; note = 2'-O-methylcytidine-3'-phosphate
  modified_base 13: mod_base = OTHER; note = 2'-O-methyladenosine-3'-phosphate
  modified_base 14: mod_base = OTHER; note = 2'-O-methyluridine-3'-phosphate
  modified_base 15: mod_base = OTHER; note = 2'-O-methyluridine-3'-phosphate
  modified_base 16: mod_base = OTHER; note = 2'-O-methyladenosine-3'-phosphate
  modified_base 17: mod_base = OTHER; note = 2'-O-methylguanosine-3'-phosphate
  modified_base 18: mod_base = OTHER; note = 2'-O-methylguanosine-3'-phosphate
  modified_base 19: mod_base = OTHER; note = 2'-O-methyladenosine-3'-phosphate
  modified_base 20: mod_base = OTHER; note = 2'-O-methyluridine-3'-phosphate
  modified_base 21: mod_base = OTHER; note = 2'-O-methyluridine-3'-phosphate ((2S,4R)-1-[29-[[2-(acetylamino)-2-deoxy-beta-D-galactopyra nosyl]oxy]-14,14-bis[[3-[[3-[[5-[[2-(acetylamino)-2-deoxy-b eta-D-galactopyranosyl]oxy]-1-oxopentyl]amino]propyl]amino] -3-oxopropoxy]methyl]-1,12,19,25-tetraoxo-16-oxa-13,20,24-t riazanonacos-1-yl]-4-hydroxy-2-pyrrolidinyl)methyl ester
tcctccataatcattaggatt

SEQ ID NO: 290 - RNA, 21 nt, synthetic construct
  source 1..21: mol_type = other RNA
  modified_base 1: mod_base = OTHER; note = 2'-O-methylguanosine-3'-phosphorothioate
  modified_base 2: mod_base = OTHER; note = 2'-O-methyladenosine-3'-phosphorothioate
  modified_base 3: mod_base = OTHER; note = 2'-O-methylguanosine-3'-phosphate
  modified_base 4: mod_base = OTHER; note = 2'-O-methyladenosine-3'-phosphate
  modified_base 5: mod_base = OTHER; note = 2'-O-methylguanosine-3'-phosphate
  modified_base 6: mod_base = OTHER; note = 2'-O-methyladenosine-3'-phosphate
  modified_base 7: mod_base = OTHER; note = 2'-deoxy-2'-fluorouridine-3'-phosphate
  modified_base 8: mod_base = OTHER; note = 2'-O-methylguanosine-3'-phosphate
  modified_base 9: mod_base = OTHER; note = 2'-deoxy-2'-fluorouridine-3'-phosphate
  modified_base 10: mod_base = OTHER; note = 2'-deoxy-2'-fluoroadenosine-3'-phosphate
  modified_base 11: mod_base = OTHER; note = 2'-deoxy-2'-fluoroguanosine-3'-phosphate
  modified_base 12: mod_base = OTHER; note = 2'-O-methyluridine-3'-phosphate
  modified_base 13: mod_base = OTHER; note = 2'-O-methyluridine-3'-phosphate
  modified_base 14: mod_base = OTHER; note = 2'-O-methyluridine-3'-phosphate
  modified_base 15: mod_base = OTHER; note = 2'-O-methyluridine-3'-phosphate
  modified_base 16: mod_base = OTHER; note = 2'-O-methyladenosine-3'-phosphate
  modified_base 17: mod_base = OTHER; note = 2'-O-methyluridine-3'-phosphate
  modified_base 18: mod_base = OTHER; note = 2'-O-methyluridine-3'-phosphate
  modified_base 19: mod_base = OTHER; note = 2'-O-methyluridine-3'-phosphate
  modified_base 20: mod_base = OTHER; note = 2'-O-methylguanosine-3'-phosphate
  modified_base 21: mod_base = OTHER; note = 2'-O-methyluridine-3'-phosphate ((2S,4R)-1-[29-[[2-(acetylamino)-2-deoxy-beta-D-galactopyra nosyl]oxy]-14,14-bis[[3-[[3-[[5-[[2-(acetylamino)-2-deoxy-b eta-D-galactopyranosyl]oxy]-1-oxopentyl]amino]propyl]amino] -3-oxopropoxy]methyl]-1,12,19,25-tetraoxo-16-oxa-13,20,24-t riazanonacos-1-yl]-4-hydroxy-2-pyrrolidinyl)methyl ester
gagagatgtagttttatttgt

SEQ ID NO: 291 - RNA, 21 nt, synthetic construct
  source 1..21: mol_type = other RNA
  modified_base 1: mod_base = OTHER; note = 2'-O-methylguanosine-3'-phosphorothioate
  modified_base 2: mod_base = OTHER; note = 2'-O-methyluridine-3'-phosphorothioate
  modified_base 3: mod_base = OTHER; note = 2'-O-methyladenosine-3'-phosphate
  modified_base 4: mod_base = OTHER; note = 2'-O-methyluridine-3'-phosphate
  modified_base 5: mod_base = OTHER; note = 2'-O-methylcytidine-3'-phosphate
  modified_base 6: mod_base = OTHER; note = 2'-O-methyluridine-3'-phosphate
  modified_base 7: mod_base = OTHER; note = 2'-deoxy-2'-fluorocytidine-3'-phosphate
  modified_base 8: mod_base = OTHER; note = 2'-O-methyluridine-3'-phosphate
  modified_base 9: mod_base = OTHER; note = 2'-deoxy-2'-fluorocytidine-3'-phosphate
  modified_base 10: mod_base = OTHER; note = 2'-deoxy-2'-fluoroadenosine-3'-phosphate
  modified_base 11: mod_base = OTHER; note = 2'-deoxy-2'-fluoroguanosine-3'-phosphate
  modified_base 12: mod_base = OTHER; note = 2'-O-methyladenosine-3'-phosphate
  modified_base 13: mod_base = OTHER; note = 2'-O-methylguanosine-3'-phosphate
  modified_base 14: mod_base = OTHER; note = 2'-O-methyluridine-3'-phosphate
  modified_base 15: mod_base = OTHER; note = 2'-O-methylguanosine-3'-phosphate
  modified_base 16: mod_base = OTHER; note = 2'-O-methylcytidine-3'-phosphate
  modified_base 17: mod_base = OTHER; note = 2'-O-methyladenosine-3'-phosphate
  modified_base 18: mod_base = OTHER; note = 2'-O-methyladenosine-3'-phosphate
  modified_base 19: mod_base = OTHER; note = 2'-O-methylguanosine-3'-phosphate
  modified_base 20: mod_base = OTHER; note = 2'-O-methyladenosine-3'-phosphate
  modified_base 21: mod_base = OTHER; note = 2'-O-methyluridine-3'-phosphate ((2S,4R)-1-[29-[[2-(acetylamino)-2-deoxy-beta-D-galactopyra nosyl]oxy]-14,14-bis[[3-[[3-[[5-[[2-(acetylamino)-2-deoxy-b eta-D-galactopyranosyl]oxy]-1-oxopentyl]amino]propyl]amino] -3-oxopropoxy]methyl]-1,12,19,25-tetraoxo-16-oxa-13,20,24-t riazanonacos-1-yl]-4-hydroxy-2-pyrrolidinyl)methyl ester
gtatctctcagagtgcaagat

SEQ ID NO: 292 - RNA, 21 nt, synthetic construct
  source 1..21: mol_type = other RNA
  modified_base 1: mod_base = OTHER; note = 2'-O-methyladenosine-3'-phosphorothioate
  modified_base 2: mod_base = OTHER; note = 2'-O-methylcytidine-3'-phosphorothioate
  modified_base 3: mod_base = OTHER; note = 2'-O-methyluridine-3'-phosphate
  modified_base 4: mod_base = OTHER; note = 2'-O-methylguanosine-3'-phosphate
  modified_base 5: mod_base = OTHER; note = 2'-O-methylguanosine-3'-phosphate
  modified_base 6: mod_base = OTHER; note = 2'-O-methylguanosine-3'-phosphate
  modified_base 7: mod_base = OTHER; note = 2'-deoxy-2'-fluoroadenosine-3'-phosphate
  modified_base 8: mod_base = OTHER; note = 2'-O-methyladenosine-3'-phosphate
  modified_base 9: mod_base = OTHER; note = 2'-deoxy-2'-fluorouridine-3'-phosphate
  modified_base 10: mod_base = OTHER; note = 2'-deoxy-2'-fluoroguanosine-3'-phosphate
  modified_base 11: mod_base = OTHER; note = 2'-deoxy-2'-fluoroguanosine-3'-phosphate
  modified_base 12: mod_base = OTHER; note = 2'-O-methyladenosine-3'-phosphate
  modified_base 13: mod_base = OTHER; note = 2'-O-methyladenosine-3'-phosphate
  modified_base 14: mod_base = OTHER; note = 2'-O-methyladenosine-3'-phosphate
  modified_base 15: mod_base = OTHER; note = 2'-O-methylguanosine-3'-phosphate
  modified_base 16: mod_base = OTHER; note = 2'-O-methyladenosine-3'-phosphate
  modified_base 17: mod_base = OTHER; note = 2'-O-methyladenosine-3'-phosphate
  modified_base 18: mod_base = OTHER; note = 2'-O-methylcytidine-3'-phosphate
  modified_base 19: mod_base = OTHER; note = 2'-O-methyluridine-3'-phosphate
  modified_base 20: mod_base = OTHER; note = 2'-O-methyladenosine-3'-phosphate
  modified_base 21: mod_base = OTHER; note = 2'-O-methyluridine-3'-phosphate ((2S,4R)-1-[29-[[2-(acetylamino)-2-deoxy-beta-D-galactopyra nosyl]oxy]-14,14-bis[[3-[[3-[[5-[[2-(acetylamino)-2-deoxy-b eta-D-galactopyranosyl]oxy]-1-oxopentyl]amino]propyl]amino] -3-oxopropoxy]methyl]-1,12,19,25-tetraoxo-16-oxa-13,20,24-t riazanonacos-1-yl]-4-hydroxy-2-pyrrolidinyl)methyl ester
actgggaatggaaagaactat

SEQ ID NO: 293 - RNA, 21 nt, synthetic construct
  source 1..21: mol_type = other RNA
  modified_base 1: mod_base = OTHER; note = 2'-O-methylguanosine-3'-phosphorothioate
  modified_base 2: mod_base = OTHER; note = 2'-O-methylguanosine-3'-phosphorothioate
  modified_base 3: mod_base = OTHER; note = 2'-O-methylguanosine-3'-phosphate
  modified_base 4: mod_base = OTHER; note = 2'-O-methyladenosine-3'-phosphate
  modified_base 5: mod_base = OTHER; note = 2'-O-methylcytidine-3'-phosphate
  modified_base 6: mod_base = OTHER; note = 2'-O-methylguanosine-3'-phosphate
  modified_base 7: mod_base = OTHER; note = 2'-deoxy-2'-fluoroadenosine-3'-phosphate
  modified_base 8: mod_base = OTHER; note = 2'-O-methyluridine-3'-phosphate
  modified_base 9: mod_base = OTHER; note = 2'-deoxy-2'-fluoroguanosine-3'-phosphate
  modified_base 10: mod_base = OTHER; note = 2'-deoxy-2'-fluorouridine-3'-phosphate
  modified_base 11: mod_base = OTHER; note = 2'-deoxy-2'-fluorocytidine-3'-phosphate
  modified_base 12: mod_base = OTHER; note = 2'-O-methylcytidine-3'-phosphate
  modified_base 13: mod_base = OTHER; note = 2'-O-methyladenosine-3'-phosphate
  modified_base 14: mod_base = OTHER; note = 2'-O-methyladenosine-3'-phosphate
  modified_base 15: mod_base = OTHER; note = 2'-O-methyladenosine-3'-phosphate
  modified_base 16: mod_base = OTHER; note = 2'-O-methyladenosine-3'-phosphate
  modified_base 17: mod_base = OTHER; note = 2'-O-methylcytidine-3'-phosphate
  modified_base 18: mod_base = OTHER; note = 2'-O-methyladenosine-3'-phosphate
  modified_base 19: mod_base = OTHER; note = 2'-O-methyladenosine-3'-phosphate
  modified_base 20: mod_base = OTHER; note = 2'-O-methyladenosine-3'-phosphate
  modified_base 21: mod_base = OTHER; note = 2'-O-methyluridine-3'-phosphate ((2S,4R)-1-[29-[[2-(acetylamino)-2-deoxy-beta-D-galactopyra nosyl]oxy]-14,14-bis[[3-[[3-[[5-[[2-(acetylamino)-2-deoxy-b eta-D-galactopyranosyl]oxy]-1-oxopentyl]amino]propyl]amino] -3-oxopropoxy]methyl]-1,12,19,25-tetraoxo-16-oxa-13,20,24-t riazanonacos-1-yl]-4-hydroxy-2-pyrrolidinyl)methyl ester
gggacgatgtccaaaacaaat

SEQ ID NO: 294 - RNA, 21 nt, synthetic construct
  source 1..21: mol_type = other RNA
  modified_base 1: mod_base = OTHER; note = 2'-O-methylguanosine-3'-phosphorothioate
  modified_base 2: mod_base = OTHER; note = 2'-O-methyladenosine-3'-phosphorothioate
  modified_base 3: mod_base = OTHER; note = 2'-O-methylcytidine-3'-phosphate
  modified_base 4: mod_base = OTHER; note = 2'-O-methylcytidine-3'-phosphate
  modified_base 5: mod_base = OTHER; note = 2'-O-methyluridine-3'-phosphate
  modified_base 6: mod_base = OTHER; note = 2'-O-methyladenosine-3'-phosphate
  modified_base 7: mod_base = OTHER; note = 2'-deoxy-2'-fluoroguanosine-3'-phosphate
  modified_base 8: mod_base = OTHER; note = 2'-O-methyladenosine-3'-phosphate
  modified_base 9: mod_base = OTHER; note = 2'-deoxy-2'-fluorouridine-3'-phosphate
  modified_base 10: mod_base = OTHER; note = 2'-deoxy-2'-fluorouridine-3'-phosphate
  modified_base 11: mod_base = OTHER; note = 2'-deoxy-2'-fluorocytidine-3'-phosphate
  modified_base 12: mod_base = OTHER; note = 2'-O-methyluridine-3'-phosphate
  modified_base 13: mod_base = OTHER; note = 2'-O-methylcytidine-3'-phosphate
  modified_base 14: mod_base = OTHER; note = 2'-O-methyladenosine-3'-phosphate
  modified_base 15: mod_base = OTHER; note = 2'-O-methylcytidine-3'-phosphate
  modified_base 16: mod_base = OTHER; note = 2'-O-methylcytidine-3'-phosphate
  modified_base 17: mod_base = OTHER; note = 2'-O-methyluridine-3'-phosphate
  modified_base 18: mod_base = OTHER; note = 2'-O-methylguanosine-3'-phosphate
  modified_base 19: mod_base = OTHER; note = 2'-O-methylcytidine-3'-phosphate
  modified_base 20: mod_base = OTHER; note = 2'-O-methyluridine-3'-phosphate
  modified_base 21: mod_base = OTHER; note = 2'-O-methyluridine-3'-phosphate ((2S,4R)-1-[29-[[2-(acetylamino)-2-deoxy-beta-D-galactopyra nosyl]oxy]-14,14-bis[[3-[[3-[[5-[[2-(acetylamino)-2-deoxy-b eta-D-galactopyranosyl]oxy]-1-oxopentyl]amino]propyl]amino] -3-oxopropoxy]methyl]-1,12,19,25-tetraoxo-16-oxa-13,20,24-t riazanonacos-1-yl]-4-hydroxy-2-pyrrolidinyl)methyl ester
gacctagattctcacctgctt

SEQ ID NO: 295 - RNA, 21 nt, synthetic construct
  source 1..21: mol_type = other RNA
  modified_base 1: mod_base = OTHER; note = 2'-O-methyluridine-3'-phosphorothioate
  modified_base 2: mod_base = OTHER; note = 2'-O-methylguanosine-3'-phosphorothioate
  modified_base 3: mod_base = OTHER; note = 2'-O-methylcytidine-3'-phosphate
  modified_base 4: mod_base = OTHER; note = 2'-O-methyladenosine-3'-phosphate
  modified_base 5: mod_base = OTHER; note = 2'-O-methylguanosine-3'-phosphate
  modified_base 6: mod_base = OTHER; note = 2'-O-methylguanosine-3'-phosphate
  modified_base 7: mod_base = OTHER; note = 2'-deoxy-2'-fluoroadenosine-3'-phosphate
  modified_base 8: mod_base = OTHER; note = 2'-O-methyladenosine-3'-phosphate
  modified_base 9: mod_base = OTHER; note = 2'-deoxy-2'-fluorouridine-3'-phosphate
  modified_base 10: mod_base = OTHER; note = 2'-deoxy-2'-fluorocytidine-3'-phosphate
  modified_base 11: mod_base = OTHER; note = 2'-deoxy-2'-fluorocytidine-3'-phosphate
  modified_base 12: mod_base = OTHER; note = 2'-O-methyladenosine-3'-phosphate
  modified_base 13: mod_base = OTHER; note = 2'-O-methylguanosine-3'-phosphate
  modified_base 14: mod_base = OTHER; note = 2'-O-methyladenosine-3'-phosphate
  modified_base 15: mod_base = OTHER; note = 2'-O-methylcytidine-3'-phosphate
  modified_base 16: mod_base = OTHER; note = 2'-O-methyladenosine-3'-phosphate
  modified_base 17: mod_base = OTHER; note = 2'-O-methyladenosine-3'-phosphate
  modified_base 18: mod_base = OTHER; note = 2'-O-methylcytidine-3'-phosphate
  modified_base 19: mod_base = OTHER; note = 2'-O-methylguanosine-3'-phosphate
  modified_base 20: mod_base = OTHER; note = 2'-O-methyladenosine-3'-phosphate
  modified_base 21: mod_base = OTHER; note = 2'-O-methyluridine-3'-phosphate ((2S,4R)-1-[29-[[2-(acetylamino)-2-deoxy-beta-D-galactopyra nosyl]oxy]-14,14-bis[[3-[[3-[[5-[[2-(acetylamino)-2-deoxy-b eta-D-galactopyranosyl]oxy]-1-oxopentyl]amino]propyl]amino] -3-oxopropoxy]methyl]-1,12,19,25-tetraoxo-16-oxa-13,20,24-t riazanonacos-1-yl]-4-hydroxy-2-pyrrolidinyl)methyl ester
tgcaggaatccagacaacgat

SEQ ID NO: 296 - RNA, 21 nt, synthetic construct
  source 1..21: mol_type = other RNA
  modified_base 1: mod_base = OTHER; note = 2'-O-methylguanosine-3'-phosphorothioate
  modified_base 2: mod_base = OTHER; note = 2'-O-methylcytidine-3'-phosphorothioate
  modified_base 3: mod_base = OTHER; note = 2'-O-methyluridine-3'-phosphate
  modified_base 4: mod_base = OTHER; note = 2'-O-methyladenosine-3'-phosphate
  modified_base 5: mod_base = OTHER; note = 2'-O-methyluridine-3'-phosphate
  modified_base 6: mod_base = OTHER; note = 2'-O-methyladenosine-3'-phosphate
  modified_base 7: mod_base = OTHER; note = 2'-deoxy-2'-fluorocytidine-3'-phosphate
  modified_base 8: mod_base = OTHER; note = 2'-O-methyluridine-3'-phosphate
  modified_base 9: mod_base = OTHER; note = 2'-deoxy-2'-fluoroadenosine-3'-phosphate
  modified_base 10: mod_base = OTHER; note = 2'-deoxy-2'-fluorocytidine-3'-phosphate
  modified_base 11: mod_base = OTHER; note = 2'-deoxy-2'-fluorouridine-3'-phosphate
  modified_base 12: mod_base = OTHER; note = 2'-O-methylguanosine-3'-phosphate
  modified_base 13: mod_base = OTHER; note = 2'-O-methyladenosine-3'-phosphate
  modified_base 14: mod_base = OTHER; note = 2'-O-methyluridine-3'-phosphate
  modified_base 15: mod_base = OTHER; note = 2'-O-methylcytidine-3'-phosphate
  modified_base 16: mod_base = OTHER; note = 2'-O-methylcytidine-3'-phosphate
  modified_base 17: mod_base = OTHER; note = 2'-O-methyladenosine-3'-phosphate
  modified_base 18: mod_base = OTHER; note = 2'-O-methylguanosine-3'-phosphate
  modified_base 19: mod_base = OTHER; note = 2'-O-methyladenosine-3'-phosphate
  modified_base 20: mod_base = OTHER; note = 2'-O-methyladenosine-3'-phosphate
  modified_base 21: mod_base = OTHER; note = 2'-O-methyluridine-3'-phosphate ((2S,4R)-1-[29-[[2-(acetylamino)-2-deoxy-beta-D-galactopyra nosyl]oxy]-14,14-bis[[3-[[3-[[5-[[2-(acetylamino)-2-deoxy-b eta-D-galactopyranosyl]oxy]-1-oxopentyl]amino]propyl]amino] -3-oxopropoxy]methyl]-1,12,19,25-tetraoxo-16-oxa-13,20,24-t riazanonacos-1-yl]-4-hydroxy-2-pyrrolidinyl)methyl ester
gctatactactgatccagaat

SEQ ID NO: 297 - RNA, 21 nt, synthetic construct
  source 1..21: mol_type = other RNA
  modified_base 1: mod_base = OTHER; note = 2'-O-methyladenosine-3'-phosphorothioate
  modified_base 2: mod_base = OTHER; note = 2'-O-methyluridine-3'-phosphorothioate
  modified_base 3: mod_base = OTHER; note = 2'-O-methyladenosine-3'-phosphate
  modified_base 4: mod_base = OTHER; note = 2'-O-methyluridine-3'-phosphate
  modified_base 5: mod_base = OTHER; note = 2'-O-methylguanosine-3'-phosphate
  modified_base 6: mod_base = OTHER; note = 2'-O-methyladenosine-3'-phosphate
  modified_base 7: mod_base = OTHER; note = 2'-deoxy-2'-fluorocytidine-3'-phosphate
  modified_base 8: mod_base = OTHER; note = 2'-O-methyluridine-3'-phosphate
  modified_base 9: mod_base = OTHER; note = 2'-deoxy-2'-fluoroadenosine-3'-phosphate
  modified_base 10: mod_base = OTHER; note = 2'-deoxy-2'-fluorocytidine-3'-phosphate
  modified_base 11: mod_base = OTHER; note = 2'-deoxy-2'-fluorouridine-3'-phosphate
  modified_base 12: mod_base = OTHER; note = 2'-O-methylguanosine-3'-phosphate
  modified_base 13: mod_base = OTHER; note = 2'-O-methylcytidine-3'-phosphate
  modified_base 14: mod_base = OTHER; note = 2'-O-methylguanosine-3'-phosphate
  modified_base 15: mod_base = OTHER; note = 2'-O-methyladenosine-3'-phosphate
  modified_base 16: mod_base = OTHER; note = 2'-O-methylcytidine-3'-phosphate
  modified_base 17: mod_base = OTHER; note = 2'-O-methyladenosine-3'-phosphate
  modified_base 18: mod_base = OTHER; note = 2'-O-methyluridine-3'-phosphate
  modified_base 19: mod_base = OTHER; note = 2'-O-methyluridine-3'-phosphate
  modified_base 20: mod_base = OTHER; note = 2'-O-methylcytidine-3'-phosphate
  modified_base 21: mod_base = OTHER; note = 2'-O-methyluridine-3'-phosphate ((2S,4R)-1-[29-[[2-(acetylamino)-2-deoxy-beta-D-galactopyra nosyl]oxy]-14,14-bis[[3-[[3-[[5-[[2-(acetylamino)-2-deoxy-b eta-D-galactopyranosyl]oxy]-1-oxopentyl]amino]propyl]amino] -3-oxopropoxy]methyl]-1,12,19,25-tetraoxo-16-oxa-13,20,24-t riazanonacos-1-yl]-4-hydroxy-2-pyrrolidinyl)methyl ester
atatgactactgcgacattct

SEQ ID NO: 298 - RNA, 21 nt, synthetic construct
  source 1..21: mol_type = other RNA
  modified_base 1: mod_base = OTHER; note = 2'-O-methyluridine-3'-phosphorothioate
  modified_base 2: mod_base = OTHER; note = 2'-O-methyluridine-3'-phosphorothioate
  modified_base 3: mod_base = OTHER; note = 2'-O-methylcytidine-3'-phosphate
  modified_base 4: mod_base = OTHER; note = 2'-O-methyluridine-3'-phosphate
  modified_base 5: mod_base = OTHER; note = 2'-O-methyluridine-3'-phosphate
  modified_base 6: mod_base = OTHER; note = 2'-O-methylguanosine-3'-phosphate
  modified_base 7: mod_base = OTHER; note = 2'-deoxy-2'-fluoroadenosine-3'-phosphate
  modified_base 8: mod_base = OTHER; note = 2'-O-methylguanosine-3'-phosphate
  modified_base 9: mod_base = OTHER; note = 2'-deoxy-2'-fluorouridine-3'-phosphate
  modified_base 10: mod_base = OTHER; note = 2'-deoxy-2'-fluoroguanosine-3'-phosphate
  modified_base 11: mod_base = OTHER; note = 2'-deoxy-2'-fluorouridine-3'-phosphate
  modified_base 12: mod_base = OTHER; note = 2'-O-methylguanosine-3'-phosphate
  modified_base 13: mod_base = OTHER; note = 2'-O-methyladenosine-3'-phosphate
  modified_base 14: mod_base = OTHER; note = 2'-O-methyladenosine-3'-phosphate
  modified_base 15: mod_base = OTHER; note = 2'-O-methylguanosine-3'-phosphate
  modified_base 16: mod_base = OTHER; note = 2'-O-methyladenosine-3'-phosphate
  modified_base 17: mod_base = OTHER; note = 2'-O-methylguanosine-3'-phosphate
  modified_base 18: mod_base = OTHER; note = 2'-O-methylguanosine-3'-phosphate
  modified_base 19: mod_base = OTHER; note = 2'-O-methyladenosine-3'-phosphate
  modified_base 20: mod_base = OTHER; note = 2'-O-methyladenosine-3'-phosphate
  modified_base 21: mod_base = OTHER; note = 2'-O-methyluridine-3'-phosphate ((2S,4R)-1-[29-[[2-(acetylamino)-2-deoxy-beta-D-galactopyra nosyl]oxy]-14,14-bis[[3-[[3-[[5-[[2-(acetylamino)-2-deoxy-b eta-D-galactopyranosyl]oxy]-1-oxopentyl]amino]propyl]amino] -3-oxopropoxy]methyl]-1,12,19,25-tetraoxo-16-oxa-13,20,24-t riazanonacos-1-yl]-4-hydroxy-2-pyrrolidinyl)methyl ester
ttcttgagtgtgaagaggaat

SEQ ID NO: 299 - RNA, 21 nt, synthetic construct
  source 1..21: mol_type = other RNA
  modified_base 1: mod_base = OTHER; note = 2'-O-methyladenosine-3'-phosphorothioate
  modified_base 2: mod_base = OTHER; note = 2'-O-methylguanosine-3'-phosphorothioate
  modified_base 3: mod_base = OTHER; note = 2'-O-methylguanosine-3'-phosphate
  modified_base 4: mod_base = OTHER; note = 2'-O-methyladenosine-3'-phosphate
  modified_base 5: mod_base = OTHER; note = 2'-O-methyladenosine-3'-phosphate
  modified_base 6: mod_base = OTHER; note = 2'-O-methyluridine-3'-phosphate
  modified_base 7: mod_base = OTHER; note = 2'-deoxy-2'-fluoroguanosine-3'-phosphate
  modified_base 8: mod_base = OTHER; note = 2'-O-methyluridine-3'-phosphate
  modified_base 9: mod_base = OTHER; note = 2'-deoxy-2'-fluoroadenosine-3'-phosphate
  modified_base 10: mod_base = OTHER; note = 2'-deoxy-2'-fluorouridine-3'-phosphate
  modified_base 11: mod_base = OTHER; note = 2'-deoxy-2'-fluoroguanosine-3'-phosphate
  modified_base 12: mod_base = OTHER; note = 2'-O-methylcytidine-3'-phosphate
  modified_base 13: mod_base = OTHER; note = 2'-O-methyladenosine-3'-phosphate
  modified_base 14: mod_base = OTHER; note = 2'-O-methyluridine-3'-phosphate
  modified_base 15: mod_base = OTHER; note = 2'-O-methyluridine-3'-phosphate
  modified_base 16: mod_base = OTHER; note = 2'-O-methylguanosine-3'-phosphate
  modified_base 17: mod_base = OTHER; note = 2'-O-methylcytidine-3'-phosphate
  modified_base 18: mod_base = OTHER; note = 2'-O-methyladenosine-3'-phosphate
  modified_base 19: mod_base = OTHER; note = 2'-O-methylguanosine-3'-phosphate
  modified_base 20: mod_base = OTHER; note = 2'-O-methyluridine-3'-phosphate
  modified_base 21: mod_base = OTHER; note = 2'-O-methyluridine-3'-phosphate ((2S,4R)-1-[29-[[2-(acetylamino)-2-deoxy-beta-D-galactopyra nosyl]oxy]-14,14-bis[[3-[[3-[[5-[[2-(acetylamino)-2-deoxy-b eta-D-galactopyranosyl]oxy]-1-oxopentyl]amino]propyl]amino] -3-oxopropoxy]methyl]-1,12,19,25-tetraoxo-16-oxa-13,20,24-t riazanonacos-1-yl]-4-hydroxy-2-pyrrolidinyl)methyl ester
aggaatgtatgcattgcagtt

SEQ ID NO: 300 - RNA, 21 nt, synthetic construct
  source 1..21: mol_type = other RNA
  modified_base 1: mod_base = OTHER; note = 2'-O-methylcytidine-3'-phosphorothioate
  modified_base 2: mod_base = OTHER; note = 2'-O-methyladenosine-3'-phosphorothioate
  modified_base 3: mod_base = OTHER; note = 2'-O-methylguanosine-3'-phosphate
  modified_base 4: mod_base = OTHER; note = 2'-O-methyluridine-3'-phosphate
  modified_base 5: mod_base = OTHER; note = 2'-O-methylguanosine-3'-phosphate
  modified_base 6: mod_base = OTHER; note = 2'-O-methylguanosine-3'-phosphate
  modified_base 7: mod_base = OTHER; note = 2'-deoxy-2'-fluoroadenosine-3'-phosphate
  modified_base 8: mod_base = OTHER; note = 2'-O-methylguanosine-3'-phosphate
  modified_base 9: mod_base = OTHER; note = 2'-deoxy-2'-fluoroadenosine-3'-phosphate
  modified_base 10: mod_base = OTHER; note = 2'-deoxy-2'-fluoroadenosine-3'-phosphate
  modified_base 11: mod_base = OTHER; note = 2'-deoxy-2'-fluoroadenosine-3'-phosphate
  modified_base 12: mod_base = OTHER; note = 2'-O-methyladenosine-3'-phosphate
  modified_base 13: mod_base = OTHER; note = 2'-O-methylcytidine-3'-phosphate
  modified_base 14: mod_base = OTHER; note = 2'-O-methyluridine-3'-phosphate
  modified_base 15: mod_base = OTHER; note = 2'-O-methyladenosine-3'-phosphate
  modified_base 16: mod_base = OTHER; note = 2'-O-methyluridine-3'-phosphate
  modified_base 17: mod_base = OTHER; note = 2'-O-methylguanosine-3'-phosphate
  modified_base 18: mod_base = OTHER; note = 2'-O-methyladenosine-3'-phosphate
  modified_base 19: mod_base = OTHER; note = 2'-O-methylcytidine-3'-phosphate
  modified_base 20: mod_base = OTHER; note = 2'-O-methylguanosine-3'-phosphate
  modified_base 21: mod_base = OTHER; note = 2'-O-methyluridine-3'-phosphate ((2S,4R)-1-[29-[[2-(acetylamino)-2-deoxy-beta-D-galactopyra nosyl]oxy]-14,14-bis[[3-[[3-[[5-[[2-(acetylamino)-2-deoxy-b eta-D-galactopyranosyl]oxy]-1-oxopentyl]amino]propyl]amino] -3-oxopropoxy]methyl]-1,12,19,25-tetraoxo-16-oxa-13,20,24-t riazanonacos-1-yl]-4-hydroxy-2-pyrrolidinyl)methyl ester
cagtggagaaaactatgacgt

SEQ ID NO: 301 - RNA, 21 nt, synthetic construct
  source 1..21: mol_type = other RNA
  modified_base 1: mod_base = OTHER; note = 2'-O-methylguanosine-3'-phosphorothioate
  modified_base 2: mod_base = OTHER; note = 2'-O-methylguanosine-3'-phosphorothioate
  modified_base 3: mod_base = OTHER; note = 2'-O-methylcytidine-3'-phosphate
  modified_base 4: mod_base = OTHER; note = 2'-O-methyladenosine-3'-phosphate
  modified_base 5: mod_base = OTHER; note = 2'-O-methyladenosine-3'-phosphate
  modified_base 6: mod_base = OTHER; note = 2'-O-methyladenosine-3'-phosphate
  modified_base 7: mod_base = OTHER; note = 2'-deoxy-2'-fluoroadenosine-3'-phosphate
  modified_base 8: mod_base = OTHER; note = 2'-O-methyluridine-3'-phosphate
  modified_base 9: mod_base = OTHER; note = 2'-deoxy-2'-fluorouridine-3'-phosphate
  modified_base 10: mod_base = OTHER; note = 2'-deoxy-2'-fluorouridine-3'-phosphate
  modified_base 11: mod_base = OTHER; note = 2'-deoxy-2'-fluorocytidine-3'-phosphate
  modified_base 12: mod_base = OTHER; note = 2'-O-methylcytidine-3'-phosphate
  modified_base 13: mod_base = OTHER; note = 2'-O-methyladenosine-3'-phosphate
  modified_base 14: mod_base = OTHER; note = 2'-O-methyladenosine-3'-phosphate
  modified_base 15: mod_base = OTHER; note = 2'-O-methylguanosine-3'-phosphate
  modified_base 16: mod_base = OTHER; note = 2'-O-methyladenosine-3'-phosphate
  modified_base 17: mod_base = OTHER; note = 2'-O-methylcytidine-3'-phosphate
  modified_base 18: mod_base = OTHER; note = 2'-O-methylcytidine-3'-phosphate
  modified_base 19: mod_base = OTHER; note = 2'-O-methyladenosine-3'-phosphate
  modified_base 20: mod_base = OTHER; note = 2'-O-methyluridine-3'-phosphate
  modified_base 21: mod_base = OTHER; note = 2'-O-methyluridine-3'-phosphate ((2S,4R)-1-[29-[[2-(acetylamino)-2-deoxy-beta-D-galactopyra nosyl]oxy]-14,14-bis[[3-[[3-[[5-[[2-(acetylamino)-2-deoxy-b eta-D-galactopyranosyl]oxy]-1-oxopentyl]amino]propyl]amino] -3-oxopropoxy]methyl]-1,12,19,25-tetraoxo-16-oxa-13,20,24-t riazanonacos-1-yl]-4-hydroxy-2-pyrrolidinyl)methyl ester
ggcaaaatttccaagaccatt

SEQ ID NO: 302 - RNA, 21 nt, synthetic construct
  source 1..21: mol_type = other RNA
  modified_base 1: mod_base = OTHER; note = 2'-O-methyladenosine-3'-phosphorothioate
  modified_base 2: mod_base = OTHER; note = 2'-O-methylcytidine-3'-phosphorothioate
  modified_base 3: mod_base = OTHER; note = 2'-O-methylguanosine-3'-phosphate
  modified_base 4: mod_base = OTHER; note = 2'-O-methylcytidine-3'-phosphate
  modified_base 5: mod_base = OTHER; note = 2'-O-methyluridine-3'-phosphate
  modified_base 6: mod_base = OTHER; note = 2'-O-methylcytidine-3'-phosphate
  modified_base 7: mod_base = OTHER; note = 2'-deoxy-2'-fluoroadenosine-3'-phosphate
  modified_base 8: mod_base = OTHER; note = 2'-O-methyluridine-3'-phosphate
  modified_base 9: mod_base = OTHER; note = 2'-deoxy-2'-fluoroguanosine-3'-phosphate
  modified_base 10: mod_base = OTHER; note = 2'-deoxy-2'-fluoroguanosine-3'-phosphate
  modified_base 11: mod_base = OTHER; note = 2'-deoxy-2'-fluoroadenosine-3'-phosphate
  modified_base 12: mod_base = OTHER; note = 2'-O-methyluridine-3'-phosphate
  modified_base 13: mod_base = OTHER; note = 2'-O-methyladenosine-3'-phosphate
  modified_base 14: mod_base = OTHER; note = 2'-O-methylcytidine-3'-phosphate
  modified_base 15: mod_base = OTHER; note = 2'-O-methyladenosine-3'-phosphate
  modified_base 16: mod_base = OTHER; note = 2'-O-methyluridine-3'-phosphate
  modified_base 17: mod_base = OTHER; note = 2'-O-methyluridine-3'-phosphate
  modified_base 18: mod_base = OTHER; note = 2'-O-methylcytidine-3'-phosphate
  modified_base 19: mod_base = OTHER; note = 2'-O-methylcytidine-3'-phosphate
  modified_base 20: mod_base = OTHER; note = 2'-O-methyluridine-3'-phosphate
  modified_base 21: mod_base = OTHER; note = 2'-O-methyluridine-3'-phosphate ((2S,4R)-1-[29-[[2-(acetylamino)-2-deoxy-beta-D-galactopyra nosyl]oxy]-14,14-bis[[3-[[3-[[5-[[2-(acetylamino)-2-deoxy-b eta-D-galactopyranosyl]oxy]-1-oxopentyl]amino]propyl]amino] -3-oxopropoxy]methyl]-1,12,19,25-tetraoxo-16-oxa-13,20,24-t riazanonacos-1-yl]-4-hydroxy-2-pyrrolidinyl)methyl ester
acgctcatggatacattcctt

SEQ ID NO: 303 - RNA, 21 nt, synthetic construct
  source 1..21: mol_type = other RNA
  modified_base 1: mod_base = OTHER; note = 2'-O-methyluridine-3'-phosphorothioate
  modified_base 2: mod_base = OTHER; note = 2'-O-methyluridine-3'-phosphorothioate
  modified_base 3: mod_base = OTHER; note = 2'-O-methylcytidine-3'-phosphate
  modified_base 4: mod_base = OTHER; note = 2'-O-methylcytidine-3'-phosphate
  modified_base 5: mod_base = OTHER; note = 2'-O-methyluridine-3'-phosphate
  modified_base 6: mod_base = OTHER; note = 2'-O-methyluridine-3'-phosphate
  modified_base 7: mod_base = OTHER; note = 2'-deoxy-2'-fluorocytidine-3'-phosphate
  modified_base 8: mod_base = OTHER; note = 2'-O-methylcytidine-3'-phosphate
  modified_base 9: mod_base = OTHER; note = 2'-deoxy-2'-fluoroadenosine-3'-phosphate
  modified_base 10: mod_base = OTHER; note = 2'-deoxy-2'-fluoroadenosine-3'-phosphate
  modified_base 11: mod_base = OTHER; note = 2'-deoxy-2'-fluoroadenosine-3'-phosphate
  modified_base 12: mod_base = OTHER; note = 2'-O-methyluridine-3'-phosphate
  modified_base 13: mod_base = OTHER; note = 2'-O-methyluridine-3'-phosphate
  modified_base 14: mod_base = OTHER; note = 2'-O-methyluridine-3'-phosphate
  modified_base 15: mod_base = OTHER; note = 2'-O-methylcytidine-3'-phosphate
  modified_base 16: mod_base = OTHER; note = 2'-O-methylcytidine-3'-phosphate
  modified_base 17: mod_base = OTHER; note = 2'-O-methyladenosine-3'-phosphate
  modified_base 18: mod_base = OTHER; note = 2'-O-methyladenosine-3'-phosphate
  modified_base 19: mod_base = OTHER; note = 2'-O-methyladenosine-3'-phosphate
  modified_base 20: mod_base = OTHER; note = 2'-O-methylcytidine-3'-phosphate
  modified_base 21: mod_base = OTHER; note = 2'-O-methyluridine-3'-phosphate ((2S,4R)-1-[29-[[2-(acetylamino)-2-deoxy-beta-D-galactopyra nosyl]oxy]-14,14-bis[[3-[[3-[[5-[[2-(acetylamino)-2-deoxy-b eta-D-galactopyranosyl]oxy]-1-oxopentyl]amino]propyl]amino] -3-oxopropoxy]methyl]-1,12,19,25-tetraoxo-16-oxa-13,20,24-t riazanonacos-1-yl]-4-hydroxy-2-pyrrolidinyl)methyl ester
ttccttccaaatttccaaact

SEQ ID NO: 304 - RNA, 21 nt, synthetic construct
  source 1..21: mol_type = other RNA
  modified_base 1: mod_base = OTHER; note = 2'-O-methylguanosine-3'-phosphorothioate
  modified_base 2: mod_base = OTHER; note = 2'-O-methyladenosine-3'-phosphorothioate
  modified_base 3: mod_base = OTHER; note = 2'-O-methyladenosine-3'-phosphate
  modified_base 4: mod_base = OTHER; note = 2'-O-methylcytidine-3'-phosphate
  modified_base 5: mod_base = OTHER; note = 2'-O-methylcytidine-3'-phosphate
  modified_base 6: mod_base = OTHER; note = 2'-O-methyluridine-3'-phosphate
  modified_base 7: mod_base = OTHER; note = 2'-deoxy-2'-fluoroguanosine-3'-phosphate
  modified_base 8: mod_base = OTHER; note = 2'-O-methyladenosine-3'-phosphate
  modified_base 9: mod_base = OTHER; note = 2'-deoxy-2'-fluoroadenosine-3'-phosphate
  modified_base 10: mod_base = OTHER; note = 2'-deoxy-2'-fluoroguanosine-3'-phosphate
  modified_base 11: mod_base = OTHER; note = 2'-deoxy-2'-fluoroadenosine-3'-phosphate
  modified_base 12: mod_base = OTHER; note = 2'-O-methyladenosine-3'-phosphate
  modified_base 13: mod_base = OTHER; note = 2'-O-methylguanosine-3'-phosphate
  modified_base 14: mod_base = OTHER; note = 2'-O-methyladenosine-3'-phosphate
  modified_base 15: mod_base = OTHER; note = 2'-O-methyladenosine-3'-phosphate
  modified_base 16: mod_base = OTHER; note = 2'-O-methyluridine-3'-phosphate
  modified_base 17: mod_base = OTHER; note = 2'-O-methyluridine-3'-phosphate
  modified_base 18: mod_base = OTHER; note = 2'-O-methyladenosine-3'-phosphate
  modified_base 19: mod_base = OTHER; note = 2'-O-methylcytidine-3'-phosphate
  modified_base 20: mod_base = OTHER; note = 2'-O-methyluridine-3'-phosphate
  modified_base 21: mod_base = OTHER; note = 2'-O-methyluridine-3'-phosphate ((2S,4R)-1-[29-[[2-(acetylamino)-2-deoxy-beta-D-galactopyra nosyl]oxy]-14,14-bis[[3-[[3-[[5-[[2-(acetylamino)-2-deoxy-b eta-D-galactopyranosyl]oxy]-1-oxopentyl]amino]propyl]amino] -3-oxopropoxy]methyl]-1,12,19,25-tetraoxo-16-oxa-13,20,24-t riazanonacos-1-yl]-4-hydroxy-2-pyrrolidinyl)methyl ester
gaacctgaagaagaattactt

SEQ ID NO: 305 - RNA, 21 nt, synthetic construct
  source 1..21: mol_type = other RNA
  modified_base 1: mod_base = OTHER; note = 2'-O-methylcytidine-3'-phosphorothioate
  modified_base 2: mod_base = OTHER; note = 2'-O-methyluridine-3'-phosphorothioate
  modified_base 3: mod_base = OTHER; note = 2'-O-methyluridine-3'-phosphate
  modified_base 4: mod_base = OTHER; note = 2'-O-methylguanosine-3'-phosphate
  modified_base 5: mod_base = OTHER; note = 2'-O-methylguanosine-3'-phosphate
  modified_base 6: mod_base = OTHER; note = 2'-O-methyluridine-3'-phosphate
  modified_base 7: mod_base = OTHER; note = 2'-deoxy-2'-fluoroguanosine-3'-phosphate
  modified_base 8: mod_base = OTHER; note = 2'-O-methyluridine-3'-phosphate
  modified_base 9: mod_base = OTHER; note = 2'-deoxy-2'-fluorouridine-3'-phosphate
  modified_base 10: mod_base = OTHER; note = 2'-deoxy-2'-fluorouridine-3'-phosphate
  modified_base 11: mod_base = OTHER; note = 2'-deoxy-2'-fluorocytidine-3'-phosphate
  modified_base 12: mod_base = OTHER; note = 2'-O-methyladenosine-3'-phosphate
  modified_base 13: mod_base = OTHER; note = 2'-O-methylcytidine-3'-phosphate
  modified_base 14: mod_base = OTHER; note = 2'-O-methylcytidine-3'-phosphate
  modified_base 15: mod_base = OTHER; note = 2'-O-methyladenosine-3'-phosphate
  modified_base 16: mod_base = OTHER; note = 2'-O-methylcytidine-3'-phosphate
  modified_base 17: mod_base = OTHER; note = 2'-O-methylcytidine-3'-phosphate
  modified_base 18: mod_base = OTHER; note = 2'-O-methylguanosine-3'-phosphate
  modified_base 19: mod_base = OTHER; note = 2'-O-methyladenosine-3'-phosphate
  modified_base 20: mod_base = OTHER; note = 2'-O-methylcytidine-3'-phosphate
  modified_base 21: mod_base = OTHER; note = 2'-O-methyluridine-3'-phosphate ((2S,4R)-1-[29-[[2-(acetylamino)-2-deoxy-beta-D-galactopyra nosyl]oxy]-14,14-bis[[3-[[3-[[5-[[2-(acetylamino)-2-deoxy-b eta-D-galactopyranosyl]oxy]-1-oxopentyl]amino]propyl]amino] -3-oxopropoxy]methyl]-1,12,19,25-tetraoxo-16-oxa-13,20,24-t riazanonacos-1-yl]-4-hydroxy-2-pyrrolidinyl)methyl ester
cttggtgtttcaccaccgact

SEQ ID NO: 306 - RNA, 21 nt, synthetic construct
  source 1..21: mol_type = other RNA
  modified_base 1: mod_base = OTHER; note = 2'-O-methylcytidine-3'-phosphorothioate
  modified_base 2: mod_base = OTHER; note = 2'-O-methyluridine-3'-phosphorothioate
  modified_base 3: mod_base = OTHER; note = 2'-O-methylguanosine-3'-phosphate
  modified_base 4: mod_base = OTHER; note = 2'-O-methylguanosine-3'-phosphate
  modified_base 5: mod_base = OTHER; note = 2'-O-methylguanosine-3'-phosphate
  modified_base 6: mod_base = OTHER; note = 2'-O-methyladenosine-3'-phosphate
  modified_base 7: mod_base = OTHER; note = 2'-deoxy-2'-fluoroadenosine-3'-phosphate
  modified_base 8: mod_base = OTHER; note = 2'-O-methylcytidine-3'-phosphate
  modified_base 9: mod_base = OTHER; note = 2'-deoxy-2'-fluorouridine-3'-phosphate
  modified_base 10: mod_base = OTHER; note = 2'-deoxy-2'-fluorouridine-3'-phosphate
  modified_base 11: mod_base = OTHER; note = 2'-deoxy-2'-fluorouridine-3'-phosphate
  modified_base 12: mod_base = OTHER; note = 2'-O-methylguanosine-3'-phosphate
  modified_base 13: mod_base = OTHER; note = 2'-O-methyluridine-3'-phosphate
  modified_base 14: mod_base = OTHER; note = 2'-O-methylguanosine-3'-phosphate
  modified_base 15: mod_base = OTHER; note = 2'-O-methyladenosine-3'-phosphate
  modified_base 16: mod_base = OTHER; note = 2'-O-methylcytidine-3'-phosphate
  modified_base 17: mod_base = OTHER; note = 2'-O-methyladenosine-3'-phosphate
  modified_base 18: mod_base = OTHER; note = 2'-O-methyluridine-3'-phosphate
  modified_base 19: mod_base = OTHER; note = 2'-O-methylcytidine-3'-phosphate
  modified_base 20: mod_base = OTHER; note = 2'-O-methylcytidine-3'-phosphate
  modified_base 21: mod_base = OTHER; note = 2'-O-methyluridine-3'-phosphate ((2S,4R)-1-[29-[[2-(acetylamino)-2-deoxy-beta-D-galactopyra nosyl]oxy]-14,14-bis[[3-[[3-[[5-[[2-(acetylamino)-2-deoxy-b eta-D-galactopyranosyl]oxy]-1-oxopentyl]amino]propyl]amino] -3-oxopropoxy]methyl]-1,12,19,25-tetraoxo-16-oxa-13,20,24-t riazanonacos-1-yl]-4-hydroxy-2-pyrrolidinyl)methyl ester
ctgggaactttgtgacatcct

SEQ ID NO: 307 - RNA, 21 nt, synthetic construct
  source 1..21: mol_type = other RNA
  modified_base 1: mod_base = OTHER; note = 2'-O-methylcytidine-3'-phosphorothioate
  modified_base 2: mod_base = OTHER; note = 2'-O-methyladenosine-3'-phosphorothioate
  modified_base 3: mod_base = OTHER; note = 2'-O-methylcytidine-3'-phosphate
  modified_base 4: mod_base = OTHER; note = 2'-O-methylcytidine-3'-phosphate
  modified_base 5: mod_base = OTHER; note = 2'-O-methyluridine-3'-phosphate
  modified_base 6: mod_base = OTHER; note = 2'-O-methylcytidine-3'-phosphate
  modified_base 7: mod_base = OTHER; note = 2'-deoxy-2'-fluorocytidine-3'-phosphate
  modified_base 8: mod_base = OTHER; note = 2'-O-methyladenosine-3'-phosphate
  modified_base 9: mod_base = OTHER; note = 2'-deoxy-2'-fluorocytidine-3'-phosphate
  modified_base 10: mod_base = OTHER; note = 2'-deoxy-2'-fluorocytidine-3'-phosphate
  modified_base 11: mod_base = OTHER; note = 2'-deoxy-2'-fluoroadenosine-3'-phosphate
  modified_base 12: mod_base = OTHER; note = 2'-O-methyluridine-3'-phosphate
  modified_base 13: mod_base = OTHER; note = 2'-O-methylcytidine-3'-phosphate
  modified_base 14: mod_base = OTHER; note = 2'-O-methyluridine-3'-phosphate
  modified_base 15: mod_base = OTHER; note = 2'-O-methyluridine-3'-phosphate
  modified_base 16: mod_base = OTHER; note = 2'-O-methylcytidine-3'-phosphate
  modified_base 17: mod_base = OTHER; note = 2'-O-methyluridine-3'-phosphate
  modified_base 18: mod_base = OTHER; note = 2'-O-methylguanosine-3'-phosphate
  modified_base 19: mod_base = OTHER; note = 2'-O-methylguanosine-3'-phosphate
  modified_base 20: mod_base = OTHER; note = 2'-O-methyluridine-3'-phosphate
  modified_base 21: mod_base = OTHER; note = 2'-O-methyluridine-3'-phosphate ((2S,4R)-1-[29-[[2-(acetylamino)-2-deoxy-beta-D-galactopyra nosyl]oxy]-14,14-bis[[3-[[3-[[5-[[2-(acetylamino)-2-deoxy-b eta-D-galactopyranosyl]oxy]-1-oxopentyl]amino]propyl]amino] -3-oxopropoxy]methyl]-1,12,19,25-tetraoxo-16-oxa-13,20,24-t riazanonacos-1-yl]-4-hydroxy-2-pyrrolidinyl)methyl ester
cacctccaccatcttctggtt

SEQ ID NO: 308 - RNA, 21 nt, synthetic construct
  source 1..21: mol_type = other RNA
  modified_base 1: mod_base = OTHER; note = 2'-O-methylcytidine-3'-phosphorothioate
  modified_base 2: mod_base = OTHER; note = 2'-O-methylcytidine-3'-phosphorothioate
  modified_base 3: mod_base = OTHER; note = 2'-O-methylcytidine-3'-phosphate
  modified_base 4: mod_base = OTHER; note = 2'-O-methyladenosine-3'-phosphate
  modified_base 5: mod_base = OTHER; note = 2'-O-methylcytidine-3'-phosphate
  modified_base 6: mod_base = OTHER; note = 2'-O-methylcytidine-3'-phosphate
  modified_base 7: mod_base = OTHER; note = 2'-deoxy-2'-fluorouridine-3'-phosphate
  modified_base 8: mod_base = OTHER; note = 2'-O-methyladenosine-3'-phosphate
  modified_base 9: mod_base = OTHER; note = 2'-deoxy-2'-fluorocytidine-3'-phosphate
  modified_base 10: mod_base = OTHER; note = 2'-deoxy-2'-fluorocytidine-3'-phosphate
  modified_base 11: mod_base = OTHER; note = 2'-deoxy-2'-fluoroadenosine-3'-phosphate
  modified_base 12: mod_base = OTHER; note = 2'-O-methylguanosine-3'-phosphate
  modified_base 13: mod_base = OTHER; note = 2'-O-methyluridine-3'-phosphate
  modified_base 14: mod_base = OTHER; note = 2'-O-methylguanosine-3'-phosphate
  modified_base 15: mod_base = OTHER; note = 2'-O-methyluridine-3'-phosphate
  modified_base 16: mod_base = OTHER; note = 2'-O-methylcytidine-3'-phosphate
  modified_base 17: mod_base = OTHER; note = 2'-O-methyluridine-3'-phosphate
  modified_base 18: mod_base = OTHER; note = 2'-O-methylguanosine-3'-phosphate
  modified_base 19: mod_base = OTHER; note = 2'-O-methyladenosine-3'-phosphate
  modified_base 20: mod_base = OTHER; note = 2'-O-methyladenosine-3'-phosphate
  modified_base 21: mod_base = OTHER; note = 2'-O-methyluridine-3'-phosphate ((2S,4R)-1-[29-[[2-(acetylamino)-2-deoxy-beta-D-galactopyra nosyl]oxy]-14,14-bis[[3-[[3-[[5-[[2-(acetylamino)-2-deoxy-b eta-D-galactopyranosyl]oxy]-1-oxopentyl]amino]propyl]amino] -3-oxopropoxy]methyl]-1,12,19,25-tetraoxo-16-oxa-13,20,24-t riazanonacos-1-yl]-4-hydroxy-2-pyrrolidinyl)methyl ester
cccacctaccagtgtctgaat

SEQ ID NO: 309 - RNA, 21 nt, synthetic construct
  source 1..21: mol_type = other RNA
  modified_base 1: mod_base = OTHER; note = 2'-O-methylcytidine-3'-phosphorothioate
  modified_base 2: mod_base = OTHER; note = 2'-O-methyluridine-3'-phosphorothioate
  modified_base 3: mod_base = OTHER; note = 2'-O-methylguanosine-3'-phosphate
  modified_base 4: mod_base = OTHER; note = 2'-O-methyladenosine-3'-phosphate
  modified_base 5: mod_base = OTHER; note = 2'-O-methyladenosine-3'-phosphate
  modified_base 6: mod_base = OTHER; note = 2'-O-methylguanosine-3'-phosphate
  modified_base 7: mod_base = OTHER; note = 2'-deoxy-2'-fluoroguanosine-3'-phosphate
  modified_base 8: mod_base = OTHER; note = 2'-O-methylguanosine-3'-phosphate
  modified_base 9: mod_base = OTHER; note = 2'-deoxy-2'-fluoroadenosine-3'-phosphate
  modified_base 10: mod_base = OTHER; note = 2'-deoxy-2'-fluoroadenosine-3'-phosphate
  modified_base 11: mod_base = OTHER; note = 2'-deoxy-2'-fluorocytidine-3'-phosphate
  modified_base 12: mod_base = OTHER; note = 2'-O-methyladenosine-3'-phosphate
  modified_base 13: mod_base = OTHER; note = 2'-O-methylguanosine-3'-phosphate
  modified_base 14: mod_base = OTHER; note = 2'-O-methylguanosine-3'-phosphate
  modified_base 15: mod_base = OTHER; note = 2'-O-methyluridine-3'-phosphate
  modified_base 16: mod_base = OTHER; note = 2'-O-methylguanosine-3'-phosphate
  modified_base 17: mod_base = OTHER; note = 2'-O-methyladenosine-3'-phosphate
  modified_base 18: mod_base = OTHER; note = 2'-O-methyladenosine-3'-phosphate
  modified_base 19: mod_base = OTHER; note = 2'-O-methyladenosine-3'-phosphate
  modified_base 20: mod_base = OTHER; note = 2'-O-methyladenosine-3'-phosphate
  modified_base 21: mod_base = OTHER; note = 2'-O-methyluridine-3'-phosphate ((2S,4R)-1-[29-[[2-(acetylamino)-2-deoxy-beta-D-galactopyra nosyl]oxy]-14,14-bis[[3-[[3-[[5-[[2-(acetylamino)-2-deoxy-b eta-D-galactopyranosyl]oxy]-1-oxopentyl]amino]propyl]amino] -3-oxopropoxy]methyl]-1,12,19,25-tetraoxo-16-oxa-13,20,24-t riazanonacos-1-yl]-4-hydroxy-2-pyrrolidinyl)methyl ester
ctgaagggaacaggtgaaaat

SEQ ID NO: 310 - RNA, 21 nt, synthetic construct
  source 1..21: mol_type = other RNA
  modified_base 1: mod_base = OTHER; note = 2'-O-methylguanosine-3'-phosphorothioate
  modified_base 2: mod_base = OTHER; note = 2'-O-methylcytidine-3'-phosphorothioate
  modified_base 3: mod_base = OTHER; note = 2'-O-methylguanosine-3'-phosphate
  modified_base 4: mod_base = OTHER; note = 2'-O-methylguanosine-3'-phosphate
  modified_base 5: mod_base = OTHER; note = 2'-O-methylguanosine-3'-phosphate
  modified_base 6: mod_base = OTHER; note = 2'-O-methyladenosine-3'-phosphate
  modified_base 7: mod_base = OTHER; note = 2'-deoxy-2'-fluoroadenosine-3'-phosphate
  modified_base 8: mod_base = OTHER; note = 2'-O-methyluridine-3'-phosphate
  modified_base 9: mod_base = OTHER; note = 2'-deoxy-2'-fluoroguanosine-3'-phosphate
  modified_base 10: mod_base = OTHER; note = 2'-deoxy-2'-fluorouridine-3'-phosphate
  modified_base 11: mod_base = OTHER; note = 2'-deoxy-2'-fluoroguanosine-3'-phosphate
  modified_base 12: mod_base = OTHER; note = 2'-O-methylguanosine-3'-phosphate
  modified_base 13: mod_base = OTHER; note = 2'-O-methylcytidine-3'-phosphate
  modified_base 14: mod_base = OTHER; note = 2'-O-methyluridine-3'-phosphate
  modified_base 15: mod_base = OTHER; note = 2'-O-methylguanosine-3'-phosphate
  modified_base 16: mod_base = OTHER; note = 2'-O-methyluridine-3'-phosphate
  modified_base 17: mod_base = OTHER; note = 2'-O-methyluridine-3'-phosphate
  modified_base 18: mod_base = OTHER; note = 2'-O-methyladenosine-3'-phosphate
  modified_base 19: mod_base = OTHER; note = 2'-O-methylcytidine-3'-phosphate
  modified_base 20: mod_base = OTHER; note = 2'-O-methylcytidine-3'-phosphate
  modified_base 21: mod_base = OTHER; note = 2'-O-methyluridine-3'-phosphate ((2S,4R)-1-[29-[[2-(acetylamino)-2-deoxy-beta-D-galactopyra nosyl]oxy]-14,14-bis[[3-[[3-[[5-[[2-(acetylamino)-2-deoxy-b eta-D-galactopyranosyl]oxy]-1-oxopentyl]amino]propyl]amino] -3-oxopropoxy]methyl]-1,12,19,25-tetraoxo-16-oxa-13,20,24-t riazanonacos-1-yl]-4-hydroxy-2-pyrrolidinyl)methyl ester
gcgggaatgtggctgttacct

SEQ ID NO: 311 - RNA, 21 nt, synthetic construct
  source 1..21: mol_type = other RNA
  modified_base 1: mod_base = OTHER; note = 2'-O-methyladenosine-3'-phosphorothioate
  modified_base 2: mod_base = OTHER; note = 2'-O-methylcytidine-3'-phosphorothioate
  modified_base 3: mod_base = OTHER; note = 2'-O-methyladenosine-3'-phosphate
  modified_base 4: mod_base = OTHER; note = 2'-O-methylguanosine-3'-phosphate
  modified_base 5: mod_base = OTHER; note = 2'-O-methylguanosine-3'-phosphate
  modified_base 6: mod_base = OTHER; note = 2'-O-methyladenosine-3'-phosphate
  modified_base 7: mod_base = OTHER; note = 2'-deoxy-2'-fluorocytidine-3'-phosphate
  modified_base 8: mod_base = OTHER; note = 2'-O-methyladenosine-3'-phosphate
  modified_base 9: mod_base = OTHER; note = 2'-deoxy-2'-fluorocytidine-3'-phosphate
  modified_base 10: mod_base = OTHER; note = 2'-deoxy-2'-fluorocytidine-3'-phosphate
  modified_base 11: mod_base = OTHER; note = 2'-deoxy-2'-fluoroadenosine-3'-phosphate
  modified_base 12: mod_base = OTHER; note = 2'-O-methylguanosine-3'-phosphate
  modified_base 13: mod_base = OTHER; note = 2'-O-methyladenosine-3'-phosphate
  modified_base 14: mod_base = OTHER; note = 2'-O-methyladenosine-3'-phosphate
  modified_base 15: mod_base = OTHER; note = 2'-O-methyladenosine-3'-phosphate
  modified_base 16: mod_base = OTHER; note = 2'-O-methyladenosine-3'-phosphate
  modified_base 17: mod_base = OTHER; note = 2'-O-methylcytidine-3'-phosphate
  modified_base 18: mod_base = OTHER; note = 2'-O-methyluridine-3'-phosphate
  modified_base 19: mod_base = OTHER; note = 2'-O-methyluridine-3'-phosphate
  modified_base 20: mod_base = OTHER; note = 2'-O-methylcytidine-3'-phosphate
  modified_base 21: mod_base = OTHER; note = 2'-O-methyluridine-3'-phosphate ((2S,4R)-1-[29-[[2-(acetylamino)-2-deoxy-beta-D-galactopyra nosyl]oxy]-14,14-bis[[3-[[3-[[5-[[2-(acetylamino)-2-deoxy-b eta-D-galactopyranosyl]oxy]-1-oxopentyl]amino]propyl]amino] -3-oxopropoxy]methyl]-1,12,19,25-tetraoxo-16-oxa-13,20,24-t riazanonacos-1-yl]-4-hydroxy-2-pyrrolidinyl)methyl ester
acaggacaccagaaaacttct

SEQ ID NO: 312 - RNA, 21 nt, synthetic construct
  source 1..21: mol_type = other RNA
  modified_base 1: mod_base = OTHER; note = 2'-O-methyladenosine-3'-phosphorothioate
  modified_base 2: mod_base = OTHER; note = 2'-O-methyluridine-3'-phosphorothioate
  modified_base 3: mod_base = OTHER; note = 2'-O-methyluridine-3'-phosphate
  modified_base 4: mod_base = OTHER; note = 2'-O-methyluridine-3'-phosphate
  modified_base 5: mod_base = OTHER; note = 2'-O-methylguanosine-3'-phosphate
  modified_base 6: mod_base = OTHER; note = 2'-O-methylguanosine-3'-phosphate
  modified_base 7: mod_base = OTHER; note = 2'-deoxy-2'-fluoroadenosine-3'-phosphate
  modified_base 8: mod_base = OTHER; note = 2'-O-methyluridine-3'-phosphate
  modified_base 9: mod_base = OTHER; note = 2'-deoxy-2'-fluoroguanosine-3'-phosphate
  modified_base 10: mod_base = OTHER; note = 2'-deoxy-2'-fluoroadenosine-3'-phosphate
  modified_base 11: mod_base = OTHER; note = 2'-deoxy-2'-fluoroadenosine-3'-phosphate
  modified_base 12: mod_base = OTHER; note = 2'-O-methyladenosine-3'-phosphate
  modified_base 13: mod_base = OTHER; note = 2'-O-methyladenosine-3'-phosphate
  modified_base 14: mod_base = OTHER; note = 2'-O-methylcytidine-3'-phosphate
  modified_base 15: mod_base = OTHER; note = 2'-O-methyluridine-3'-phosphate
  modified_base 16: mod_base = OTHER; note = 2'-O-methyladenosine-3'-phosphate
  modified_base 17: mod_base = OTHER; note = 2'-O-methylcytidine-3'-phosphate
  modified_base 18: mod_base = OTHER; note = 2'-O-methyluridine-3'-phosphate
  modified_base 19: mod_base = OTHER; note = 2'-O-methylguanosine-3'-phosphate
  modified_base 20: mod_base = OTHER; note = 2'-O-methylcytidine-3'-phosphate
  modified_base 21: mod_base = OTHER; note = 2'-O-methyluridine-3'-phosphate ((2S,4R)-1-[29-[[2-(acetylamino)-2-deoxy-beta-D-galactopyra nosyl]oxy]-14,14-bis[[3-[[3-[[5-[[2-(acetylamino)-2-deoxy-b eta-D-galactopyranosyl]oxy]-1-oxopentyl]amino]propyl]amino] -3-oxopropoxy]methyl]-1,12,19,25-tetraoxo-16-oxa-13,20,24-t riazanonacos-1-yl]-4-hydroxy-2-pyrrolidinyl)methyl ester
atttggatgaaaactactgct

SEQ ID NO: 313 - RNA, 21 nt, synthetic construct
  source 1..21: mol_type = other RNA
  modified_base 1: mod_base = OTHER; note = 2'-O-methyluridine-3'-phosphorothioate
  modified_base 2: mod_base = OTHER; note = 2'-O-methylguanosine-3'-phosphorothioate
  modified_base 3: mod_base = OTHER; note = 2'-O-methylcytidine-3'-phosphate
  modified_base 4: mod_base = OTHER; note = 2'-O-methylcytidine-3'-phosphate
  modified_base 5: mod_base = OTHER; note = 2'-O-methylguanosine-3'-phosphate
  modified_base 6: mod_base = OTHER; note = 2'-O-methylcytidine-3'-phosphate
  modified_base 7: mod_base = OTHER; note = 2'-deoxy-2'-fluoroadenosine-3'-phosphate
  modified_base 8: mod_base = OTHER; note = 2'-O-methyladenosine-3'-phosphate
  modified_base 9: mod_base = OTHER; note = 2'-deoxy-2'-fluorouridine-3'-phosphate
  modified_base 10: mod_base = OTHER; note = 2'-deoxy-2'-fluorocytidine-3'-phosphate
  modified_base 11: mod_base = OTHER; note = 2'-deoxy-2'-fluorocytidine-3'-phosphate
  modified_base 12: mod_base = OTHER; note = 2'-O-methyluridine-3'-phosphate
  modified_base 13: mod_base = OTHER; note = 2'-O-methylguanosine-3'-phosphate
  modified_base 14: mod_base = OTHER; note = 2'-O-methyladenosine-3'-phosphate
  modified_base 15: mod_base = OTHER; note = 2'-O-methylcytidine-3'-phosphate
  modified_base 16: mod_base = OTHER; note = 2'-O-methylguanosine-3'-phosphate
  modified_base 17: mod_base = OTHER; note = 2'-O-methylguanosine-3'-phosphate
  modified_base 18: mod_base = OTHER; note = 2'-O-methyladenosine-3'-phosphate
  modified_base 19: mod_base = OTHER; note = 2'-O-methyladenosine-3'-phosphate
  modified_base 20: mod_base = OTHER; note = 2'-O-methyladenosine-3'-phosphate
  modified_base 21: mod_base = OTHER; note = 2'-O-methyluridine-3'-phosphate ((2S,4R)-1-[29-[[2-(acetylamino)-2-deoxy-beta-D-galactopyra nosyl]oxy]-14,14-bis[[3-[[3-[[5-[[2-(acetylamino)-2-deoxy-b eta-D-galactopyranosyl]oxy]-1-oxopentyl]amino]propyl]amino] -3-oxopropoxy]methyl]-1,12,19,25-tetraoxo-16-oxa-13,20,24-t riazanonacos-1-yl]-4-hydroxy-2-pyrrolidinyl)methyl ester
tgccgcaatcctgacggaaat

SEQ ID NO: 314 - RNA, 21 nt, synthetic construct
  source 1..21: mol_type = other RNA
  modified_base 1: mod_base = OTHER; note = 2'-O-methylguanosine-3'-phosphorothioate
  modified_base 2: mod_base = OTHER; note = 2'-O-methyluridine-3'-phosphorothioate
  modified_base 3: mod_base = OTHER; note = 2'-O-methylguanosine-3'-phosphate
  modified_base 4: mod_base = OTHER; note = 2'-O-methylcytidine-3'-phosphate
  modified_base 5: mod_base = OTHER; note = 2'-O-methylcytidine-3'-phosphate
  modified_base 6: mod_base = OTHER; note = 2'-O-methyladenosine-3'-phosphate
  modified_base 7: mod_base = OTHER; note = 2'-deoxy-2'-fluorouridine-3'-phosphate
  modified_base 8: mod_base = OTHER; note = 2'-O-methyladenosine-3'-phosphate
  modified_base 9: mod_base = OTHER; note = 2'-deoxy-2'-fluorocytidine-3'-phosphate
  modified_base 10: mod_base = OTHER; note = 2'-deoxy-2'-fluoroadenosine-3'-phosphate
  modified_base 11: mod_base = OTHER; note = 2'-deoxy-2'-fluoroadenosine-3'-phosphate
  modified_base 12: mod_base = OTHER; note = 2'-O-methylcytidine-3'-phosphate
  modified_base 13: mod_base = OTHER; note = 2'-O-methylcytidine-3'-phosphate
  modified_base 14: mod_base = OTHER; note = 2'-O-methyladenosine-3'-phosphate
  modified_base 15: mod_base = OTHER; note = 2'-O-methyladenosine-3'-phosphate
  modified_base 16: mod_base = OTHER; note = 2'-O-methylcytidine-3'-phosphate
  modified_base 17: mod_base = OTHER; note = 2'-O-methyladenosine-3'-phosphate
  modified_base 18: mod_base = OTHER; note = 2'-O-methylguanosine-3'-phosphate
  modified_base 19: mod_base = OTHER; note = 2'-O-methylcytidine-3'-phosphate
  modified_base 20: mod_base = OTHER; note = 2'-O-methylcytidine-3'-phosphate
  modified_base 21: mod_base = OTHER; note = 2'-O-methyluridine-3'-phosphate ((2S,4R)-1-[29-[[2-(acetylamino)-2-deoxy-beta-D-galactopyra nosyl]oxy]-14,14-bis[[3-[[3-[[5-[[2-(acetylamino)-2-deoxy-b eta-D-galactopyranosyl]oxy]-1-oxopentyl]amino]propyl]amino] -3-oxopropoxy]methyl]-1,12,19,25-tetraoxo-16-oxa-13,20,24-t riazanonacos-1-yl]-4-hydroxy-2-pyrrolidinyl)methyl ester
gtgccatacaaccaacagcct

SEQ ID NO: 315 - RNA, 21 nt, synthetic construct
  source 1..21: mol_type = other RNA
  modified_base 1: mod_base = OTHER; note = 2'-O-methylguanosine-3'-phosphorothioate
  modified_base 2: mod_base = OTHER; note = 2'-O-methyluridine-3'-phosphorothioate
  modified_base 3: mod_base = OTHER; note = 2'-O-methyladenosine-3'-phosphate
  modified_base 4: mod_base = OTHER; note = 2'-O-methylcytidine-3'-phosphate
  modified_base 5: mod_base = OTHER; note = 2'-O-methyluridine-3'-phosphate
  modified_base 6: mod_base = OTHER; note = 2'-O-methylguanosine-3'-phosphate
  modified_base 7: mod_base = OTHER; note = 2'-deoxy-2'-fluorouridine-3'-phosphate
  modified_base 8: mod_base = OTHER; note = 2'-O-methyladenosine-3'-phosphate
  modified_base 9: mod_base = OTHER; note = 2'-deoxy-2'-fluoroadenosine-3'-phosphate
  modified_base 10: mod_base = OTHER; note = 2'-deoxy-2'-fluoroguanosine-3'-phosphate
  modified_base 11: mod_base = OTHER; note = 2'-deoxy-2'-fluoroadenosine-3'-phosphate
  modified_base 12: mod_base = OTHER; note = 2'-O-methyluridine-3'-phosphate
  modified_base 13: mod_base = OTHER; note = 2'-O-methyladenosine-3'-phosphate
  modified_base 14: mod_base = OTHER; note = 2'-O-methylcytidine-3'-phosphate
  modified_base 15: mod_base = OTHER; note = 2'-O-methylcytidine-3'-phosphate
  modified_base 16: mod_base = OTHER; note = 2'-O-methylguanosine-3'-phosphate
  modified_base 17: mod_base = OTHER; note = 2'-O-methyluridine-3'-phosphate
  modified_base 18: mod_base = OTHER; note = 2'-O-methylcytidine-3'-phosphate
  modified_base 19: mod_base = OTHER; note = 2'-O-methylcytidine-3'-phosphate
  modified_base 20: mod_base = OTHER; note = 2'-O-methyluridine-3'-phosphate
  modified_base 21: mod_base = OTHER; note = 2'-O-methyluridine-3'-phosphate ((2S,4R)-1-[29-[[2-(acetylamino)-2-deoxy-beta-D-galactopyra nosyl]oxy]-14,14-bis[[3-[[3-[[5-[[2-(acetylamino)-2-deoxy-b eta-D-galactopyranosyl]oxy]-1-oxopentyl]amino]propyl]amino] -3-oxopropoxy]methyl]-1,12,19,25-tetraoxo-16-oxa-13,20,24-t riazanonacos-1-yl]-4-hydroxy-2-pyrrolidinyl)methyl ester
gtactgtaagataccgtcctt

SEQ ID NO: 316 - RNA, 21 nt, synthetic construct
  source 1..21: mol_type = other RNA
  modified_base 1: mod_base = OTHER; note = 2'-O-methyladenosine-3'-phosphorothioate
  modified_base 2: mod_base = OTHER; note = 2'-O-methylcytidine-3'-phosphorothioate
  modified_base 3: mod_base = OTHER; note = 2'-O-methyladenosine-3'-phosphate
  modified_base 4: mod_base = OTHER; note = 2'-O-methylguanosine-3'-phosphate
  modified_base 5: mod_base = OTHER; note = 2'-O-methylguanosine-3'-phosphate
  modified_base 6: mod_base = OTHER; note = 2'-O-methyladenosine-3'-phosphate
  modified_base 7: mod_base = OTHER; note = 2'-deoxy-2'-fluoroadenosine-3'-phosphate
  modified_base 8: mod_base = OTHER; note = 2'-O-methyladenosine-3'-phosphate
  modified_base 9: mod_base = OTHER; note = 2'-deoxy-2'-fluoroguanosine-3'-phosphate
  modified_base 10: mod_base = OTHER; note = 2'-deoxy-2'-fluoroadenosine-3'-phosphate
  modified_base 11: mod_base = OTHER; note = 2'-deoxy-2'-fluoroadenosine-3'-phosphate
  modified_base 12: mod_base = OTHER; note = 2'-O-methylguanosine-3'-phosphate
  modified_base 13: mod_base = OTHER; note = 2'-O-methyluridine-3'-phosphate
  modified_base 14: mod_base = OTHER; note = 2'-O-methylguanosine-3'-phosphate
  modified_base 15: mod_base = OTHER; note = 2'-O-methyluridine-3'-phosphate
  modified_base 16: mod_base = OTHER; note = 2'-O-methylcytidine-3'-phosphate
  modified_base 17: mod_base = OTHER; note = 2'-O-methyladenosine-3'-phosphate
  modified_base 18: mod_base = OTHER; note = 2'-O-methylguanosine-3'-phosphate
  modified_base 19: mod_base = OTHER; note = 2'-O-methyluridine-3'-phosphate
  modified_base 20: mod_base = OTHER; note = 2'-O-methylcytidine-3'-phosphate
  modified_base 21: mod_base = OTHER; note = 2'-O-methyluridine-3'-phosphate ((2S,4R)-1-[29-[[2-(acetylamino)-2-deoxy-beta-D-galactopyra nosyl]oxy]-14,14-bis[[3-[[3-[[5-[[2-(acetylamino)-2-deoxy-b eta-D-galactopyranosyl]oxy]-1-oxopentyl]amino]propyl]amino] -3-oxopropoxy]methyl]-1,12,19,25-tetraoxo-16-oxa-13,20,24-t riazanonacos-1-yl]-4-hydroxy-2-pyrrolidinyl)methyl ester
acaggaaagaagtgtcagtct

SEQ ID NO: 317 - RNA, 21 nt, synthetic construct
  source 1..21: mol_type = other RNA
  modified_base 1: mod_base = OTHER; note = 2'-O-methylcytidine-3'-phosphorothioate
  modified_base 2: mod_base = OTHER; note = 2'-O-methyladenosine-3'-phosphorothioate
  modified_base 3: mod_base = OTHER; note = 2'-O-methylguanosine-3'-phosphate
  modified_base 4: mod_base = OTHER; note = 2'-O-methyluridine-3'-phosphate
  modified_base 5: mod_base = OTHER; note = 2'-O-methylcytidine-3'-phosphate
  modified_base 6: mod_base = OTHER; note = 2'-O-methyluridine-3'-phosphate
  modified_base 7: mod_base = OTHER; note = 2'-deoxy-2'-fluorouridine-3'-phosphate
  modified_base 8: mod_base = OTHER; note = 2'-O-methylguanosine-3'-phosphate
  modified_base 9: mod_base = OTHER; note = 2'-deoxy-2'-fluoroguanosine-3'-phosphate
  modified_base 10: mod_base = OTHER; note = 2'-deoxy-2'-fluorouridine-3'-phosphate
  modified_base 11: mod_base = OTHER; note = 2'-deoxy-2'-fluorocytidine-3'-phosphate
  modified_base 12: mod_base = OTHER; note = 2'-O-methyladenosine-3'-phosphate
  modified_base 13: mod_base = OTHER; note = 2'-O-methyluridine-3'-phosphate
  modified_base 14: mod_base = OTHER; note = 2'-O-methylcytidine-3'-phosphate
  modified_base 15: mod_base = OTHER; note = 2'-O-methyluridine-3'-phosphate
  modified_base 16: mod_base = OTHER; note = 2'-O-methyladenosine-3'-phosphate
  modified_base 17: mod_base = OTHER; note = 2'-O-methyluridine-3'-phosphate
  modified_base 18: mod_base = OTHER; note = 2'-O-methylguanosine-3'-phosphate
  modified_base 19: mod_base = OTHER; note = 2'-O-methyladenosine-3'-phosphate
  modified_base 20: mod_base = OTHER; note = 2'-O-methylcytidine-3'-phosphate
  modified_base 21: mod_base = OTHER; note = 2'-O-methyluridine-3'-phosphate ((2S,4R)-1-[29-[[2-(acetylamino)-2-deoxy-beta-D-galactopyra nosyl]oxy]-14,14-bis[[3-[[3-[[5-[[2-(acetylamino)-2-deoxy-b eta-D-galactopyranosyl]oxy]-1-oxopentyl]amino]propyl]amino] -3-oxopropoxy]methyl]-1,12,19,25-tetraoxo-16-oxa-13,20,24-t riazanonacos-1-yl]-4-hydroxy-2-pyrrolidinyl)methyl ester
cagtcttggtcatctatgact

SEQ ID NO: 318 - RNA, 21 nt, synthetic construct
  source 1..21: mol_type = other RNA
  modified_base 1: mod_base = OTHER; note = 2'-O-methyluridine-3'-phosphorothioate
  modified_base 2: mod_base = OTHER; note = 2'-O-methylguanosine-3'-phosphorothioate
  modified_base 3: mod_base = OTHER; note = 2'-O-methylcytidine-3'-phosphate
  modified_base 4: mod_base = OTHER; note = 2'-O-methyluridine-3'-phosphate
  modified_base 5: mod_base = OTHER; note = 2'-O-methylguanosine-3'-phosphate
  modified_base 6: mod_base = OTHER; note = 2'-O-methylguanosine-3'-phosphate
  modified_base 7: mod_base = OTHER; note = 2'-deoxy-2'-fluorocytidine-3'-phosphate
  modified_base 8: mod_base = OTHER; note = 2'-O-methylcytidine-3'-phosphate
  modified_base 9: mod_base = OTHER; note = 2'-deoxy-2'-fluorouridine-3'-phosphate
  modified_base 10: mod_base = OTHER; note = 2'-deoxy-2'-fluoroguanosine-3'-phosphate
  modified_base 11: mod_base = OTHER; note = 2'-deoxy-2'-fluoroadenosine-3'-phosphate
  modified_base 12: mod_base = OTHER; note = 2'-O-methylcytidine-3'-phosphate
  modified_base 13: mod_base = OTHER; note = 2'-O-methyladenosine-3'-phosphate
  modified_base 14: mod_base = OTHER; note = 2'-O-methyladenosine-3'-phosphate
  modified_base 15: mod_base = OTHER; note = 2'-O-methyluridine-3'-phosphate
  modified_base 16: mod_base = OTHER; note = 2'-O-methylguanosine-3'-phosphate
  modified_base 17: mod_base = OTHER; note = 2'-O-methyladenosine-3'-phosphate
  modified_base 18: mod_base = OTHER; note = 2'-O-methyladenosine-3'-phosphate
  modified_base 19: mod_base = OTHER; note = 2'-O-methylcytidine-3'-phosphate
  modified_base 20: mod_base = OTHER; note = 2'-O-methyluridine-3'-phosphate
  modified_base 21: mod_base = OTHER; note = 2'-O-methyluridine-3'-phosphate ((2S,4R)-1-[29-[[2-(acetylamino)-2-deoxy-beta-D-galactopyra nosyl]oxy]-14,14-bis[[3-[[3-[[5-[[2-(acetylamino)-2-deoxy-b eta-D-galactopyranosyl]oxy]-1-oxopentyl]amino]propyl]amino] -3-oxopropoxy]methyl]-1,12,19,25-tetraoxo-16-oxa-13,20,24-t riazanonacos-1-yl]-4-hydroxy-2-pyrrolidinyl)methyl ester
tgctggcctgacaatgaactt

SEQ ID NO: 319 - RNA, 21 nt, synthetic construct
  source 1..21: mol_type = other RNA
  modified_base 1: mod_base = OTHER; note = 2'-O-methylguanosine-3'-phosphorothioate
  modified_base 2: mod_base = OTHER; note = 2'-O-methylguanosine-3'-phosphorothioate
  modified_base 3: mod_base = OTHER; note = 2'-O-methyladenosine-3'-phosphate
  modified_base 4: mod_base = OTHER; note = 2'-O-methyladenosine-3'-phosphate
  modified_base 5: mod_base = OTHER; note = 2'-O-methyluridine-3'-phosphate
  modified_base 6: mod_base = OTHER; note = 2'-O-methylcytidine-3'-phosphate
  modified_base 7: mod_base = OTHER; note = 2'-deoxy-2'-fluorocytidine-3'-phosphate
  modified_base 8: mod_base = OTHER; note = 2'-O-methyladenosine-3'-phosphate
  modified_base 9: mod_base = OTHER; note = 2'-deoxy-2'-fluoroguanosine-3'-phosphate
  modified_base 10: mod_base = OTHER; note = 2'-deoxy-2'-fluoroadenosine-3'-phosphate
  modified_base 11: mod_base = OTHER; note = 2'-deoxy-2'-fluorouridine-3'-phosphate
  modified_base 12: mod_base = OTHER; note = 2'-O-methylguanosine-3'-phosphate
  modified_base 13: mod_base = OTHER; note = 2'-O-methylcytidine-3'-phosphate
  modified_base 14: mod_base = OTHER; note = 2'-O-methylcytidine-3'-phosphate
  modified_base 15: mod_base = OTHER; note = 2'-O-methylguanosine-3'-phosphate
  modified_base 16: mod_base = OTHER; note = 2'-O-methyladenosine-3'-phosphate
  modified_base 17: mod_base = OTHER; note = 2'-O-methyluridine-3'-phosphate
  modified_base 18: mod_base = OTHER; note = 2'-O-methyladenosine-3'-phosphate
  modified_base 19: mod_base = OTHER; note = 2'-O-methyladenosine-3'-phosphate
  modified_base 20: mod_base = OTHER; note = 2'-O-methyladenosine-3'-phosphate
  modified_base 21: mod_base = OTHER; note = 2'-O-methyluridine-3'-phosphate ((2S,4R)-1-[29-[[2-(acetylamino)-2-deoxy-beta-D-galactopyra nosyl]oxy]-14,14-bis[[3-[[3-[[5-[[2-(acetylamino)-2-deoxy-b eta-D-galactopyranosyl]oxy]-1-oxopentyl]amino]propyl]amino] -3-oxopropoxy]methyl]-1,12,19,25-tetraoxo-16-oxa-13,20,24-t riazanonacos-1-yl]-4-hydroxy-2-pyrrolidinyl)methyl ester
ggaatccagatgccgataaat

SEQ ID NO: 320 - RNA, 21 nt, synthetic construct
  source 1..21: mol_type = other RNA
  modified_base 1: mod_base = OTHER; note = 2'-O-methylcytidine-3'-phosphorothioate
  modified_base 2: mod_base = OTHER; note = 2'-O-methyluridine-3'-phosphorothioate
  modified_base 3: mod_base = OTHER; note = 2'-O-methylguanosine-3'-phosphate
  modified_base 4: mod_base = OTHER; note = 2'-O-methylguanosine-3'-phosphate
  modified_base 5: mod_base = OTHER; note = 2'-O-methyluridine-3'-phosphate
  modified_base 6: mod_base = OTHER; note = 2'-O-methylguanosine-3'-phosphate
  modified_base 7: mod_base = OTHER; note = 2'-deoxy-2'-fluorouridine-3'-phosphate
  modified_base 8: mod_base = OTHER; note = 2'-O-methyluridine-3'-phosphate
  modified_base 9: mod_base = OTHER; note = 2'-deoxy-2'-fluorouridine-3'-phosphate
  modified_base 10: mod_base = OTHER; note = 2'-deoxy-2'-fluorouridine-3'-phosphate
  modified_base 11: mod_base = OTHER; note = 2'-deoxy-2'-fluoroadenosine-3'-phosphate
  modified_base 12: mod_base = OTHER; note = 2'-O-methylcytidine-3'-phosphate
  modified_base 13: mod_base = OTHER; note = 2'-O-methylcytidine-3'-phosphate
  modified_base 14: mod_base = OTHER; note = 2'-O-methyladenosine-3'-phosphate
  modified_base 15: mod_base = OTHER; note = 2'-O-methylcytidine-3'-phosphate
  modified_base 16: mod_base = OTHER; note = 2'-O-methyladenosine-3'-phosphate
  modified_base 17: mod_base = OTHER; note = 2'-O-methylguanosine-3'-phosphate
  modified_base 18: mod_base = OTHER; note = 2'-O-methyladenosine-3'-phosphate
  modified_base 19: mod_base = OTHER; note = 2'-O-methylcytidine-3'-phosphate
  modified_base 20: mod_base = OTHER; note = 2'-O-methylcytidine-3'-phosphate
  modified_base 21: mod_base = OTHER; note = 2'-O-methyluridine-3'-phosphate ((2S,4R)-1-[29-[[2-(acetylamino)-2-deoxy-beta-D-galactopyra nosyl]oxy]-14,14-bis[[3-[[3-[[5-[[2-(acetylamino)-2-deoxy-b eta-D-galactopyranosyl]oxy]-1-oxopentyl]amino]propyl]amino] -3-oxopropoxy]methyl]-1,12,19,25-tetraoxo-16-oxa-13,20,24-t riazanonacos-1-yl]-4-hydroxy-2-pyrrolidinyl)methyl ester
ctggtgttttaccacagacct

SEQ ID NO: 321 - RNA, 21 nt, synthetic construct
  source 1..21: mol_type = other RNA
  modified_base 1: mod_base = OTHER; note = 2'-O-methylguanosine-3'-phosphorothioate
  modified_base 2: mod_base = OTHER; note = 2'-O-methylguanosine-3'-phosphorothioate
  modified_base 3: mod_base = OTHER; note = 2'-O-methylguanosine-3'-phosphate
  modified_base 4: mod_base = OTHER; note = 2'-O-methyladenosine-3'-phosphate
  modified_base 5: mod_base = OTHER; note = 2'-O-methylguanosine-3'-phosphate
  modified_base 6: mod_base = OTHER; note = 2'-O-methyluridine-3'-phosphate
  modified_base 7: mod_base = OTHER; note = 2'-deoxy-2'-fluoroadenosine-3'-phosphate
  modified_base 8: mod_base = OTHER; note = 2'-O-methylcytidine-3'-phosphate
  modified_base 9: mod_base = OTHER; note = 2'-deoxy-2'-fluorouridine-3'-phosphate
  modified_base 10: mod_base = OTHER; note = 2'-deoxy-2'-fluoroguanosine-3'-phosphate
  modified_base 11: mod_base = OTHER; note = 2'-deoxy-2'-fluorocytidine-3'-phosphate
  modified_base 12: mod_base = OTHER; note = 2'-O-methyladenosine-3'-phosphate
  modified_base 13: mod_base = OTHER; note = 2'-O-methyladenosine-3'-phosphate
  modified_base 14: mod_base = OTHER; note = 2'-O-methylcytidine-3'-phosphate
  modified_base 15: mod_base = OTHER; note = 2'-O-methylcytidine-3'-phosphate
  modified_base 16: mod_base = OTHER; note = 2'-O-methyluridine-3'-phosphate
  modified_base 17: mod_base = OTHER; note = 2'-O-methylguanosine-3'-phosphate
  modified_base 18: mod_base = OTHER; note = 2'-O-methyladenosine-3'-phosphate
  modified_base 19: mod_base = OTHER; note = 2'-O-methyladenosine-3'-phosphate
  modified_base 20: mod_base = OTHER; note = 2'-O-methyladenosine-3'-phosphate
  modified_base 21: mod_base = OTHER; note = 2'-O-methyluridine-3'-phosphate ((2S,4R)-1-[29-[[2-(acetylamino)-2-deoxy-beta-D-galactopyra nosyl]oxy]-14,14-bis[[3-[[3-[[5-[[2-(acetylamino)-2-deoxy-b eta-D-galactopyranosyl]oxy]-1-oxopentyl]amino]propyl]amino] -3-oxopropoxy]methyl]-1,12,19,25-tetraoxo-16-oxa-13,20,24-t riazanonacos-1-yl]-4-hydroxy-2-pyrrolidinyl)methyl ester
gggagtactgcaacctgaaat

SEQ ID NO: 322 - RNA, 21 nt, synthetic construct
  source 1..21: mol_type = other RNA
  modified_base 1: mod_base = OTHER; note = 2'-O-methylguanosine-3'-phosphorothioate
  modified_base 2: mod_base = OTHER; note = 2'-O-methyladenosine-3'-phosphorothioate
  modified_base 3: mod_base = OTHER; note = 2'-O-methyladenosine-3'-phosphate
  modified_base 4: mod_base = OTHER; note = 2'-O-methylcytidine-3'-phosphate
  modified_base 5: mod_base = OTHER; note = 2'-O-methyladenosine-3'-phosphate
  modified_base 6: mod_base = OTHER; note = 2'-O-methylguanosine-3'-phosphate
  modified_base 7: mod_base = OTHER; note = 2'-deoxy-2'-fluoroadenosine-3'-phosphate
  modified_base 8: mod_base = OTHER; note = 2'-O-methyladenosine-3'-phosphate
  modified_base 9: mod_base = OTHER; note = 2'-deoxy-2'-fluoroguanosine-3'-phosphate
  modified_base 10: mod_base = OTHER; note = 2'-deoxy-2'-fluorocytidine-3'-phosphate
  modified_base 11: mod_base = OTHER; note = 2'-deoxy-2'-fluoroguanosine-3'-phosphate
  modified_base 12: mod_base = OTHER; note = 2'-O-methyladenosine-3'-phosphate
  modified_base 13: mod_base = OTHER; note = 2'-O-methylguanosine-3'-phosphate
  modified_base 14: mod_base = OTHER; note = 2'-O-methyluridine-3'-phosphate
  modified_base 15: mod_base = OTHER; note = 2'-O-methylguanosine-3'-phosphate
  modified_base 16: mod_base = OTHER; note = 2'-O-methyluridine-3'-phosphate
  modified_base 17: mod_base = OTHER; note = 2'-O-methyluridine-3'-phosphate
  modified_base 18: mod_base = OTHER; note = 2'-O-methylguanosine-3'-phosphate
  modified_base 19: mod_base = OTHER; note = 2'-O-methyluridine-3'-phosphate
  modified_base 20: mod_base = OTHER; note = 2'-O-methyladenosine-3'-phosphate
  modified_base 21: mod_base = OTHER; note = 2'-O-methyluridine-3'-phosphate ((2S,4R)-1-[29-[[2-(acetylamino)-2-deoxy-beta-D-galactopyra nosyl]oxy]-14,14-bis[[3-[[3-[[5-[[2-(acetylamino)-2-deoxy-b eta-D-galactopyranosyl]oxy]-1-oxopentyl]amino]propyl]amino] -3-oxopropoxy]methyl]-1,12,19,25-tetraoxo-16-oxa-13,20,24-t riazanonacos-1-yl]-4-hydroxy-2-pyrrolidinyl)methyl ester
gaacagaagcgagtgttgtat

SEQ ID NO: 323 - RNA, 21 nt, synthetic construct
  source 1..21: mol_type = other RNA
  modified_base 1: mod_base = OTHER; note = 2'-O-methylcytidine-3'-phosphorothioate
  modified_base 2: mod_base = OTHER; note = 2'-O-methylcytidine-3'-phosphorothioate
  modified_base 3: mod_base = OTHER; note = 2'-O-methylguanosine-3'-phosphate
  modified_base 4: mod_base = OTHER; note = 2'-O-methylcytidine-3'-phosphate
  modified_base 5: mod_base = OTHER; note = 2'-O-methylcytidine-3'-phosphate
  modified_base 6: mod_base = OTHER; note = 2'-O-methyluridine-3'-phosphate
  modified_base 7: mod_base = OTHER; note = 2'-deoxy-2'-fluoroguanosine-3'-phosphate
  modified_base 8: mod_base = OTHER; note = 2'-O-methyluridine-3'-phosphate
  modified_base 9: mod_base = OTHER; note = 2'-deoxy-2'-fluorouridine-3'-phosphate
  modified_base 10: mod_base = OTHER; note = 2'-deoxy-2'-fluoroguanosine-3'-phosphate
  modified_base 11: mod_base = OTHER; note = 2'-deoxy-2'-fluorouridine-3'-phosphate
  modified_base 12: mod_base = OTHER; note = 2'-O-methylcytidine-3'-phosphate
  modified_base 13: mod_base = OTHER; note = 2'-O-methylcytidine-3'-phosphate
  modified_base 14: mod_base = OTHER; note = 2'-O-methyluridine-3'-phosphate
  modified_base 15: mod_base = OTHER; note = 2'-O-methylguanosine-3'-phosphate
  modified_base 16: mod_base = OTHER; note = 2'-O-methylcytidine-3'-phosphate
  modified_base 17: mod_base = OTHER; note = 2'-O-methyluridine-3'-phosphate
  modified_base 18: mod_base = OTHER; note = 2'-O-methyluridine-3'-phosphate
  modified_base 19: mod_base = OTHER; note = 2'-O-methylcytidine-3'-phosphate
  modified_base 20: mod_base = OTHER; note = 2'-O-methylcytidine-3'-phosphate
  modified_base 21: mod_base = OTHER; note = 2'-O-methyluridine-3'-phosphate ((2S,4R)-1-[29-[[2-(acetylamino)-2-deoxy-beta-D-galactopyra nosyl]oxy]-14,14-bis[[3-[[3-[[5-[[2-(acetylamino)-2-deoxy-b eta-D-galactopyranosyl]oxy]-1-oxopentyl]amino]propyl]amino] -3-oxopropoxy]methyl]-1,12,19,25-tetraoxo-16-oxa-13,20,24-t riazanonacos-1-yl]-4-hydroxy-2-pyrrolidinyl)methyl ester
ccgcctgttgtcctgcttcct

SEQ ID NO: 324 - RNA, 21 nt, synthetic construct
  source 1..21: mol_type = other RNA
  modified_base 1: mod_base = OTHER; note = 2'-O-methyluridine-3'-phosphorothioate
  modified_base 2: mod_base = OTHER; note = 2'-O-methylcytidine-3'-phosphorothioate
  modified_base 3: mod_base = OTHER; note = 2'-O-methylcytidine-3'-phosphate
  modified_base 4: mod_base = OTHER; note = 2'-O-methyladenosine-3'-phosphate
  modified_base 5: mod_base = OTHER; note = 2'-O-methylguanosine-3'-phosphate
  modified_base 6: mod_base = OTHER; note = 2'-O-methyladenosine-3'-phosphate
  modified_base 7: mod_base = OTHER; note = 2'-deoxy-2'-fluorouridine-3'-phosphate
  modified_base 8: mod_base = OTHER; note = 2'-O-methylguanosine-3'-phosphate
  modified_base 9: mod_base = OTHER; note = 2'-deoxy-2'-fluorouridine-3'-phosphate
  modified_base 10: mod_base = OTHER; note = 2'-deoxy-2'-fluoroadenosine-3'-phosphate
  modified_base 11: mod_base = OTHER; note = 2'-deoxy-2'-fluoroguanosine-3'-phosphate
  modified_base 12: mod_base = OTHER; note = 2'-O-methyladenosine-3'-phosphate
  modified_base 13: mod_base = OTHER; note = 2'-O-methylguanosine-3'-phosphate
  modified_base 14: mod_base = OTHER; note = 2'-O-methyladenosine-3'-phosphate
  modified_base 15: mod_base = OTHER; note = 2'-O-methylcytidine-3'-phosphate
  modified_base 16: mod_base = OTHER; note = 2'-O-methyluridine-3'-phosphate
  modified_base 17: mod_base = OTHER; note = 2'-O-methylcytidine-3'-phosphate
  modified_base 18: mod_base = OTHER; note = 2'-O-methylcytidine-3'-phosphate
  modified_base 19: mod_base = OTHER; note = 2'-O-methyluridine-3'-phosphate
  modified_base 20: mod_base = OTHER; note = 2'-O-methyluridine-3'-phosphate
  modified_base 21: mod_base = OTHER; note = 2'-O-methyluridine-3'-phosphate ((2S,4R)-1-[29-[[2-(acetylamino)-2-deoxy-beta-D-galactopyra nosyl]oxy]-14,14-bis[[3-[[3-[[5-[[2-(acetylamino)-2-deoxy-b eta-D-galactopyranosyl]oxy]-1-oxopentyl]amino]propyl]amino] -3-oxopropoxy]methyl]-1,12,19,25-tetraoxo-16-oxa-13,20,24-t riazanonacos-1-yl]-4-hydroxy-2-pyrrolidinyl)methyl ester
tccagatgtagagactccttt

SEQ ID NO: 325 - RNA, 21 nt, synthetic construct
  source 1..21: mol_type = other RNA
  modified_base 1: mod_base = OTHER; note = 2'-O-methylcytidine-3'-phosphorothioate
  modified_base 2: mod_base = OTHER; note = 2'-O-methylcytidine-3'-phosphorothioate
  modified_base 3: mod_base = OTHER; note = 2'-O-methylguanosine-3'-phosphate
  modified_base 4: mod_base = OTHER; note = 2'-O-methyladenosine-3'-phosphate
  modified_base 5: mod_base = OTHER; note = 2'-O-methyladenosine-3'-phosphate
  modified_base 6: mod_base = OTHER; note = 2'-O-methylguanosine-3'-phosphate
  modified_base 7: mod_base = OTHER; note = 2'-deoxy-2'-fluoroadenosine-3'-phosphate
  modified_base 8: mod_base = OTHER; note = 2'-O-methyladenosine-3'-phosphate
  modified_base 9: mod_base = OTHER; note = 2'-deoxy-2'-fluoroguanosine-3'-phosphate
  modified_base 10: mod_base = OTHER; note = 2'-deoxy-2'-fluoroadenosine-3'-phosphate
  modified_base 11: mod_base = OTHER; note = 2'-deoxy-2'-fluorocytidine-3'-phosphate
  modified_base 12: mod_base = OTHER; note = 2'-O-methyluridine-3'-phosphate
  modified_base 13: mod_base = OTHER; note = 2'-O-methylguanosine-3'-phosphate
  modified_base 14: mod_base = OTHER; note = 2'-O-methyluridine-3'-phosphate
  modified_base 15: mod_base = OTHER; note = 2'-O-methyladenosine-3'-phosphate
  modified_base 16: mod_base = OTHER; note = 2'-O-methyluridine-3'-phosphate
  modified_base 17: mod_base = OTHER; note = 2'-O-methylguanosine-3'-phosphate
  modified_base 18: mod_base = OTHER; note = 2'-O-methyluridine-3'-phosphate
  modified_base 19: mod_base = OTHER; note = 2'-O-methyluridine-3'-phosphate
  modified_base 20: mod_base = OTHER; note = 2'-O-methyluridine-3'-phosphate
  modified_base 21: mod_base = OTHER; note = 2'-O-methyluridine-3'-phosphate ((2S,4R)-1-[29-[[2-(acetylamino)-2-deoxy-beta-D-galactopyra nosyl]oxy]-14,14-bis[[3-[[3-[[5-[[2-(acetylamino)-2-deoxy-b eta-D-galactopyranosyl]oxy]-1-oxopentyl]amino]propyl]amino] -3-oxopropoxy]methyl]-1,12,19,25-tetraoxo-16-oxa-13,20,24-t riazanonacos-1-yl]-4-hydroxy-2-pyrrolidinyl)methyl ester
ccgaagaagactgtatgtttt

SEQ ID NO: 326 - RNA, 21 nt, synthetic construct
  source 1..21: mol_type = other RNA
  modified_base 1: mod_base = OTHER; note = 2'-O-methyluridine-3'-phosphorothioate
  modified_base 2: mod_base = OTHER; note = 2'-O-methyladenosine-3'-phosphorothioate
  modified_base 3: mod_base = OTHER; note = 2'-O-methylguanosine-3'-phosphate
  modified_base 4: mod_base = OTHER; note = 2'-O-methyladenosine-3'-phosphate
  modified_base 5: mod_base = OTHER; note = 2'-O-methylcytidine-3'-phosphate
  modified_base 6: mod_base = OTHER; note = 2'-O-methyladenosine-3'-phosphate
  modified_base 7: mod_base = OTHER; note = 2'-deoxy-2'-fluorocytidine-3'-phosphate
  modified_base 8: mod_base = OTHER; note = 2'-O-methyladenosine-3'-phosphate
  modified_base 9: mod_base = OTHER; note = 2'-deoxy-2'-fluoroguanosine-3'-phosphate
  modified_base 10: mod_base = OTHER; note = 2'-deoxy-2'-fluorocytidine-3'-phosphate
  modified_base 11: mod_base = OTHER; note = 2'-deoxy-2'-fluoroadenosine-3'-phosphate
  modified_base 12: mod_base = OTHER; note = 2'-O-methyluridine-3'-phosphate
  modified_base 13: mod_base = OTHER; note = 2'-O-methyluridine-3'-phosphate
  modified_base 14: mod_base = OTHER; note = 2'-O-methyluridine-3'-phosphate
  modified_base 15: mod_base = OTHER; note = 2'-O-methyluridine-3'-phosphate
  modified_base 16: mod_base = OTHER; note = 2'-O-methylcytidine-3'-phosphate
  modified_base 17: mod_base = OTHER; note = 2'-O-methyladenosine-3'-phosphate
  modified_base 18: mod_base = OTHER; note = 2'-O-methylcytidine-3'-phosphate
  modified_base 19: mod_base = OTHER; note = 2'-O-methyluridine-3'-phosphate
  modified_base 20: mod_base = OTHER; note = 2'-O-methylcytidine-3'-phosphate
  modified_base 21: mod_base = OTHER; note = 2'-O-methyluridine-3'-phosphate ((2S,4R)-1-[29-[[2-(acetylamino)-2-deoxy-beta-D-galactopyra nosyl]oxy]-14,14-bis[[3-[[3-[[5-[[2-(acetylamino)-2-deoxy-b eta-D-galactopyranosyl]oxy]-1-oxopentyl]amino]propyl]amino] -3-oxopropoxy]methyl]-1,12,19,25-tetraoxo-16-oxa-13,20,24-t riazanonacos-1-yl]-4-hydroxy-2-pyrrolidinyl)methyl ester
tagacacagcattttcactct

SEQ ID NO: 327 - RNA, 21 nt, synthetic construct
  source 1..21: mol_type = other RNA
  modified_base 1: mod_base = OTHER; note = 2'-O-methylcytidine-3'-phosphorothioate
  modified_base 2: mod_base = OTHER; note = 2'-O-methyladenosine-3'-phosphorothioate
  modified_base 3: mod_base = OTHER; note = 2'-O-methylcytidine-3'-phosphate
  modified_base 4: mod_base = OTHER; note = 2'-O-methyluridine-3'-phosphate
  modified_base 5: mod_base = OTHER; note = 2'-O-methylcytidine-3'-phosphate
  modified_base 6: mod_base = OTHER; note = 2'-O-methylcytidine-3'-phosphate
  modified_base 7: mod_base = OTHER; note = 2'-deoxy-2'-fluoroadenosine-3'-phosphate
  modified_base 8: mod_base = OTHER; note = 2'-O-methylguanosine-3'-phosphate
  modified_base 9: mod_base = OTHER; note = 2'-deoxy-2'-fluoroadenosine-3'-phosphate
  modified_base 10: mod_base = OTHER; note = 2'-deoxy-2'-fluoroguanosine-3'-phosphate
  modified_base 11: mod_base = OTHER; note = 2'-deoxy-2'-fluoroadenosine-3'-phosphate
  modified_base 12: mod_base = OTHER; note = 2'-O-methylcytidine-3'-phosphate
  modified_base 13: mod_base = OTHER; note = 2'-O-methyladenosine-3'-phosphate
  modified_base 14: mod_base = OTHER; note = 2'-O-methyladenosine-3'-phosphate
  modified_base 15: mod_base = OTHER; note = 2'-O-methyladenosine-3'-phosphate
  modified_base 16: mod_base = OTHER; note = 2'-O-methyluridine-3'-phosphate
  modified_base 17: mod_base = OTHER; note = 2'-O-methylcytidine-3'-phosphate
  modified_base 18: mod_base = OTHER; note = 2'-O-methylcytidine-3'-phosphate
  modified_base 19: mod_base = OTHER; note = 2'-O-methyladenosine-3'-phosphate
  modified_base 20: mod_base = OTHER; note = 2'-O-methylcytidine-3'-phosphate
  modified_base 21: mod_base = OTHER; note = 2'-O-methyluridine-3'-phosphate ((2S,4R)-1-[29-[[2-(acetylamino)-2-deoxy-beta-D-galactopyra nosyl]oxy]-14,14-bis[[3-[[3-[[5-[[2-(acetylamino)-2-deoxy-b eta-D-galactopyranosyl]oxy]-1-oxopentyl]amino]propyl]amino] -3-oxopropoxy]methyl]-1,12,19,25-tetraoxo-16-oxa-13,20,24-t riazanonacos-1-yl]-4-hydroxy-2-pyrrolidinyl)methyl ester
cactccagagacaaatccact

SEQ ID NO: 328 - RNA, 21 nt, synthetic construct
  source 1..21: mol_type = other RNA
  modified_base 1: mod_base = OTHER; note = 2'-O-methylguanosine-3'-phosphorothioate
  modified_base 2: mod_base = OTHER; note = 2'-O-methylcytidine-3'-phosphorothioate
  modified_base 3: mod_base = OTHER; note = 2'-O-methylcytidine-3'-phosphate
  modified_base 4: mod_base = OTHER; note = 2'-O-methylguanosine-3'-phosphate
  modified_base 5: mod_base = OTHER; note = 2'-O-methyluridine-3'-phosphate
  modified_base 6: mod_base = OTHER; note = 2'-O-methyladenosine-3'-phosphate
  modified_base 7: mod_base = OTHER; note = 2'-deoxy-2'-fluoroadenosine-3'-phosphate
  modified_base 8: mod_base = OTHER; note = 2'-O-methylcytidine-3'-phosphate
  modified_base 9: mod_base = OTHER; note = 2'-deoxy-2'-fluorocytidine-3'-phosphate
  modified_base 10: mod_base = OTHER; note = 2'-deoxy-2'-fluorocytidine-3'-phosphate
  modified_base 11: mod_base = OTHER; note = 2'-deoxy-2'-fluorouridine-3'-phosphate
  modified_base 12: mod_base = OTHER; note = 2'-O-methylguanosine-3'-phosphate
  modified_base 13: mod_base = OTHER; note = 2'-O-methyladenosine-3'-phosphate
  modified_base 14: mod_base = OTHER; note = 2'-O-methyluridine-3'-phosphate
  modified_base 15: mod_base = OTHER; note = 2'-O-methylguanosine-3'-phosphate
  modified_base 16: mod_base = OTHER; note = 2'-O-methylguanosine-3'-phosphate
  modified_base 17: mod_base = OTHER; note = 2'-O-methyluridine-3'-phosphate
  modified_base 18: mod_base = OTHER; note = 2'-O-methylguanosine-3'-phosphate
  modified_base 19: mod_base = OTHER; note = 2'-O-methyladenosine-3'-phosphate
  modified_base 20: mod_base = OTHER; note = 2'-O-methyluridine-3'-phosphate
  modified_base 21: mod_base = OTHER; note = 2'-O-methyluridine-3'-phosphate ((2S,4R)-1-[29-[[2-(acetylamino)-2-deoxy-beta-D-galactopyra nosyl]oxy]-14,14-bis[[3-[[3-[[5-[[2-(acetylamino)-2-deoxy-b eta-D-galactopyranosyl]oxy]-1-oxopentyl]amino]propyl]amino] -3-oxopropoxy]methyl]-1,12,19,25-tetraoxo-16-oxa-13,20,24-t riazanonacos-1-yl]-4-hydroxy-2-pyrrolidinyl)methyl ester
gccgtaaccctgatggtgatt

SEQ ID NO: 329 - RNA, 21 nt, synthetic construct
  source 1..21: mol_type = other RNA
  modified_base 1: mod_base = OTHER; note = 2'-O-methylguanosine-3'-phosphorothioate
  modified_base 2: mod_base = OTHER; note = 2'-O-methyluridine-3'-phosphorothioate
  modified_base 3: mod_base = OTHER; note = 2'-O-methylguanosine-3'-phosphate
  modified_base 4: mod_base = OTHER; note = 2'-O-methylcytidine-3'-phosphate
  modified_base 5: mod_base = OTHER; note = 2'-O-methyluridine-3'-phosphate
  modified_base 6: mod_base = OTHER; note = 2'-O-methyladenosine-3'-phosphate
  modified_base 7: mod_base = OTHER; note = 2'-deoxy-2'-fluorocytidine-3'-phosphate
  modified_base 8: mod_base = OTHER; note = 2'-O-methyladenosine-3'-phosphate
  modified_base 9: mod_base = OTHER; note = 2'-deoxy-2'-fluorocytidine-3'-phosphate
  modified_base 10: mod_base = OTHER; note = 2'-deoxy-2'-fluoroguanosine-3'-phosphate
  modified_base 11: mod_base = OTHER; note = 2'-deoxy-2'-fluoroadenosine-3'-phosphate
  modified_base 12: mod_base = OTHER; note = 2'-O-methylcytidine-3'-phosphate
  modified_base 13: mod_base = OTHER; note = 2'-O-methyladenosine-3'-phosphate
  modified_base 14: mod_base = OTHER; note = 2'-O-methyladenosine-3'-phosphate
  modified_base 15: mod_base = OTHER; note = 2'-O-methyladenosine-3'-phosphate
  modified_base 16: mod_base = OTHER; note = 2'-O-methyluridine-3'-phosphate
  modified_base 17: mod_base = OTHER; note = 2'-O-methylcytidine-3'-phosphate
  modified_base 18: mod_base = OTHER; note = 2'-O-methylcytidine-3'-phosphate
  modified_base 19: mod_base = OTHER; note = 2'-O-methyladenosine-3'-phosphate
  modified_base 20: mod_base = OTHER; note = 2'-O-methyladenosine-3'-phosphate
  modified_base 21: mod_base = OTHER; note = 2'-O-methyluridine-3'-phosphate ((2S,4R)-1-[29-[[2-(acetylamino)-2-deoxy-beta-D-galactopyra nosyl]oxy]-14,14-bis[[3-[[3-[[5-[[2-(acetylamino)-2-deoxy-b eta-D-galactopyranosyl]oxy]-1-oxopentyl]amino]propyl]amino] -3-oxopropoxy]methyl]-1,12,19,25-tetraoxo-16-oxa-13,20,24-t riazanonacos-1-yl]-4-hydroxy-2-pyrrolidinyl)methyl ester
gtgctacacgacaaatccaat

SEQ ID NO: 330 - RNA, 21 nt, synthetic construct
  source 1..21: mol_type = other RNA
  modified_base 1: mod_base = OTHER; note = 2'-O-methyluridine-3'-phosphorothioate
  modified_base 2: mod_base = OTHER; note = 2'-O-methylcytidine-3'-phosphorothioate
  modified_base 3: mod_base = OTHER; note = 2'-O-methylcytidine-3'-phosphate
  modified_base 4: mod_base = OTHER; note = 2'-O-methyladenosine-3'-phosphate
  modified_base 5: mod_base = OTHER; note = 2'-O-methyladenosine-3'-phosphate
  modified_base 6: mod_base = OTHER; note = 2'-O-methylguanosine-3'-phosphate
  modified_base 7: mod_base = OTHER; note = 2'-deoxy-2'-fluoroadenosine-3'-phosphate
  modified_base 8: mod_base = OTHER; note = 2'-O-methyladenosine-3'-phosphate
  modified_base 9: mod_base = OTHER; note = 2'-deoxy-2'-fluoroadenosine-3'-phosphate
  modified_base 10: mod_base = OTHER; note = 2'-deoxy-2'-fluoroadenosine-3'-phosphate
  modified_base 11: mod_base = OTHER; note = 2'-deoxy-2'-fluorocytidine-3'-phosphate
  modified_base 12: mod_base = OTHER; note = 2'-O-methyluridine-3'-phosphate
  modified_base 13: mod_base = OTHER; note = 2'-O-methyluridine-3'-phosphate
  modified_base 14: mod_base = OTHER; note = 2'-O-methyluridine-3'-phosphate
  modified_base 15: mod_base = OTHER; note = 2'-O-methyladenosine-3'-phosphate
  modified_base 16: mod_base = OTHER; note = 2'-O-methylcytidine-3'-phosphate
  modified_base 17: mod_base = OTHER; note = 2'-O-methylguanosine-3'-phosphate
  modified_base 18: mod_base = OTHER; note = 2'-O-methyladenosine-3'-phosphate
  modified_base 19: mod_base = OTHER; note = 2'-O-methylcytidine-3'-phosphate
  modified_base 20: mod_base = OTHER; note = 2'-O-methyluridine-3'-phosphate
  modified_base 21: mod_base = OTHER; note = 2'-O-methyluridine-3'-phosphate ((2S,4R)-1-[29-[[2-(acetylamino)-2-deoxy-beta-D-galactopyra nosyl]oxy]-14,14-bis[[3-[[3-[[5-[[2-(acetylamino)-2-deoxy-b eta-D-galactopyranosyl]oxy]-1-oxopentyl]amino]propyl]amino] -3-oxopropoxy]methyl]-1,12,19,25-tetraoxo-16-oxa-13,20,24-t riazanonacos-1-yl]-4-hydroxy-2-pyrrolidinyl)methyl ester
tccaagaaaactttacgactt

SEQ ID NO: 331 - RNA, 21 nt, synthetic construct
  source 1..21: mol_type = other RNA
  modified_base 1: mod_base = OTHER; note = 2'-O-methylguanosine-3'-phosphorothioate
  modified_base 2: mod_base = OTHER; note = 2'-O-methyladenosine-3'-phosphorothioate
  modified_base 3: mod_base = OTHER; note = 2'-O-methylcytidine-3'-phosphate
  modified_base 4: mod_base = OTHER; note = 2'-O-methyluridine-3'-phosphate
  modified_base 5: mod_base = OTHER; note = 2'-O-methyladenosine-3'-phosphate
  modified_base 6: mod_base = OTHER; note = 2'-O-methylcytidine-3'-phosphate
  modified_base 7: mod_base = OTHER; note = 2'-deoxy-2'-fluorouridine-3'-phosphate
  modified_base 8: mod_base = OTHER; note = 2'-O-methylguanosine-3'-phosphate
  modified_base 9: mod_base = OTHER; note = 2'-deoxy-2'-fluorouridine-3'-phosphate
  modified_base 10: mod_base = OTHER; note = 2'-deoxy-2'-fluoroguanosine-3'-phosphate
  modified_base 11: mod_base = OTHER; note = 2'-deoxy-2'-fluoroadenosine-3'-phosphate
  modified_base 12: mod_base = OTHER; note = 2'-O-methyluridine-3'-phosphate
  modified_base 13: mod_base = OTHER; note = 2'-O-methylguanosine-3'-phosphate
  modified_base 14: mod_base = OTHER; note = 2'-O-methyluridine-3'-phosphate
  modified_base 15: mod_base = OTHER; note = 2'-O-methylcytidine-3'-phosphate
  modified_base 16: mod_base = OTHER; note = 2'-O-methylcytidine-3'-phosphate
  modified_base 17: mod_base = OTHER; note = 2'-O-methylcytidine-3'-phosphate
  modified_base 18: mod_base = OTHER; note = 2'-O-methyluridine-3'-phosphate
  modified_base 19: mod_base = OTHER; note = 2'-O-methylcytidine-3'-phosphate
  modified_base 20: mod_base = OTHER; note = 2'-O-methyladenosine-3'-phosphate
  modified_base 21: mod_base = OTHER; note = 2'-O-methyluridine-3'-phosphate ((2S,4R)-1-[29-[[2-(acetylamino)-2-deoxy-beta-D-galactopyra nosyl]oxy]-14,14-bis[[3-[[3-[[5-[[2-(acetylamino)-2-deoxy-b eta-D-galactopyranosyl]oxy]-1-oxopentyl]amino]propyl]amino] -3-oxopropoxy]methyl]-1,12,19,25-tetraoxo-16-oxa-13,20,24-t riazanonacos-1-yl]-4-hydroxy-2-pyrrolidinyl)methyl ester
gactactgtgatgtccctcat

SEQ ID NO: 332 - RNA, 21 nt, synthetic construct
  source 1..21: mol_type = other RNA
  modified_base 1: mod_base = OTHER; note = 2'-O-methylguanosine-3'-phosphorothioate
  modified_base 2: mod_base = OTHER; note = 2'-O-methylcytidine-3'-phosphorothioate
  modified_base 3: mod_base = OTHER; note = 2'-O-methyladenosine-3'-phosphate
  modified_base 4: mod_base = OTHER; note = 2'-O-methyladenosine-3'-phosphate
  modified_base 5: mod_base = OTHER; note = 2'-O-methylguanosine-3'-phosphate
  modified_base 6: mod_base = OTHER; note = 2'-O-methyluridine-3'-phosphate
  modified_base 7: mod_base = OTHER; note = 2'-deoxy-2'-fluorocytidine-3'-phosphate
  modified_base 8: mod_base = OTHER; note = 2'-O-methyladenosine-3'-phosphate
  modified_base 9: mod_base = OTHER; note = 2'-deoxy-2'-fluoroguanosine-3'-phosphate
  modified_base 10: mod_base = OTHER; note = 2'-deoxy-2'-fluorouridine-3'-phosphate
  modified_base 11: mod_base = OTHER; note = 2'-deoxy-2'-fluorocytidine-3'-phosphate
  modified_base 12: mod_base = OTHER; note = 2'-O-methyluridine-3'-phosphate
  modified_base 13: mod_base = OTHER; note = 2'-O-methyluridine-3'-phosphate
  modified_base 14: mod_base = OTHER; note = 2'-O-methyladenosine-3'-phosphate
  modified_base 15: mod_base = OTHER; note = 2'-O-methylguanosine-3'-phosphate
  modified_base 16: mod_base = OTHER; note = 2'-O-methyladenosine-3'-phosphate
  modified_base 17: mod_base = OTHER; note = 2'-O-methyladenosine-3'-phosphate
  modified_base 18: mod_base = OTHER; note = 2'-O-methylcytidine-3'-phosphate
  modified_base 19: mod_base = OTHER; note = 2'-O-methyladenosine-3'-phosphate
  modified_base 20: mod_base = OTHER; note = 2'-O-methyladenosine-3'-phosphate
  modified_base 21: mod_base = OTHER; note = 2'-O-methyluridine-3'-phosphate ((2S,4R)-1-[29-[[2-(acetylamino)-2-deoxy-beta-D-galactopyra nosyl]oxy]-14,14-bis[[3-[[3-[[5-[[2-(acetylamino)-2-deoxy-b eta-D-galactopyranosyl]oxy]-1-oxopentyl]amino]propyl]amino] -3-oxopropoxy]methyl]-1,12,19,25-tetraoxo-16-oxa-13,20,24-t riazanonacos-1-yl]-4-hydroxy-2-pyrrolidinyl)methyl ester
gcaagtcagtcttagaacaat

SEQ ID NO: 333 - RNA, 21 nt, synthetic construct
  source 1..21: mol_type = other RNA
  modified_base 1: mod_base = OTHER; note = 2'-O-methyladenosine-3'-phosphorothioate
  modified_base 2: mod_base = OTHER; note = 2'-O-methyladenosine-3'-phosphorothioate
  modified_base 3: mod_base = OTHER; note = 2'-O-methylcytidine-3'-phosphate
  modified_base 4: mod_base = OTHER; note = 2'-O-methyladenosine-3'-phosphate
  modified_base 5: mod_base = OTHER; note = 2'-O-methyladenosine-3'-phosphate
  modified_base 6: mod_base = OTHER; note = 2'-O-methylguanosine-3'-phosphate
  modified_base 7: mod_base = OTHER; note = 2'-deoxy-2'-fluoroguanosine-3'-phosphate
  modified_base 8: mod_base = OTHER; note = 2'-O-methyluridine-3'-phosphate
  modified_base 9: mod_base = OTHER; note = 2'-deoxy-2'-fluorouridine-3'-phosphate
  modified_base 10: mod_base = OTHER; note = 2'-deoxy-2'-fluorouridine-3'-phosphate
  modified_base 11: mod_base = OTHER; note = 2'-deoxy-2'-fluoroguanosine-3'-phosphate
  modified_base 12: mod_base = OTHER; note = 2'-O-methylguanosine-3'-phosphate
  modified_base 13: mod_base = OTHER; note = 2'-O-methyladenosine-3'-phosphate
  modified_base 14: mod_base = OTHER; note = 2'-O-methyladenosine-3'-phosphate
  modified_base 15: mod_base = OTHER; note = 2'-O-methyluridine-3'-phosphate
  modified_base 16: mod_base = OTHER; note = 2'-O-methylguanosine-3'-phosphate
  modified_base 17: mod_base = OTHER; note = 2'-O-methylcytidine-3'-phosphate
  modified_base 18: mod_base = OTHER; note = 2'-O-methyladenosine-3'-phosphate
  modified_base 19: mod_base = OTHER; note = 2'-O-methylcytidine-3'-phosphate
  modified_base 20: mod_base = OTHER; note = 2'-O-methyluridine-3'-phosphate
  modified_base 21: mod_base = OTHER; note = 2'-O-methyluridine-3'-phosphate ((2S,4R)-1-[29-[[2-(acetylamino)-2-deoxy-beta-D-galactopyra nosyl]oxy]-14,14-bis[[3-[[3-[[5-[[2-(acetylamino)-2-deoxy-b eta-D-galactopyranosyl]oxy]-1-oxopentyl]amino]propyl]amino] -3-oxopropoxy]methyl]-1,12,19,25-tetraoxo-16-oxa-13,20,24-t riazanonacos-1-yl]-4-hydroxy-2-pyrrolidinyl)methyl ester
aacaaggtttggaatgcactt

SEQ ID NO: 334 - RNA, 21 nt, synthetic construct
  source 1..21: mol_type = other RNA
  modified_base 1: mod_base = OTHER; note = 2'-O-methyluridine-3'-phosphorothioate
  modified_base 2: mod_base = OTHER; note = 2'-O-methylguanosine-3'-phosphorothioate
  modified_base 3: mod_base = OTHER; note = 2'-O-methylcytidine-3'-phosphate
  modified_base 4: mod_base = OTHER; note = 2'-O-methylcytidine-3'-phosphate
  modified_base 5: mod_base = OTHER; note = 2'-O-methylcytidine-3'-phosphate
  modified_base 6: mod_base = OTHER; note = 2'-O-methyladenosine-3'-phosphate
  modified_base 7: mod_base = OTHER; note = 2'-deoxy-2'-fluorocytidine-3'-phosphate
  modified_base 8: mod_base = OTHER; note = 2'-O-methyluridine-3'-phosphate
  modified_base 9: mod_base = OTHER; note = 2'-deoxy-2'-fluoroguanosine-3'-phosphate
  modified_base 10: mod_base = OTHER; note = 2'-deoxy-2'-fluorocytidine-3'-phosphate
  modified_base 11: mod_base = OTHER; note = 2'-deoxy-2'-fluorouridine-3'-phosphate
  modified_base 12: mod_base = OTHER; note = 2'-O-methyluridine-3'-phosphate
  modified_base 13: mod_base = OTHER; note = 2'-O-methylguanosine-3'-phosphate
  modified_base 14: mod_base = OTHER; note = 2'-O-methylguanosine-3'-phosphate
  modified_base 15: mod_base = OTHER; note = 2'-O-methyladenosine-3'-phosphate
  modified_base 16: mod_base = OTHER; note = 2'-O-methylguanosine-3'-phosphate
  modified_base 17: mod_base = OTHER; note = 2'-O-methyladenosine-3'-phosphate
  modified_base 18: mod_base = OTHER; note = 2'-O-methyladenosine-3'-phosphate
  modified_base 19: mod_base = OTHER; note = 2'-O-methylguanosine-3'-phosphate
  modified_base 20: mod_base = OTHER; note = 2'-O-methyluridine-3'-phosphate
  modified_base 21: mod_base = OTHER; note = 2'-O-methyluridine-3'-phosphate ((2S,4R)-1-[29-[[2-(acetylamino)-2-deoxy-beta-D-galactopyra nosyl]oxy]-14,14-bis[[3-[[3-[[5-[[2-(acetylamino)-2-deoxy-b eta-D-galactopyranosyl]oxy]-1-oxopentyl]amino]propyl]amino] -3-oxopropoxy]methyl]-1,12,19,25-tetraoxo-16-oxa-13,20,24-t riazanonacos-1-yl]-4-hydroxy-2-pyrrolidinyl)methyl ester
tgcccactgcttggagaagtt

SEQ ID NO: 335 - RNA, 21 nt, synthetic construct
  source 1..21: mol_type = other RNA
  modified_base 1: mod_base = OTHER; note = 2'-O-methyladenosine-3'-phosphorothioate
  modified_base 2: mod_base = OTHER; note = 2'-O-methylcytidine-3'-phosphorothioate
  modified_base 3: mod_base = OTHER; note = 2'-O-methylcytidine-3'-phosphate
  modified_base 4: mod_base = OTHER; note = 2'-O-methyladenosine-3'-phosphate
  modified_base 5: mod_base = OTHER; note = 2'-O-methyladenosine-3'-phosphate
  modified_base 6: mod_base = OTHER; note = 2'-O-methylguanosine-3'-phosphate
  modified_base 7: mod_base = OTHER; note = 2'-deoxy-2'-fluoroadenosine-3'-phosphate
  modified_base 8: mod_base = OTHER; note = 2'-O-methyladenosine-3'-phosphate
  modified_base 9: mod_base = OTHER; note = 2'-deoxy-2'-fluoroguanosine-3'-phosphate
  modified_base 10: mod_base = OTHER; note = 2'-deoxy-2'-fluorouridine-3'-phosphate
  modified_base 11: mod_base = OTHER; note = 2'-deoxy-2'-fluoroguanosine-3'-phosphate
  modified_base 12: mod_base = OTHER; note = 2'-O-methyladenosine-3'-phosphate
  modified_base 13: mod_base = OTHER; note = 2'-O-methyladenosine-3'-phosphate
  modified_base 14: mod_base = OTHER; note = 2'-O-methyluridine-3'-phosphate
  modified_base 15: mod_base = OTHER; note = 2'-O-methylcytidine-3'-phosphate
  modified_base 16: mod_base = OTHER; note = 2'-O-methyluridine-3'-phosphate
  modified_base 17: mod_base = OTHER; note = 2'-O-methylcytidine-3'-phosphate
  modified_base 18: mod_base = OTHER; note = 2'-O-methylguanosine-3'-phosphate
  modified_base 19: mod_base = OTHER; note = 2'-O-methyladenosine-3'-phosphate
  modified_base 20: mod_base = OTHER; note = 2'-O-methyladenosine-3'-phosphate
  modified_base 21: mod_base = OTHER; note = 2'-O-methyluridine-3'-phosphate ((2S,4R)-1-[29-[[2-(acetylamino)-2-deoxy-beta-D-galactopyra nosyl]oxy]-14,14-bis[[3-[[3-[[5-[[2-(acetylamino)-2-deoxy-b eta-D-galactopyranosyl]oxy]-1-oxopentyl]amino]propyl]amino] -3-oxopropoxy]methyl]-1,12,19,25-tetraoxo-16-oxa-13,20,24-t riazanonacos-1-yl]-4-hydroxy-2-pyrrolidinyl)methyl ester
accaagaagtgaatctcgaat

SEQ ID NO: 336 - RNA, 21 nt, synthetic construct
  source 1..21: mol_type = other RNA
  modified_base 1: mod_base = OTHER; note = 2'-O-methylcytidine-3'-phosphorothioate
  modified_base 2: mod_base = OTHER; note = 2'-O-methylcytidine-3'-phosphorothioate
  modified_base 3: mod_base = OTHER; note = 2'-O-methylguanosine-3'-phosphate
  modified_base 4: mod_base = OTHER; note = 2'-O-methylcytidine-3'-phosphate
  modified_base 5: mod_base = OTHER; note = 2'-O-methyladenosine-3'-phosphate
  modified_base 6: mod_base = OTHER; note = 2'-O-methyluridine-3'-phosphate
  modified_base 7: mod_base = OTHER; note = 2'-deoxy-2'-fluoroguanosine-3'-phosphate
  modified_base 8: mod_base = OTHER; note = 2'-O-methyluridine-3'-phosphate
  modified_base 9: mod_base = OTHER; note = 2'-deoxy-2'-fluorouridine-3'-phosphate
  modified_base 10: mod_base = OTHER; note = 2'-deoxy-2'-fluorocytidine-3'-phosphate
  modified_base 11: mod_base = OTHER; note = 2'-deoxy-2'-fluoroadenosine-3'-phosphate
  modified_base 12: mod_base = OTHER; note = 2'-O-methylguanosine-3'-phosphate
  modified_base 13: mod_base = OTHER; note = 2'-O-methylguanosine-3'-phosphate
  modified_base 14: mod_base = OTHER; note = 2'-O-methyladenosine-3'-phosphate
  modified_base 15: mod_base = OTHER; note = 2'-O-methyladenosine-3'-phosphate
  modified_base 16: mod_base = OTHER; note = 2'-O-methyladenosine-3'-phosphate
  modified_base 17: mod_base = OTHER; note = 2'-O-methyluridine-3'-phosphate
  modified_base 18: mod_base = OTHER; note = 2'-O-methyladenosine-3'-phosphate
  modified_base 19: mod_base = OTHER; note = 2'-O-methylguanosine-3'-phosphate
  modified_base 20: mod_base = OTHER; note = 2'-O-methyladenosine-3'-phosphate
  modified_base 21: mod_base = OTHER; note = 2'-O-methyluridine-3'-phosphate ((2S,4R)-1-[29-[[2-(acetylamino)-2-deoxy-beta-D-galactopyra nosyl]oxy]-14,14-bis[[3-[[3-[[5-[[2-(acetylamino)-2-deoxy-b eta-D-galactopyranosyl]oxy]-1-oxopentyl]amino]propyl]amino] -3-oxopropoxy]methyl]-1,12,19,25-tetraoxo-16-oxa-13,20,24-t riazanonacos-1-yl]-4-hydroxy-2-pyrrolidinyl)methyl ester
ccgcatgttcaggaaatagat

SEQ ID NO: 337 - RNA, 21 nt, synthetic construct
  source 1..21: mol_type = other RNA
  modified_base 1: mod_base = OTHER; note = 2'-O-methylguanosine-3'-phosphorothioate
  modified_base 2: mod_base = OTHER; note = 2'-O-methyladenosine-3'-phosphorothioate
  modified_base 3: mod_base = OTHER; note = 2'-O-methyladenosine-3'-phosphate
  modified_base 4: mod_base = OTHER; note = 2'-O-methyladenosine-3'-phosphate
  modified_base 5: mod_base = OTHER; note = 2'-O-methyladenosine-3'-phosphate
  modified_base 6: mod_base = OTHER; note = 2'-O-methylguanosine-3'-phosphate
  modified_base 7: mod_base = OTHER; note = 2'-deoxy-2'-fluoroadenosine-3'-phosphate
  modified_base 8: mod_base = OTHER; note = 2'-O-methyluridine-3'-phosphate
  modified_base 9: mod_base = OTHER; note = 2'-deoxy-2'-fluoroadenosine-3'-phosphate
  modified_base 10: mod_base = OTHER; note = 2'-deoxy-2'-fluorouridine-3'-phosphate
  modified_base 11: mod_base = OTHER; note = 2'-deoxy-2'-fluorouridine-3'-phosphate
  modified_base 12: mod_base = OTHER; note = 2'-O-methylguanosine-3'-phosphate
  modified_base 13: mod_base = OTHER; note = 2'-O-methylcytidine-3'-phosphate
  modified_base 14: mod_base = OTHER; note = 2'-O-methylcytidine-3'-phosphate
  modified_base 15: mod_base = OTHER; note = 2'-O-methyluridine-3'-phosphate
  modified_base 16: mod_base = OTHER; note = 2'-O-methyluridine-3'-phosphate
  modified_base 17: mod_base = OTHER; note = 2'-O-methylguanosine-3'-phosphate
  modified_base 18: mod_base = OTHER; note = 2'-O-methylcytidine-3'-phosphate
  modified_base 19: mod_base = OTHER; note = 2'-O-methyluridine-3'-phosphate
  modified_base 20: mod_base = OTHER; note = 2'-O-methyladenosine-3'-phosphate
  modified_base 21: mod_base = OTHER; note = 2'-O-methyluridine-3'-phosphate ((2S,4R)-1-[29-[[2-(acetylamino)-2-deoxy-beta-D-galactopyra nosyl]oxy]-14,14-bis[[3-[[3-[[5-[[2-(acetylamino)-2-deoxy-b eta-D-galactopyranosyl]oxy]-1-oxopentyl]amino]propyl]amino] -3-oxopropoxy]methyl]-1,12,19,25-tetraoxo-16-oxa-13,20,24-t riazanonacos-1-yl]-4-hydroxy-2-pyrrolidinyl)methyl ester
gaaaagatattgccttgctat

SEQ ID NO: 338 - RNA, 21 nt, synthetic construct
  source 1..21: mol_type = other RNA
  modified_base 1: mod_base = OTHER; note = 2'-O-methyluridine-3'-phosphorothioate
  modified_base 2: mod_base = OTHER; note = 2'-O-methylguanosine-3'-phosphorothioate
  modified_base 3: mod_base = OTHER; note = 2'-O-methylcytidine-3'-phosphate
  modified_base 4: mod_base = OTHER; note = 2'-O-methyluridine-3'-phosphate
  modified_base 5: mod_base = OTHER; note = 2'-O-methyladenosine-3'-phosphate
  modified_base 6: mod_base = OTHER; note = 2'-O-methyladenosine-3'-phosphate
  modified_base 7: mod_base = OTHER; note = 2'-deoxy-2'-fluoroadenosine-3'-phosphate
  modified_base 8: mod_base = OTHER; note = 2'-O-methylguanosine-3'-phosphate
  modified_base 9: mod_base = OTHER; note = 2'-deoxy-2'-fluorocytidine-3'-phosphate
  modified_base 10: mod_base = OTHER; note = 2'-deoxy-2'-fluorouridine-3'-phosphate
  modified_base 11: mod_base = OTHER; note = 2'-deoxy-2'-fluoroadenosine-3'-phosphate
  modified_base 12: mod_base = OTHER; note = 2'-O-methyladenosine-3'-phosphate
  modified_base 13: mod_base = OTHER; note = 2'-O-methylguanosine-3'-phosphate
  modified_base 14: mod_base = OTHER; note = 2'-O-methylcytidine-3'-phosphate
  modified_base 15: mod_base = OTHER; note = 2'-O-methyladenosine-3'-phosphate
  modified_base 16: mod_base = OTHER; note = 2'-O-methylguanosine-3'-phosphate
  modified_base 17: mod_base = OTHER; note = 2'-O-methyluridine-3'-phosphate
  modified_base 18: mod_base = OTHER; note = 2'-O-methylcytidine-3'-phosphate
  modified_base 19: mod_base = OTHER; note = 2'-O-methylcytidine-3'-phosphate
  modified_base 20: mod_base = OTHER; note = 2'-O-methyluridine-3'-phosphate
  modified_base 21: mod_base = OTHER; note = 2'-O-methyluridine-3'-phosphate ((2S,4R)-1-[29-[[2-(acetylamino)-2-deoxy-beta-D-galactopyra nosyl]oxy]-14,14-bis[[3-[[3-[[5-[[2-(acetylamino)-2-deoxy-b eta-D-galactopyranosyl]oxy]-1-oxopentyl]amino]propyl]amino] -3-oxopropoxy]methyl]-1,12,19,25-tetraoxo-16-oxa-13,20,24-t riazanonacos-1-yl]-4-hydroxy-2-pyrrolidinyl)methyl ester
tgctaaagctaagcagtcctt

SEQ ID NO: 339 - RNA, 21 nt, synthetic construct
  source 1..21: mol_type = other RNA
  modified_base 1: mod_base = OTHER; note = 2'-O-methyluridine-3'-phosphorothioate
  modified_base 2: mod_base = OTHER; note = 2'-O-methylcytidine-3'-phosphorothioate
  modified_base 3: mod_base = OTHER; note = 2'-O-methyladenosine-3'-phosphate
  modified_base 4: mod_base = OTHER; note = 2'-O-methyluridine-3'-phosphate
  modified_base 5: mod_base = OTHER; note = 2'-O-methylcytidine-3'-phosphate
  modified_base 6: mod_base = OTHER; note = 2'-O-methyladenosine-3'-phosphate
  modified_base 7: mod_base = OTHER; note = 2'-deoxy-2'-fluorocytidine-3'-phosphate
  modified_base 8: mod_base = OTHER; note = 2'-O-methyluridine-3'-phosphate
  modified_base 9: mod_base = OTHER; note = 2'-deoxy-2'-fluoroguanosine-3'-phosphate
  modified_base 10: mod_base = OTHER; note = 2'-deoxy-2'-fluoroadenosine-3'-phosphate
  modified_base 11: mod_base = OTHER; note = 2'-deoxy-2'-fluorocytidine-3'-phosphate
  modified_base 12: mod_base = OTHER; note = 2'-O-methyladenosine-3'-phosphate
  modified_base 13: mod_base = OTHER; note = 2'-O-methyladenosine-3'-phosphate
  modified_base 14: mod_base = OTHER; note = 2'-O-methyladenosine-3'-phosphate
  modified_base 15: mod_base = OTHER; note = 2'-O-methylguanosine-3'-phosphate
  modified_base 16: mod_base = OTHER; note = 2'-O-methyluridine-3'-phosphate
  modified_base 17: mod_base = OTHER; note = 2'-O-methyladenosine-3'-phosphate
  modified_base 18: mod_base = OTHER; note = 2'-O-methyladenosine-3'-phosphate
  modified_base 19: mod_base = OTHER; note = 2'-O-methyluridine-3'-phosphate
  modified_base 20: mod_base = OTHER; note = 2'-O-methylcytidine-3'-phosphate
  modified_base 21: mod_base = OTHER; note = 2'-O-methyluridine-3'-phosphate ((2S,4R)-1-[29-[[2-(acetylamino)-2-deoxy-beta-D-galactopyra nosyl]oxy]-14,14-bis[[3-[[3-[[5-[[2-(acetylamino)-2-deoxy-b eta-D-galactopyranosyl]oxy]-1-oxopentyl]amino]propyl]amino] -3-oxopropoxy]methyl]-1,12,19,25-tetraoxo-16-oxa-13,20,24-t riazanonacos-1-yl]-4-hydroxy-2-pyrrolidinyl)methyl ester
tcatcactgacaaagtaatct

SEQ ID NO: 340 - RNA, 21 nt, synthetic construct
  source 1..21: mol_type = other RNA
  modified_base 1: mod_base = OTHER; note = 2'-O-methylcytidine-3'-phosphorothioate
  modified_base 2: mod_base = OTHER; note = 2'-O-methylguanosine-3'-phosphorothioate
  modified_base 3: mod_base = OTHER; note = 2'-O-methyladenosine-3'-phosphate
  modified_base 4: mod_base = OTHER; note = 2'-O-methyladenosine-3'-phosphate
  modified_base 5: mod_base = OTHER; note = 2'-O-methyluridine-3'-phosphate
  modified_base 6: mod_base = OTHER; note = 2'-O-methylguanosine-3'-phosphate
  modified_base 7: mod_base = OTHER; note = 2'-deoxy-2'-fluorouridine-3'-phosphate
  modified_base 8: mod_base = OTHER; note = 2'-O-methyluridine-3'-phosphate
  modified_base 9: mod_base = OTHER; note = 2'-deoxy-2'-fluorouridine-3'-phosphate
  modified_base 10: mod_base = OTHER; note = 2'-deoxy-2'-fluorocytidine-3'-phosphate
  modified_base 11: mod_base = OTHER; note = 2'-deoxy-2'-fluoroadenosine-3'-phosphate
  modified_base 12: mod_base = OTHER; note = 2'-O-methyluridine-3'-phosphate
  modified_base 13: mod_base = OTHER; note = 2'-O-methylcytidine-3'-phosphate
  modified_base 14: mod_base = OTHER; note = 2'-O-methyladenosine-3'-phosphate
  modified_base 15: mod_base = OTHER; note = 2'-O-methylcytidine-3'-phosphate
  modified_base 16: mod_base = OTHER; note = 2'-O-methyluridine-3'-phosphate
  modified_base 17: mod_base = OTHER; note = 2'-O-methylguanosine-3'-phosphate
  modified_base 18: mod_base = OTHER; note = 2'-O-methylguanosine-3'-phosphate
  modified_base 19: mod_base = OTHER; note = 2'-O-methylcytidine-3'-phosphate
  modified_base 20: mod_base = OTHER; note = 2'-O-methyluridine-3'-phosphate
  modified_base 21: mod_base = OTHER; note = 2'-O-methyluridine-3'-phosphate ((2S,4R)-1-[29-[[2-(acetylamino)-2-deoxy-beta-D-galactopyra nosyl]oxy]-14,14-bis[[3-[[3-[[5-[[2-(acetylamino)-2-deoxy-b eta-D-galactopyranosyl]oxy]-1-oxopentyl]amino]propyl]amino] -3-oxopropoxy]methyl]-1,12,19,25-tetraoxo-16-oxa-13,20,24-t riazanonacos-1-yl]-4-hydroxy-2-pyrrolidinyl)methyl ester
cgaatgtttcatcactggctt

SEQ ID NO: 341 - RNA, 21 nt, synthetic construct
  source 1..21: mol_type = other RNA
  modified_base 1: mod_base = OTHER; note = 2'-O-methylguanosine-3'-phosphorothioate
  modified_base 2: mod_base = OTHER; note = 2'-O-methyladenosine-3'-phosphorothioate
  modified_base 3: mod_base = OTHER; note = 2'-O-methylguanosine-3'-phosphate
  modified_base 4: mod_base = OTHER; note = 2'-O-methyladenosine-3'-phosphate
  modified_base 5: mod_base = OTHER; note = 2'-O-methyladenosine-3'-phosphate
  modified_base 6: mod_base = OTHER; note = 2'-O-methyladenosine-3'-phosphate
  modified_base 7: mod_base = OTHER; note = 2'-deoxy-2'-fluorocytidine-3'-phosphate
  modified_base 8: mod_base = OTHER; note = 2'-O-methylcytidine-3'-phosphate
  modified_base 9: mod_base = OTHER; note = 2'-deoxy-2'-fluorocytidine-3'-phosphate
  modified_base 10: mod_base = OTHER; note = 2'-deoxy-2'-fluoroadenosine-3'-phosphate
  modified_base 11: mod_base = OTHER; note = 2'-deoxy-2'-fluoroadenosine-3'-phosphate
  modified_base 12: mod_base = OTHER; note = 2'-O-methylguanosine-3'-phosphate
  modified_base 13: mod_base = OTHER; note = 2'-O-methylguanosine-3'-phosphate
  modified_base 14: mod_base = OTHER; note = 2'-O-methyluridine-3'-phosphate
  modified_base 15: mod_base = OTHER; note = 2'-O-methyladenosine-3'-phosphate
  modified_base 16: mod_base = OTHER; note = 2'-O-methylcytidine-3'-phosphate
  modified_base 17: mod_base = OTHER; note = 2'-O-methyluridine-3'-phosphate
  modified_base 18: mod_base = OTHER; note = 2'-O-methyluridine-3'-phosphate
  modified_base 19: mod_base = OTHER; note = 2'-O-methyluridine-3'-phosphate
  modified_base 20: mod_base = OTHER; note = 2'-O-methyluridine-3'-phosphate
  modified_base 21: mod_base = OTHER; note = 2'-O-methyluridine-3'-phosphate ((2S,4R)-1-[29-[[2-(acetylamino)-2-deoxy-beta-D-galactopyra nosyl]oxy]-14,14-bis[[3-[[3-[[5-[[2-(acetylamino)-2-deoxy-b eta-D-galactopyranosyl]oxy]-1-oxopentyl]amino]propyl]amino] -3-oxopropoxy]methyl]-1,12,19,25-tetraoxo-16-oxa-13,20,24-t riazanonacos-1-yl]-4-hydroxy-2-pyrrolidinyl)methyl ester
gagaaacccaaggtacttttt

SEQ ID NO: 342 - RNA, 21 nt, synthetic construct
  source 1..21: mol_type = other RNA
  modified_base 1: mod_base = OTHER; note = 2'-O-methylcytidine-3'-phosphorothioate
  modified_base 2: mod_base = OTHER; note = 2'-O-methylcytidine-3'-phosphorothioate
  modified_base 3: mod_base = OTHER; note = 2'-O-methyluridine-3'-phosphate
  modified_base 4: mod_base = OTHER; note = 2'-O-methylguanosine-3'-phosphate
  modified_base 5: mod_base = OTHER; note = 2'-O-methyluridine-3'-phosphate
  modified_base 6: mod_base = OTHER; note = 2'-O-methylguanosine-3'-phosphate
  modified_base 7: mod_base = OTHER; note = 2'-deoxy-2'-fluoroadenosine-3'-phosphate
  modified_base 8: mod_base = OTHER; note = 2'-O-methyluridine-3'-phosphate
  modified_base 9: mod_base = OTHER; note = 2'-deoxy-2'-fluorouridine-3'-phosphate
  modified_base 10: mod_base = OTHER; note = 2'-deoxy-2'-fluoroguanosine-3'-phosphate
  modified_base 11: mod_base = OTHER; note = 2'-deoxy-2'-fluoroadenosine-3'-phosphate
  modified_base 12: mod_base = OTHER; note = 2'-O-methylguanosine-3'-phosphate
  modified_base 13: mod_base = OTHER; note = 2'-O-methyladenosine-3'-phosphate
  modified_base 14: mod_base = OTHER; note = 2'-O-methyladenosine-3'-phosphate
  modified_base 15: mod_base = OTHER; note = 2'-O-methyluridine-3'-phosphate
  modified_base 16: mod_base = OTHER; note = 2'-O-methyladenosine-3'-phosphate
  modified_base 17: mod_base = OTHER; note = 2'-O-methyladenosine-3'-phosphate
  modified_base 18: mod_base = OTHER; note = 2'-O-methyladenosine-3'-phosphate
  modified_base 19: mod_base = OTHER; note = 2'-O-methylguanosine-3'-phosphate
  modified_base 20: mod_base = OTHER; note = 2'-O-methyluridine-3'-phosphate
  modified_base 21: mod_base = OTHER; note = 2'-O-methyluridine-3'-phosphate ((2S,4R)-1-[29-[[2-(acetylamino)-2-deoxy-beta-D-galactopyra nosyl]oxy]-14,14-bis[[3-[[3-[[5-[[2-(acetylamino)-2-deoxy-b eta-D-galactopyranosyl]oxy]-1-oxopentyl]amino]propyl]amino] -3-oxopropoxy]methyl]-1,12,19,25-tetraoxo-16-oxa-13,20,24-t riazanonacos-1-yl]-4-hydroxy-2-pyrrolidinyl)methyl ester
cctgtgattgagaataaagtt

SEQ ID NO: 343 - RNA, 21 nt, synthetic construct
  source 1..21: mol_type = other RNA
  modified_base 1: mod_base = OTHER; note = 2'-O-methyladenosine-3'-phosphorothioate
  modified_base 2: mod_base = OTHER; note = 2'-O-methyluridine-3'-phosphorothioate
  modified_base 3: mod_base = OTHER; note = 2'-O-methylcytidine-3'-phosphate
  modified_base 4: mod_base = OTHER; note = 2'-O-methylguanosine-3'-phosphate
  modified_base 5: mod_base = OTHER; note = 2'-O-methylcytidine-3'-phosphate
  modified_base 6: mod_base = OTHER; note = 2'-O-methyluridine-3'-phosphate
  modified_base 7: mod_base = OTHER; note = 2'-deoxy-2'-fluoroadenosine-3'-phosphate
  modified_base 8: mod_base = OTHER; note = 2'-O-methyluridine-3'-phosphate
  modified_base 9: mod_base = OTHER; note = 2'-deoxy-2'-fluoroguanosine-3'-phosphate
  modified_base 10: mod_base = OTHER; note = 2'-deoxy-2'-fluoroadenosine-3'-phosphate
  modified_base 11: mod_base = OTHER; note = 2'-deoxy-2'-fluoroguanosine-3'-phosphate
  modified_base 12: mod_base = OTHER; note = 2'-O-methyluridine-3'-phosphate
  modified_base 13: mod_base = OTHER; note = 2'-O-methyluridine-3'-phosphate
  modified_base 14: mod_base = OTHER; note = 2'-O-methyluridine-3'-phosphate
  modified_base 15: mod_base = OTHER; note = 2'-O-methylcytidine-3'-phosphate
  modified_base 16: mod_base = OTHER; note = 2'-O-methyluridine-3'-phosphate
  modified_base 17: mod_base = OTHER; note = 2'-O-methylguanosine-3'-phosphate
  modified_base 18: mod_base = OTHER; note = 2'-O-methyladenosine-3'-phosphate
  modified_base 19: mod_base = OTHER; note = 2'-O-methyladenosine-3'-phosphate
  modified_base 20: mod_base = OTHER; note = 2'-O-methyluridine-3'-phosphate
  modified_base 21: mod_base = OTHER; note = 2'-O-methyluridine-3'-phosphate ((2S,4R)-1-[29-[[2-(acetylamino)-2-deoxy-beta-D-galactopyra nosyl]oxy]-14,14-bis[[3-[[3-[[5-[[2-(acetylamino)-2-deoxy-b eta-D-galactopyranosyl]oxy]-1-oxopentyl]amino]propyl]amino] -3-oxopropoxy]methyl]-1,12,19,25-tetraoxo-16-oxa-13,20,24-t riazanonacos-1-yl]-4-hydroxy-2-pyrrolidinyl)methyl ester
atcgctatgagtttctgaatt

SEQ ID NO: 344 - RNA, 21 nt, synthetic construct
  source 1..21: mol_type = other RNA
  modified_base 1: mod_base = OTHER; note = 2'-O-methyluridine-3'-phosphorothioate
  modified_base 2: mod_base = OTHER; note = 2'-O-methylguanosine-3'-phosphorothioate
  modified_base 3: mod_base = OTHER; note = 2'-O-methyladenosine-3'-phosphate
  modified_base 4: mod_base = OTHER; note = 2'-O-methyladenosine-3'-phosphate
  modified_base 5: mod_base = OTHER; note = 2'-O-methyluridine-3'-phosphate
  modified_base 6: mod_base = OTHER; note = 2'-O-methylguanosine-3'-phosphate
  modified_base 7: mod_base = OTHER; note = 2'-deoxy-2'-fluoroguanosine-3'-phosphate
  modified_base 8: mod_base = OTHER; note = 2'-O-methyladenosine-3'-phosphate
  modified_base 9: mod_base = OTHER; note = 2'-deoxy-2'-fluoroadenosine-3'-phosphate
  modified_base 10: mod_base = OTHER; note = 2'-deoxy-2'-fluoroguanosine-3'-phosphate
  modified_base 11: mod_base = OTHER; note = 2'-deoxy-2'-fluoroadenosine-3'-phosphate
  modified_base 12: mod_base = OTHER; note = 2'-O-methylguanosine-3'-phosphate
  modified_base 13: mod_base = OTHER; note = 2'-O-methyluridine-3'-phosphate
  modified_base 14: mod_base = OTHER; note = 2'-O-methylcytidine-3'-phosphate
  modified_base 15: mod_base = OTHER; note = 2'-O-methylcytidine-3'-phosphate
  modified_base 16: mod_base = OTHER; note = 2'-O-methyladenosine-3'-phosphate
  modified_base 17: mod_base = OTHER; note = 2'-O-methyladenosine-3'-phosphate
  modified_base 18: mod_base = OTHER; note = 2'-O-methyluridine-3'-phosphate
  modified_base 19: mod_base = OTHER; note = 2'-O-methylcytidine-3'-phosphate
  modified_base 20: mod_base = OTHER; note = 2'-O-methylcytidine-3'-phosphate
  modified_base 21: mod_base = OTHER; note = 2'-O-methyluridine-3'-phosphate ((2S,4R)-1-[29-[[2-(acetylamino)-2-deoxy-beta-D-galactopyra nosyl]oxy]-14,14-bis[[3-[[3-[[5-[[2-(acetylamino)-2-deoxy-b eta-D-galactopyranosyl]oxy]-1-oxopentyl]amino]propyl]amino] -3-oxopropoxy]methyl]-1,12,19,25-tetraoxo-16-oxa-13,20,24-t riazanonacos-1-yl]-4-hydroxy-2-pyrrolidinyl)methyl ester
tgaatggaagagtccaatcct

SEQ ID NO: 345 - RNA, 21 nt, synthetic construct
  source 1..21: mol_type = other RNA
  modified_base 1: mod_base = OTHER; note = 2'-O-methylguanosine-3'-phosphorothioate
  modified_base 2: mod_base = OTHER; note = 2'-O-methylguanosine-3'-phosphorothioate
  modified_base 3: mod_base = OTHER; note = 2'-O-methyluridine-3'-phosphate
  modified_base 4: mod_base = OTHER; note = 2'-O-methylcytidine-3'-phosphate
  modified_base 5: mod_base = OTHER; note = 2'-O-methylcytidine-3'-phosphate
  modified_base 6: mod_base = OTHER; note = 2'-O-methyluridine-3'-phosphate
  modified_base 7: mod_base = OTHER; note = 2'-deoxy-2'-fluorocytidine-3'-phosphate
  modified_base 8: mod_base = OTHER; note = 2'-O-methyluridine-3'-phosphate
  modified_base 9: mod_base = OTHER; note = 2'-deoxy-2'-fluoroguanosine-3'-phosphate
  modified_base 10: mod_base = OTHER; note = 2'-deoxy-2'-fluoroguanosine-3'-phosphate
  modified_base 11: mod_base = OTHER; note = 2'-deoxy-2'-fluorouridine-3'-phosphate
  modified_base 12: mod_base = OTHER; note = 2'-O-methyluridine-3'-phosphate
  modified_base 13: mod_base = OTHER; note = 2'-O-methyluridine-3'-phosphate
  modified_base 14: mod_base = OTHER; note = 2'-O-methylguanosine-3'-phosphate
  modified_base 15: mod_base = OTHER; note = 2'-O-methylcytidine-3'-phosphate
  modified_base 16: mod_base = OTHER; note = 2'-O-methyluridine-3'-phosphate
  modified_base 17: mod_base = OTHER; note = 2'-O-methyluridine-3'-phosphate
  modified_base 18: mod_base = OTHER; note = 2'-O-methylcytidine-3'-phosphate
  modified_base 19: mod_base = OTHER; note = 2'-O-methylguanosine-3'-phosphate
  modified_base 20: mod_base = OTHER; note = 2'-O-methyladenosine-3'-phosphate
  modified_base 21: mod_base = OTHER; note = 2'-O-methyluridine-3'-phosphate ((2S,4R)-1-[29-[[2-(acetylamino)-2-deoxy-beta-D-galactopyra nosyl]oxy]-14,14-bis[[3-[[3-[[5-[[2-(acetylamino)-2-deoxy-b eta-D-galactopyranosyl]oxy]-1-oxopentyl]amino]propyl]amino] -3-oxopropoxy]methyl]-1,12,19,25-tetraoxo-16-oxa-13,20,24-t riazanonacos-1-yl]-4-hydroxy-2-pyrrolidinyl)methyl ester
ggtcctctggtttgcttcgat

SEQ ID NO: 346 - RNA, 21 nt, synthetic construct
  source 1..21: mol_type = other RNA
  modified_base 1: mod_base = OTHER; note = 2'-O-methylguanosine-3'-phosphorothioate
  modified_base 2: mod_base = OTHER; note = 2'-O-methyluridine-3'-phosphorothioate
  modified_base 3: mod_base = OTHER; note = 2'-O-methylcytidine-3'-phosphate
  modified_base 4: mod_base = OTHER; note = 2'-O-methyluridine-3'-phosphate
  modified_base 5: mod_base = OTHER; note = 2'-O-methyladenosine-3'-phosphate
  modified_base 6: mod_base = OTHER; note = 2'-O-methyluridine-3'-phosphate
  modified_base 7: mod_base = OTHER; note = 2'-deoxy-2'-fluoroguanosine-3'-phosphate
  modified_base 8: mod_base = OTHER; note = 2'-O-methyluridine-3'-phosphate
  modified_base 9: mod_base = OTHER; note = 2'-deoxy-2'-fluorouridine-3'-phosphate
  modified_base 10: mod_base = OTHER; note = 2'-deoxy-2'-fluorocytidine-3'-phosphate
  modified_base 11: mod_base = OTHER; note = 2'-deoxy-2'-fluoroguanosine-3'-phosphate
  modified_base 12: mod_base = OTHER; note = 2'-O-methyluridine-3'-phosphate
  modified_base 13: mod_base = OTHER; note = 2'-O-methylguanosine-3'-phosphate
  modified_base 14: mod_base = OTHER; note = 2'-O-methyluridine-3'-phosphate
  modified_base 15: mod_base = OTHER; note = 2'-O-methyluridine-3'-phosphate
  modified_base 16: mod_base = OTHER; note = 2'-O-methyluridine-3'-phosphate
  modified_base 17: mod_base = OTHER; note = 2'-O-methylcytidine-3'-phosphate
  modified_base 18: mod_base = OTHER; note = 2'-O-methyladenosine-3'-phosphate
  modified_base 19: mod_base = OTHER; note = 2'-O-methyladenosine-3'-phosphate
  modified_base 20: mod_base = OTHER; note = 2'-O-methylguanosine-3'-phosphate
  modified_base 21: mod_base = OTHER; note = 2'-O-methyluridine-3'-phosphate ((2S,4R)-1-[29-[[2-(acetylamino)-2-deoxy-beta-D-galactopyra nosyl]oxy]-14,14-bis[[3-[[3-[[5-[[2-(acetylamino)-2-deoxy-b eta-D-galactopyranosyl]oxy]-1-oxopentyl]amino]propyl]amino] -3-oxopropoxy]methyl]-1,12,19,25-tetraoxo-16-oxa-13,20,24-t riazanonacos-1-yl]-4-hydroxy-2-pyrrolidinyl)methyl ester
gtctatgttcgtgtttcaagt

SEQ ID NO: 347 - RNA, 21 nt, synthetic construct
  source 1..21: mol_type = other RNA
  modified_base 1: mod_base = OTHER; note = 2'-O-methylguanosine-3'-phosphorothioate
  modified_base 2: mod_base = OTHER; note = 2'-O-methyladenosine-3'-phosphorothioate
  modified_base 3: mod_base = OTHER; note = 2'-O-methylguanosine-3'-phosphate
  modified_base 4: mod_base = OTHER; note = 2'-O-methyluridine-3'-phosphate
  modified_base 5: mod_base = OTHER; note = 2'-O-methylguanosine-3'-phosphate
  modified_base 6: mod_base = OTHER; note = 2'-O-methyladenosine-3'-phosphate
  modified_base 7: mod_base = OTHER; note = 2'-deoxy-2'-fluorouridine-3'-phosphate
  modified_base 8: mod_base = OTHER; note = 2'-O-methylguanosine-3'-phosphate
  modified_base 9: mod_base = OTHER; note = 2'-deoxy-2'-fluoroadenosine-3'-phosphate
  modified_base 10: mod_base = OTHER; note = 2'-deoxy-2'-fluoroguanosine-3'-phosphate
  modified_base 11: mod_base = OTHER; note = 2'-deoxy-2'-fluoroadenosine-3'-phosphate
  modified_base 12: mod_base = OTHER; note = 2'-O-methyladenosine-3'-phosphate
  modified_base 13: mod_base = OTHER; note = 2'-O-methyladenosine-3'-phosphate
  modified_base 14: mod_base = OTHER; note = 2'-O-methyluridine-3'-phosphate
  modified_base 15: mod_base = OTHER; note = 2'-O-methyladenosine-3'-phosphate
  modified_base 16: mod_base = OTHER; note = 2'-O-methyladenosine-3'-phosphate
  modified_base 17: mod_base = OTHER; note = 2'-O-methyluridine-3'-phosphate
  modified_base 18: mod_base = OTHER; note = 2'-O-methyluridine-3'-phosphate
  modified_base 19: mod_base = OTHER; note = 2'-O-methyladenosine-3'-phosphate
  modified_base 20: mod_base = OTHER; note = 2'-O-methyladenosine-3'-phosphate
  modified_base 21: mod_base = OTHER; note = 2'-O-methyluridine-3'-phosphate ((2S,4R)-1-[29-[[2-(acetylamino)-2-deoxy-beta-D-galactopyra nosyl]oxy]-14,14-bis[[3-[[3-[[5-[[2-(acetylamino)-2-deoxy-b eta-D-galactopyranosyl]oxy]-1-oxopentyl]amino]propyl]amino] -3-oxopropoxy]methyl]-1,12,19,25-tetraoxo-16-oxa-13,20,24-t riazanonacos-1-yl]-4-hydroxy-2-pyrrolidinyl)methyl ester
gagtgatgagaaataattaat

SEQ ID NO: 348 - RNA, 21 nt, synthetic construct
  source 1..21: mol_type = other RNA
  modified_base 1: mod_base = OTHER; note = 2'-O-methylguanosine-3'-phosphorothioate
  modified_base 2: mod_base = OTHER; note = 2'-O-methyladenosine-3'-phosphorothioate
  modified_base 3: mod_base = OTHER; note = 2'-O-methylcytidine-3'-phosphate
  modified_base 4: mod_base = OTHER; note = 2'-O-methylguanosine-3'-phosphate
  modified_base 5: mod_base = OTHER; note = 2'-O-methylcytidine-3'-phosphate
  modified_base 6: mod_base = OTHER; note = 2'-O-methyladenosine-3'-phosphate
  modified_base 7: mod_base = OTHER; note = 2'-deoxy-2'-fluorocytidine-3'-phosphate
  modified_base 8: mod_base = OTHER; note = 2'-O-methyluridine-3'-phosphate
  modified_base 9: mod_base = OTHER; note = 2'-deoxy-2'-fluoroguanosine-3'-phosphate
  modified_base 10: mod_base = OTHER; note = 2'-deoxy-2'-fluoroadenosine-3'-phosphate
  modified_base 11: mod_base = OTHER; note = 2'-deoxy-2'-fluorocytidine-3'-phosphate
  modified_base 12: mod_base = OTHER; note = 2'-O-methyluridine-3'-phosphate
  modified_base 13: mod_base = OTHER; note = 2'-O-methylcytidine-3'-phosphate
  modified_base 14: mod_base = OTHER; note = 2'-O-methyladenosine-3'-phosphate
  modified_base 15: mod_base = OTHER; note = 2'-O-methylcytidine-3'-phosphate
  modified_base 16: mod_base = OTHER; note = 2'-O-methylcytidine-3'-phosphate
  modified_base 17: mod_base = OTHER; note = 2'-O-methyluridine-3'-phosphate
  modified_base 18: mod_base = OTHER; note = 2'-O-methyladenosine-3'-phosphate
  modified_base 19: mod_base = OTHER; note = 2'-O-methylguanosine-3'-phosphate
  modified_base 20: mod_base = OTHER; note = 2'-O-methyladenosine-3'-phosphate
  modified_base 21: mod_base = OTHER; note = 2'-O-methyluridine-3'-phosphate ((2S,4R)-1-[29-[[2-(acetylamino)-2-deoxy-beta-D-galactopyra nosyl]oxy]-14,14-bis[[3-[[3-[[5-[[2-(acetylamino)-2-deoxy-b eta-D-galactopyranosyl]oxy]-1-oxopentyl]amino]propyl]amino] -3-oxopropoxy]methyl]-1,12,19,25-tetraoxo-16-oxa-13,20,24-t riazanonacos-1-yl]-4-hydroxy-2-pyrrolidinyl)methyl ester
gacgcactgactcacctagat

SEQ ID NO: 349 - RNA, 21 nt, synthetic construct
  source 1..21: mol_type = other RNA
  modified_base 1: mod_base = OTHER; note = 2'-O-methyluridine-3'-phosphorothioate
  modified_base 2: mod_base = OTHER; note = 2'-O-methyladenosine-3'-phosphorothioate
  modified_base 3: mod_base = OTHER; note = 2'-O-methylguanosine-3'-phosphate
  modified_base 4: mod_base = OTHER; note = 2'-O-methylcytidine-3'-phosphate
  modified_base 5: mod_base = OTHER; note = 2'-O-methyladenosine-3'-phosphate
  modified_base 6: mod_base = OTHER; note = 2'-O-methyluridine-3'-phosphate
  modified_base 7: mod_base = OTHER; note = 2'-deoxy-2'-fluoroguanosine-3'-phosphate
  modified_base 8: mod_base = OTHER; note = 2'-O-methylcytidine-3'-phosphate
  modified_base 9: mod_base = OTHER; note = 2'-deoxy-2'-fluorouridine-3'-phosphate
  modified_base 10: mod_base = OTHER; note = 2'-deoxy-2'-fluoroguanosine-3'-phosphate
  modified_base 11: mod_base = OTHER; note = 2'-deoxy-2'-fluoroguanosine-3'-phosphate
  modified_base 12: mod_base = OTHER; note = 2'-O-methyladenosine-3'-phosphate
  modified_base 13: mod_base = OTHER; note = 2'-O-methyladenosine-3'-phosphate
  modified_base 14: mod_base = OTHER; note = 2'-O-methyladenosine-3'-phosphate
  modified_base 15: mod_base = OTHER; note = 2'-O-methyluridine-3'-phosphate
  modified_base 16: mod_base = OTHER; note = 2'-O-methyladenosine-3'-phosphate
  modified_base 17: mod_base = OTHER; note = 2'-O-methyladenosine-3'-phosphate
  modified_base 18: mod_base = OTHER; note = 2'-O-methylcytidine-3'-phosphate
  modified_base 19: mod_base = OTHER; note = 2'-O-methyluridine-3'-phosphate
  modified_base 20: mod_base = OTHER; note = 2'-O-methylguanosine-3'-phosphate
  modified_base 21: mod_base = OTHER; note = 2'-O-methyluridine-3'-phosphate ((2S,4R)-1-[29-[[2-(acetylamino)-2-deoxy-beta-D-galactopyra nosyl]oxy]-14,14-bis[[3-[[3-[[5-[[2-(acetylamino)-2-deoxy-b eta-D-galactopyranosyl]oxy]-1-oxopentyl]amino]propyl]amino] -3-oxopropoxy]methyl]-1,12,19,25-tetraoxo-16-oxa-13,20,24-t riazanonacos-1-yl]-4-hydroxy-2-pyrrolidinyl)methyl ester
tagcatgctggaaataactgt

SEQ ID NO: 350 - RNA, 21 nt, synthetic construct
  source 1..21: mol_type = other RNA
  modified_base 1: mod_base = OTHER; note = 2'-O-methyladenosine-3'-phosphorothioate
  modified_base 2: mod_base = OTHER; note = 2'-O-methyladenosine-3'-phosphorothioate
  modified_base 3: mod_base = OTHER; note = 2'-O-methyluridine-3'-phosphate
  modified_base 4: mod_base = OTHER; note = 2'-O-methylcytidine-3'-phosphate
  modified_base 5: mod_base = OTHER; note = 2'-O-methyladenosine-3'-phosphate
  modified_base 6: mod_base = OTHER; note = 2'-O-methyladenosine-3'-phosphate
  modified_base 7: mod_base = OTHER; note = 2'-deoxy-2'-fluoroadenosine-3'-phosphate
  modified_base 8: mod_base = OTHER; note = 2'-O-methylcytidine-3'-phosphate
  modified_base 9: mod_base = OTHER; note = 2'-deoxy-2'-fluoroguanosine-3'-phosphate
  modified_base 10: mod_base = OTHER; note = 2'-deoxy-2'-fluoroadenosine-3'-phosphate
  modified_base 11: mod_base = OTHER; note = 2'-deoxy-2'-fluoroadenosine-3'-phosphate
  modified_base 12: mod_base = OTHER; note = 2'-O-methylguanosine-3'-phosphate
  modified_base 13: mod_base = OTHER; note = 2'-O-methyladenosine-3'-phosphate
  modified_base 14: mod_base = OTHER; note = 2'-O-methylcytidine-3'-phosphate
  modified_base 15: mod_base = OTHER; note = 2'-O-methyladenosine-3'-phosphate
  modified_base 16: mod_base = OTHER; note = 2'-O-methylcytidine-3'-phosphate
  modified_base 17: mod_base = OTHER; note = 2'-O-methyluridine-3'-phosphate
  modified_base 18: mod_base = OTHER; note = 2'-O-methylguanosine-3'-phosphate
  modified_base 19: mod_base = OTHER; note = 2'-O-methyluridine-3'-phosphate
  modified_base 20: mod_base = OTHER; note = 2'-O-methylcytidine-3'-phosphate
  modified_base 21: mod_base = OTHER; note = 2'-O-methyluridine-3'-phosphate ((2S,4R)-1-[29-[[2-(acetylamino)-2-deoxy-beta-D-galactopyra nosyl]oxy]-14,14-bis[[3-[[3-[[5-[[2-(acetylamino)-2-deoxy-b eta-D-galactopyranosyl]oxy]-1-oxopentyl]amino]propyl]amino] -3-oxopropoxy]methyl]-1,12,19,25-tetraoxo-16-oxa-13,20,24-t riazanonacos-1-yl]-4-hydroxy-2-pyrrolidinyl)methyl ester
aatcaaacgaagacactgtct

SEQ ID NO: 351 - RNA, 21 nt, synthetic construct
  source 1..21: mol_type = other RNA
  modified_base 1: mod_base = OTHER; note = 2'-O-methyladenosine-3'-phosphorothioate
  modified_base 2: mod_base = OTHER; note = 2'-O-methylcytidine-3'-phosphorothioate
  modified_base 3: mod_base = OTHER; note = 2'-O-methylcytidine-3'-phosphate
  modified_base 4: mod_base = OTHER; note = 2'-O-methyladenosine-3'-phosphate
  modified_base 5: mod_base = OTHER; note = 2'-O-methylguanosine-3'-phosphate
  modified_base 6: mod_base = OTHER; note = 2'-O-methylcytidine-3'-phosphate
  modified_base 7: mod_base = OTHER; note = 2'-deoxy-2'-fluorouridine-3'-phosphate
  modified_base 8: mod_base = OTHER; note = 2'-O-methyladenosine-3'-phosphate
  modified_base 9: mod_base = OTHER; note = 2'-deoxy-2'-fluorocytidine-3'-phosphate
  modified_base 10: mod_base = OTHER; note = 2'-deoxy-2'-fluoroguanosine-3'-phosphate
  modified_base 11: mod_base = OTHER; note = 2'-deoxy-2'-fluorocytidine-3'-phosphate
  modified_base 12: mod_base = OTHER; note = 2'-O-methylcytidine-3'-phosphate
  modified_base 13: mod_base = OTHER; note = 2'-O-methyladenosine-3'-phosphate
  modified_base 14: mod_base = OTHER; note = 2'-O-methyladenosine-3'-phosphate
  modified_base 15: mod_base = OTHER; note = 2'-O-methyladenosine-3'-phosphate
  modified_base 16: mod_base = OTHER; note = 2'-O-methylcytidine-3'-phosphate
  modified_base 17: mod_base = OTHER; note = 2'-O-methylcytidine-3'-phosphate
  modified_base 18: mod_base = OTHER; note = 2'-O-methyluridine-3'-phosphate
  modified_base 19: mod_base = OTHER; note = 2'-O-methylcytidine-3'-phosphate
  modified_base 20: mod_base = OTHER; note = 2'-O-methylguanosine-3'-phosphate
  modified_base 21: mod_base = OTHER; note = 2'-O-methyluridine-3'-phosphate ((2S,4R)-1-[29-[[2-(acetylamino)-2-deoxy-beta-D-galactopyra nosyl]oxy]-14,14-bis[[3-[[3-[[5-[[2-(acetylamino)-2-deoxy-b eta-D-galactopyranosyl]oxy]-1-oxopentyl]amino]propyl]amino] -3-oxopropoxy]methyl]-1,12,19,25-tetraoxo-16-oxa-13,20,24-t riazanonacos-1-yl]-4-hydroxy-2-pyrrolidinyl)methyl ester
accagctacgccaaacctcgt

SEQ ID NO: 352 - RNA, 21 nt, synthetic construct
  source 1..21: mol_type = other RNA
  modified_base 1: mod_base = OTHER; note = 2'-O-methylcytidine-3'-phosphorothioate
  modified_base 2: mod_base = OTHER; note = 2'-O-methyluridine-3'-phosphorothioate
  modified_base 3: mod_base = OTHER; note = 2'-O-methylcytidine-3'-phosphate
  modified_base 4: mod_base = OTHER; note = 2'-O-methylguanosine-3'-phosphate
  modified_base 5: mod_base = OTHER; note = 2'-O-methylguanosine-3'-phosphate
  modified_base 6: mod_base = OTHER; note = 2'-O-methylcytidine-3'-phosphate
  modified_base 7: mod_base = OTHER; note = 2'-deoxy-2'-fluoroadenosine-3'-phosphate
  modified_base 8: mod_base = OTHER; note = 2'-O-methyluridine-3'-phosphate
  modified_base 9: mod_base = OTHER; note = 2'-deoxy-2'-fluorouridine-3'-phosphate
  modified_base 10: mod_base = OTHER; note = 2'-deoxy-2'-fluorouridine-3'-phosphate
  modified_base 11: mod_base = OTHER; note = 2'-deoxy-2'-fluorouridine-3'-phosphate
  modified_base 12: mod_base = OTHER; note = 2'-O-methyluridine-3'-phosphate
  modified_base 13: mod_base = OTHER; note = 2'-O-methyluridine-3'-phosphate
  modified_base 14: mod_base = OTHER; note = 2'-O-methylguanosine-3'-phosphate
  modified_base 15: mod_base = OTHER; note = 2'-O-methyluridine-3'-phosphate
  modified_base 16: mod_base = OTHER; note = 2'-O-methylguanosine-3'-phosphate
  modified_base 17: mod_base = OTHER; note = 2'-O-methyluridine-3'-phosphate
  modified_base 18: mod_base = OTHER; note = 2'-O-methyluridine-3'-phosphate
  modified_base 19: mod_base = OTHER; note = 2'-O-methyladenosine-3'-phosphate
  modified_base 20: mod_base = OTHER; note = 2'-O-methyluridine-3'-phosphate
  modified_base 21: mod_base = OTHER; note = 2'-O-methyluridine-3'-phosphate ((2S,4R)-1-[29-[[2-(acetylamino)-2-deoxy-beta-D-galactopyra nosyl]oxy]-14,14-bis[[3-[[3-[[5-[[2-(acetylamino)-2-deoxy-b eta-D-galactopyranosyl]oxy]-1-oxopentyl]amino]propyl]amino] -3-oxopropoxy]methyl]-1,12,19,25-tetraoxo-16-oxa-13,20,24-t riazanonacos-1-yl]-4-hydroxy-2-pyrrolidinyl)methyl ester
ctcggcattttttgtgttatt

SEQ ID NO: 353 - RNA, 21 nt, synthetic construct
  source 1..21: mol_type = other RNA
  modified_base 1: mod_base = OTHER; note = 2'-O-methylguanosine-3'-phosphorothioate
  modified_base 2: mod_base = OTHER; note = 2'-O-methyladenosine-3'-phosphorothioate
  modified_base 3: mod_base = OTHER; note = 2'-O-methylcytidine-3'-phosphate
  modified_base 4: mod_base = OTHER; note = 2'-O-methyluridine-3'-phosphate
  modified_base 5: mod_base = OTHER; note = 2'-O-methylguanosine-3'-phosphate
  modified_base 6: mod_base = OTHER; note = 2'-O-methylcytidine-3'-phosphate
  modified_base 7: mod_base = OTHER; note = 2'-deoxy-2'-fluorouridine-3'-phosphate
  modified_base 8: mod_base = OTHER; note = 2'-O-methylguanosine-3'-phosphate
  modified_base 9: mod_base = OTHER; note = 2'-deoxy-2'-fluoroguanosine-3'-phosphate
  modified_base 10: mod_base = OTHER; note = 2'-deoxy-2'-fluoroadenosine-3'-phosphate
  modified_base 11: mod_base = OTHER; note = 2'-deoxy-2'-fluorouridine-3'-phosphate
  modified_base 12: mod_base = OTHER; note = 2'-O-methyluridine-3'-phosphate
  modified_base 13: mod_base = OTHER; note = 2'-O-methylcytidine-3'-phosphate
  modified_base 14: mod_base = OTHER; note = 2'-O-methyluridine-3'-phosphate
  modified_base 15: mod_base = OTHER; note = 2'-O-methylguanosine-3'-phosphate
  modified_base 16: mod_base = OTHER; note = 2'-O-methyluridine-3'-phosphate
  modified_base 17: mod_base = OTHER; note = 2'-O-methyladenosine-3'-phosphate
  modified_base 18: mod_base = OTHER; note = 2'-O-methylguanosine-3'-phosphate
  modified_base 19: mod_base = OTHER; note = 2'-O-methyluridine-3'-phosphate
  modified_base 20: mod_base = OTHER; note = 2'-O-methyladenosine-3'-phosphate
  modified_base 21: mod_base = OTHER; note = 2'-O-methyluridine-3'-phosphate ((2S,4R)-1-[29-[[2-(acetylamino)-2-deoxy-beta-D-galactopyra nosyl]oxy]-14,14-bis[[3-[[3-[[5-[[2-(acetylamino)-2-deoxy-b eta-D-galactopyranosyl]oxy]-1-oxopentyl]amino]propyl]amino] -3-oxopropoxy]methyl]-1,12,19,25-tetraoxo-16-oxa-13,20,24-t riazanonacos-1-yl]-4-hydroxy-2-pyrrolidinyl)methyl ester
gactgctggattctgtagtat

SEQ ID NO: 354 - RNA, 21 nt, synthetic construct
  source 1..21: mol_type = other RNA
  modified_base 1: mod_base = OTHER; note = 2'-O-methyluridine-3'-phosphorothioate
  modified_base 2: mod_base = OTHER; note = 2'-O-methyladenosine-3'-phosphorothioate
  modified_base 3: mod_base = OTHER; note = 2'-O-methylguanosine-3'-phosphate
  modified_base 4: mod_base = OTHER; note = 2'-O-methyluridine-3'-phosphate
  modified_base 5: mod_base = OTHER; note = 2'-O-methyladenosine-3'-phosphate
  modified_base 6: mod_base = OTHER; note = 2'-O-methyladenosine-3'-phosphate
  modified_base 7: mod_base = OTHER; note = 2'-deoxy-2'-fluoroguanosine-3'-phosphate
  modified_base 8: mod_base = OTHER; note = 2'-O-methylguanosine-3'-phosphate
  modified_base 9: mod_base = OTHER; note = 2'-deoxy-2'-fluorouridine-3'-phosphate
  modified_base 10: mod_base = OTHER; note = 2'-deoxy-2'-fluoroguanosine-3'-phosphate
  modified_base 11: mod_base = OTHER; note = 2'-deoxy-2'-fluoroadenosine-3'-phosphate
  modified_base 12: mod_base = OTHER; note = 2'-O-methylcytidine-3'-phosphate
  modified_base 13: mod_base = OTHER; note = 2'-O-methyladenosine-3'-phosphate
  modified_base 14: mod_base = OTHER; note = 2'-O-methyluridine-3'-phosphate
  modified_base 15: mod_base = OTHER; note = 2'-O-methyladenosine-3'-phosphate
  modified_base 16: mod_base = OTHER; note = 2'-O-methylguanosine-3'-phosphate
  modified_base 17: mod_base = OTHER; note = 2'-O-methylcytidine-3'-phosphate
  modified_base 18: mod_base = OTHER; note = 2'-O-methyluridine-3'-phosphate
  modified_base 19: mod_base = OTHER; note = 2'-O-methyladenosine-3'-phosphate
  modified_base 20: mod_base = OTHER; note = 2'-O-methyluridine-3'-phosphate
  modified_base 21: mod_base = OTHER; note = 2'-O-methyluridine-3'-phosphate ((2S,4R)-1-[29-[[2-(acetylamino)-2-deoxy-beta-D-galactopyra nosyl]oxy]-14,14-bis[[3-[[3-[[5-[[2-(acetylamino)-2-deoxy-b eta-D-galactopyranosyl]oxy]-1-oxopentyl]amino]propyl]amino] -3-oxopropoxy]methyl]-1,12,19,25-tetraoxo-16-oxa-13,20,24-t riazanonacos-1-yl]-4-hydroxy-2-pyrrolidinyl)methyl ester
tagtaaggtgacatagctatt

SEQ ID NO: 355 - RNA, 21 nt, synthetic construct
  source 1..21: mol_type = other RNA
  modified_base 1: mod_base = OTHER; note = 2'-O-methyluridine-3'-phosphorothioate
  modified_base 2: mod_base = OTHER; note = 2'-O-methylcytidine-3'-phosphorothioate
  modified_base 3: mod_base = OTHER; note = 2'-O-methyluridine-3'-phosphate
  modified_base 4: mod_base = OTHER; note = 2'-O-methylguanosine-3'-phosphate
  modified_base 5: mod_base = OTHER; note = 2'-O-methyluridine-3'-phosphate
  modified_base 6: mod_base = OTHER; note = 2'-O-methyladenosine-3'-phosphate
  modified_base 7: mod_base = OTHER; note = 2'-deoxy-2'-fluorocytidine-3'-phosphate
  modified_base 8: mod_base = OTHER; note = 2'-O-methyluridine-3'-phosphate
  modified_base 9: mod_base = OTHER; note = 2'-deoxy-2'-fluorouridine-3'-phosphate
  modified_base 10: mod_base = OTHER; note = 2'-deoxy-2'-fluoroadenosine-3'-phosphate
  modified_base 11: mod_base = OTHER; note = 2'-deoxy-2'-fluoroadenosine-3'-phosphate
  modified_base 12: mod_base = OTHER; note = 2'-O-methylcytidine-3'-phosphate
  modified_base 13: mod_base = OTHER; note = 2'-O-methyluridine-3'-phosphate
  modified_base 14: mod_base = OTHER; note = 2'-O-methyluridine-3'-phosphate
  modified_base 15: mod_base = OTHER; note = 2'-O-methyluridine-3'-phosphate
  modified_base 16: mod_base = OTHER; note = 2'-O-methylguanosine-3'-phosphate
  modified_base 17: mod_base = OTHER; note = 2'-O-methyladenosine-3'-phosphate
  modified_base 18: mod_base = OTHER; note = 2'-O-methyluridine-3'-phosphate
  modified_base 19: mod_base = OTHER; note = 2'-O-methyluridine-3'-phosphate
  modified_base 20: mod_base = OTHER; note = 2'-O-methyluridine-3'-phosphate
  modified_base 21: mod_base = OTHER; note = 2'-O-methyluridine-3'-phosphate ((2S,4R)-1-[29-[[2-(acetylamino)-2-deoxy-beta-D-galactopyra nosyl]oxy]-14,14-bis[[3-[[3-[[5-[[2-(acetylamino)-2-deoxy-b eta-D-galactopyranosyl]oxy]-1-oxopentyl]amino]propyl]amino] -3-oxopropoxy]methyl]-1,12,19,25-tetraoxo-16-oxa-13,20,24-t riazanonacos-1-yl]-4-hydroxy-2-pyrrolidinyl)methyl ester
tctgtacttaactttgatttt

SEQ ID NO: 356 - RNA, 21 nt, synthetic construct
  source 1..21: mol_type = other RNA
  modified_base 1: mod_base = OTHER; note = 2'-O-methyladenosine-3'-phosphorothioate
  modified_base 2: mod_base = OTHER; note = 2'-O-methyluridine-3'-phosphorothioate
  modified_base 3: mod_base = OTHER; note = 2'-O-methyluridine-3'-phosphate
  modified_base 4: mod_base = OTHER; note = 2'-O-methyluridine-3'-phosphate
  modified_base 5: mod_base = OTHER; note = 2'-O-methyluridine-3'-phosphate
  modified_base 6: mod_base = OTHER; note = 2'-O-methylguanosine-3'-phosphate
  modified_base 7: mod_base = OTHER; note = 2'-deoxy-2'-fluoroguanosine-3'-phosphate
  modified_base 8: mod_base = OTHER; note = 2'-O-methyluridine-3'-phosphate
  modified_base 9: mod_base = OTHER; note = 2'-deoxy-2'-fluorouridine-3'-phosphate
  modified_base 10: mod_base = OTHER; note = 2'-deoxy-2'-fluorouridine-3'-phosphate
  modified_base 11: mod_base = OTHER; note = 2'-deoxy-2'-fluorouridine-3'-phosphate
  modified_base 12: mod_base = OTHER; note = 2'-O-methylguanosine-3'-phosphate
  modified_base 13: mod_base = OTHER; note = 2'-O-methylguanosine-3'-phosphate
  modified_base 14: mod_base = OTHER; note = 2'-O-methyluridine-3'-phosphate
  modified_base 15: mod_base = OTHER; note = 2'-O-methylcytidine-3'-phosphate
  modified_base 16: mod_base = OTHER; note = 2'-O-methyluridine-3'-phosphate
  modified_base 17: mod_base = OTHER; note = 2'-O-methyluridine-3'-phosphate
  modified_base 18: mod_base = OTHER; note = 2'-O-methylcytidine-3'-phosphate
  modified_base 19: mod_base = OTHER; note = 2'-O-methyladenosine-3'-phosphate
  modified_base 20: mod_base = OTHER; note = 2'-O-methyladenosine-3'-phosphate
  modified_base 21: mod_base = OTHER; note = 2'-O-methyluridine-3'-phosphate ((2S,4R)-1-[29-[[2-(acetylamino)-2-deoxy-beta-D-galactopyra nosyl]oxy]-14,14-bis[[3-[[3-[[5-[[2-(acetylamino)-2-deoxy-b eta-D-galactopyranosyl]oxy]-1-oxopentyl]amino]propyl]amino] -3-oxopropoxy]methyl]-1,12,19,25-tetraoxo-16-oxa-13,20,24-t riazanonacos-1-yl]-4-hydroxy-2-pyrrolidinyl)methyl ester
attttggttttggtcttcaat

SEQ ID NO: 357 - RNA, 21 nt, synthetic construct
  source 1..21: mol_type = other RNA
  modified_base 1: mod_base = OTHER; note = 2'-O-methyluridine-3'-phosphorothioate
  modified_base 2: mod_base = OTHER; note = 2'-O-methyluridine-3'-phosphorothioate
  modified_base 3: mod_base = OTHER; note = 2'-O-methylcytidine-3'-phosphate
  modified_base 4: mod_base = OTHER; note = 2'-O-methyladenosine-3'-phosphate
  modified_base 5: mod_base = OTHER; note = 2'-O-methyladenosine-3'-phosphate
  modified_base 6: mod_base = OTHER; note = 2'-O-methylcytidine-3'-phosphate
  modified_base 7: mod_base = OTHER; note = 2'-deoxy-2'-fluoroadenosine-3'-phosphate
  modified_base 8: mod_base = OTHER; note = 2'-O-methyluridine-3'-phosphate
  modified_base 9: mod_base = OTHER; note = 2'-deoxy-2'-fluorouridine-3'-phosphate
  modified_base 10: mod_base = OTHER; note = 2'-deoxy-2'-fluorouridine-3'-phosphate
  modified_base 11: mod_base = OTHER; note = 2'-deoxy-2'-fluorouridine-3'-phosphate
  modified_base 12: mod_base = OTHER; note = 2'-O-methylcytidine-3'-phosphate
  modified_base 13: mod_base = OTHER; note = 2'-O-methyladenosine-3'-phosphate
  modified_base 14: mod_base = OTHER; note = 2'-O-methyluridine-3'-phosphate
  modified_base 15: mod_base = OTHER; note = 2'-O-methylguanosine-3'-phosphate
  modified_base 16: mod_base = OTHER; note = 2'-O-methylcytidine-3'-phosphate
  modified_base 17: mod_base = OTHER; note = 2'-O-methyluridine-3'-phosphate
  modified_base 18: mod_base = OTHER; note = 2'-O-methylcytidine-3'-phosphate
  modified_base 19: mod_base = OTHER; note = 2'-O-methyluridine-3'-phosphate
  modified_base 20: mod_base = OTHER; note = 2'-O-methyluridine-3'-phosphate
  modified_base 21: mod_base = OTHER; note = 2'-O-methyluridine-3'-phosphate ((2S,4R)-1-[29-[[2-(acetylamino)-2-deoxy-beta-D-galactopyra nosyl]oxy]-14,14-bis[[3-[[3-[[5-[[2-(acetylamino)-2-deoxy-b eta-D-galactopyranosyl]oxy]-1-oxopentyl]amino]propyl]amino] -3-oxopropoxy]methyl]-1,12,19,25-tetraoxo-16-oxa-13,20,24-t riazanonacos-1-yl]-4-hydroxy-2-pyrrolidinyl)methyl ester
ttcaacattttcatgctcttt

SEQ ID NO: 358 - RNA, 21 nt, synthetic construct
  source 1..21: mol_type = other RNA
  modified_base 1: mod_base = OTHER; note = 2'-O-methylcytidine-3'-phosphorothioate
  modified_base 2: mod_base = OTHER; note = 2'-O-methyladenosine-3'-phosphorothioate
  modified_base 3: mod_base = OTHER; note = 2'-O-methylcytidine-3'-phosphate
  modified_base 4: mod_base = OTHER; note = 2'-O-methylcytidine-3'-phosphate
  modified_base 5: mod_base = OTHER; note = 2'-O-methyladenosine-3'-phosphate
  modified_base 6: mod_base = OTHER; note = 2'-O-methyladenosine-3'-phosphate
  modified_base 7: mod_base = OTHER; note = 2'-deoxy-2'-fluorouridine-3'-phosphate
  modified_base 8: mod_base = OTHER; note = 2'-O-methyluridine-3'-phosphate
  modified_base 9: mod_base = OTHER; note = 2'-deoxy-2'-fluorouridine-3'-phosphate
  modified_base 10: mod_base = OTHER; note = 2'-deoxy-2'-fluorouridine-3'-phosphate
  modified_base 11: mod_base = OTHER; note = 2'-deoxy-2'-fluorouridine-3'-phosphate
  modified_base 12: mod_base = OTHER; note = 2'-O-methyladenosine-3'-phosphate
  modified_base 13: mod_base = OTHER; note = 2'-O-methyladenosine-3'-phosphate
  modified_base 14: mod_base = OTHER; note = 2'-O-methyladenosine-3'-phosphate
  modified_base 15: mod_base = OTHER; note = 2'-O-methyluridine-3'-phosphate
  modified_base 16: mod_base = OTHER; note = 2'-O-methylguanosine-3'-phosphate
  modified_base 17: mod_base = OTHER; note = 2'-O-methylguanosine-3'-phosphate
  modified_base 18: mod_base = OTHER; note = 2'-O-methylguanosine-3'-phosphate
  modified_base 19: mod_base = OTHER; note = 2'-O-methylcytidine-3'-phosphate
  modified_base 20: mod_base = OTHER; note = 2'-O-methyladenosine-3'-phosphate
  modified_base 21: mod_base = OTHER; note = 2'-O-methyluridine-3'-phosphate ((2S,4R)-1-[29-[[2-(acetylamino)-2-deoxy-beta-D-galactopyra nosyl]oxy]-14,14-bis[[3-[[3-[[5-[[2-(acetylamino)-2-deoxy-b eta-D-galactopyranosyl]oxy]-1-oxopentyl]amino]propyl]amino] -3-oxopropoxy]methyl]-1,12,19,25-tetraoxo-16-oxa-13,20,24-t riazanonacos-1-yl]-4-hydroxy-2-pyrrolidinyl)methyl ester
caccaatttttaaatgggcat

SEQ ID NO: 359 - RNA, 21 nt, synthetic construct
  source 1..21: mol_type = other RNA
  modified_base 1: mod_base = OTHER; note = 2'-O-methyladenosine-3'-phosphorothioate
  modified_base 2: mod_base = OTHER; note = 2'-O-methylguanosine-3'-phosphorothioate
  modified_base 3: mod_base = OTHER; note = 2'-O-methylcytidine-3'-phosphate
  modified_base 4: mod_base = OTHER; note = 2'-O-methyluridine-3'-phosphate
  modified_base 5: mod_base = OTHER; note = 2'-O-methylguanosine-3'-phosphate
  modified_base 6: mod_base = OTHER; note = 2'-O-methylcytidine-3'-phosphate
  modified_base 7: mod_base = OTHER; note = 2'-deoxy-2'-fluorouridine-3'-phosphate
  modified_base 8: mod_base = OTHER; note = 2'-O-methyluridine-3'-phosphate
  modified_base 9: mod_base = OTHER; note = 2'-deoxy-2'-fluorouridine-3'-phosphate
  modified_base 10: mod_base = OTHER; note = 2'-deoxy-2'-fluorouridine-3'-phosphate
  modified_base 11: mod_base = OTHER; note = 2'-deoxy-2'-fluoroguanosine-3'-phosphate
  modified_base 12: mod_base = OTHER; note = 2'-O-methyladenosine-3'-phosphate
  modified_base 13: mod_base = OTHER; note = 2'-O-methyluridine-3'-phosphate
  modified_base 14: mod_base = OTHER; note = 2'-O-methyladenosine-3'-phosphate
  modified_base 15: mod_base = OTHER; note = 2'-O-methyladenosine-3'-phosphate
  modified_base 16: mod_base = OTHER; note = 2'-O-methylguanosine-3'-phosphate
  modified_base 17: mod_base = OTHER; note = 2'-O-methylguanosine-3'-phosphate
  modified_base 18: mod_base = OTHER; note = 2'-O-methyladenosine-3'-phosphate
  modified_base 19: mod_base = OTHER; note = 2'-O-methyladenosine-3'-phosphate
  modified_base 20: mod_base = OTHER; note = 2'-O-methylcytidine-3'-phosphate
  modified_base 21: mod_base = OTHER; note = 2'-O-methyluridine-3'-phosphate ((2S,4R)-1-[29-[[2-(acetylamino)-2-deoxy-beta-D-galactopyra nosyl]oxy]-14,14-bis[[3-[[3-[[5-[[2-(acetylamino)-2-deoxy-b eta-D-galactopyranosyl]oxy]-1-oxopentyl]amino]propyl]amino] -3-oxopropoxy]methyl]-1,12,19,25-tetraoxo-16-oxa-13,20,24-t riazanonacos-1-yl]-4-hydroxy-2-pyrrolidinyl)methyl ester
agctgcttttgataaggaact

SEQ ID NO: 360 - RNA, 21 nt, synthetic construct
  source 1..21: mol_type = other RNA
  modified_base 1: mod_base = OTHER; note = 2'-O-methylcytidine-3'-phosphorothioate
  modified_base 2: mod_base = OTHER; note = 2'-O-methyluridine-3'-phosphorothioate
  modified_base 3: mod_base = OTHER; note = 2'-O-methylguanosine-3'-phosphate
  modified_base 4: mod_base = OTHER; note = 2'-O-methylcytidine-3'-phosphate
  modified_base 5: mod_base = OTHER; note = 2'-O-methyladenosine-3'-phosphate
  modified_base 6: mod_base = OTHER; note = 2'-O-methylcytidine-3'-phosphate
  modified_base 7: mod_base = OTHER; note = 2'-deoxy-2'-fluoroadenosine-3'-phosphate
  modified_base 8: mod_base = OTHER; note = 2'-O-methyladenosine-3'-phosphate
  modified_base 9: mod_base = OTHER; note = 2'-deoxy-2'-fluoroadenosine-3'-phosphate
  modified_base 10: mod_base = OTHER; note = 2'-deoxy-2'-fluoroguanosine-3'-phosphate
  modified_base 11: mod_base = OTHER; note = 2'-deoxy-2'-fluoroguanosine-3'-phosphate
  modified_base 12: mod_base = OTHER; note = 2'-O-methyladenosine-3'-phosphate
  modified_base 13: mod_base = OTHER; note = 2'-O-methylcytidine-3'-phosphate
  modified_base 14: mod_base = OTHER; note = 2'-O-methyluridine-3'-phosphate
  modified_base 15: mod_base = OTHER; note = 2'-O-methylguanosine-3'-phosphate
  modified_base 16: mod_base = OTHER; note = 2'-O-methyladenosine-3'-phosphate
  modified_base 17: mod_base = OTHER; note = 2'-O-methylguanosine-3'-phosphate
  modified_base 18: mod_base = OTHER; note = 2'-O-methylcytidine-3'-phosphate
  modified_base 19: mod_base = OTHER; note = 2'-O-methyladenosine-3'-phosphate
  modified_base 20: mod_base = OTHER; note = 2'-O-methylguanosine-3'-phosphate
  modified_base 21: mod_base = OTHER; note = 2'-O-methyluridine-3'-phosphate ((2S,4R)-1-[29-[[2-(acetylamino)-2-deoxy-beta-D-galactopyra nosyl]oxy]-14,14-bis[[3-[[3-[[5-[[2-(acetylamino)-2-deoxy-b eta-D-galactopyranosyl]oxy]-1-oxopentyl]amino]propyl]amino] -3-oxopropoxy]methyl]-1,12,19,25-tetraoxo-16-oxa-13,20,24-t riazanonacos-1-yl]-4-hydroxy-2-pyrrolidinyl)methyl ester
ctgcacaaaggactgagcagt

SEQ ID NO: 361 - RNA, 21 nt, synthetic construct
  source 1..21: mol_type = other RNA
  modified_base 1: mod_base = OTHER; note = 2'-O-methylguanosine-3'-phosphorothioate
  modified_base 2: mod_base = OTHER; note = 2'-O-methyladenosine-3'-phosphorothioate
  modified_base 3: mod_base = OTHER; note = 2'-O-methyladenosine-3'-phosphate
  modified_base 4: mod_base = OTHER; note = 2'-O-methylguanosine-3'-phosphate
  modified_base 5: mod_base = OTHER; note = 2'-O-methyluridine-3'-phosphate
  modified_base 6: mod_base = OTHER; note = 2'-O-methyluridine-3'-phosphate
  modified_base 7: mod_base = OTHER; note = 2'-deoxy-2'-fluoroguanosine-3'-phosphate
  modified_base 8: mod_base = OTHER; note = 2'-O-methyluridine-3'-phosphate
  modified_base 9: mod_base = OTHER; note = 2'-deoxy-2'-fluorocytidine-3'-phosphate
  modified_base 10: mod_base = OTHER; note = 2'-deoxy-2'-fluorocytidine-3'-phosphate
  modified_base 11: mod_base = OTHER; note = 2'-deoxy-2'-fluoroadenosine-3'-phosphate
  modified_base 12: mod_base = OTHER; note = 2'-O-methylcytidine-3'-phosphate
  modified_base 13: mod_base = OTHER; note = 2'-O-methylguanosine-3'-phosphate
  modified_base 14: mod_base = OTHER; note = 2'-O-methylcytidine-3'-phosphate
  modified_base 15: mod_base = OTHER; note = 2'-O-methyladenosine-3'-phosphate
  modified_base 16: mod_base = OTHER; note = 2'-O-methyluridine-3'-phosphate
  modified_base 17: mod_base = OTHER; note = 2'-O-methyluridine-3'-phosphate
  modified_base 18: mod_base = OTHER; note = 2'-O-methyluridine-3'-phosphate
  modified_base 19: mod_base = OTHER; note = 2'-O-methyladenosine-3'-phosphate
  modified_base 20: mod_base = OTHER; note = 2'-O-methylcytidine-3'-phosphate
  modified_base 21: mod_base = OTHER; note = 2'-O-methyluridine-3'-phosphate ((2S,4R)-1-[29-[[2-(acetylamino)-2-deoxy-beta-D-galactopyra nosyl]oxy]-14,14-bis[[3-[[3-[[5-[[2-(acetylamino)-2-deoxy-b eta-D-galactopyranosyl]oxy]-1-oxopentyl]amino]propyl]amino] -3-oxopropoxy]methyl]-1,12,19,25-tetraoxo-16-oxa-13,20,24-t riazanonacos-1-yl]-4-hydroxy-2-pyrrolidinyl)methyl ester
gaagttgtccacgcatttact

SEQ ID NO: 362 - RNA, 21 nt, synthetic construct
  source 1..21: mol_type = other RNA
  modified_base 1: mod_base = OTHER; note = 2'-O-methyluridine-3'-phosphorothioate
  modified_base 2: mod_base = OTHER; note = 2'-O-methyluridine-3'-phosphorothioate
  modified_base 3: mod_base = OTHER; note = 2'-O-methyladenosine-3'-phosphate
  modified_base 4: mod_base = OTHER; note = 2'-O-methylcytidine-3'-phosphate
  modified_base 5: mod_base = OTHER; note = 2'-O-methylcytidine-3'-phosphate
  modified_base 6: mod_base = OTHER; note = 2'-O-methyluridine-3'-phosphate
  modified_base 7: mod_base = OTHER; note = 2'-deoxy-2'-fluorocytidine-3'-phosphate
  modified_base 8: mod_base = OTHER; note = 2'-O-methyladenosine-3'-phosphate
  modified_base 9: mod_base = OTHER; note = 2'-deoxy-2'-fluorouridine-3'-phosphate
  modified_base 10: mod_base = OTHER; note = 2'-deoxy-2'-fluorocytidine-3'-phosphate
  modified_base 11: mod_base = OTHER; note = 2'-deoxy-2'-fluoroadenosine-3'-phosphate
  modified_base 12: mod_base = OTHER; note = 2'-O-methylguanosine-3'-phosphate
  modified_base 13: mod_base = OTHER; note = 2'-O-methylcytidine-3'-phosphate
  modified_base 14: mod_base = OTHER; note = 2'-O-methyluridine-3'-phosphate
  modified_base 15: mod_base = OTHER; note = 2'-O-methyladenosine-3'-phosphate
  modified_base 16: mod_base = OTHER; note = 2'-O-methyladenosine-3'-phosphate
  modified_base 17: mod_base = OTHER; note = 2'-O-methylcytidine-3'-phosphate
  modified_base 18: mod_base = OTHER; note = 2'-O-methylguanosine-3'-phosphate
  modified_base 19: mod_base = OTHER; note = 2'-O-methyladenosine-3'-phosphate
  modified_base 20: mod_base = OTHER; note = 2'-O-methylguanosine-3'-phosphate
  modified_base 21: mod_base = OTHER; note = 2'-O-methyluridine-3'-phosphate ((2S,4R)-1-[29-[[2-(acetylamino)-2-deoxy-beta-D-galactopyra nosyl]oxy]-14,14-bis[[3-[[3-[[5-[[2-(acetylamino)-2-deoxy-b eta-D-galactopyranosyl]oxy]-1-oxopentyl]amino]propyl]amino] -3-oxopropoxy]methyl]-1,12,19,25-tetraoxo-16-oxa-13,20,24-t riazanonacos-1-yl]-4-hydroxy-2-pyrrolidinyl)methyl ester
ttacctcatcagctaacgagt

SEQ ID NO: 363 - RNA, 21 nt, synthetic construct
  source 1..21: mol_type = other RNA
  modified_base 1: mod_base = OTHER; note = 2'-O-methyluridine-3'-phosphorothioate
  modified_base 2: mod_base = OTHER; note = 2'-O-methylguanosine-3'-phosphorothioate
  modified_base 3: mod_base = OTHER; note = 2'-O-methyladenosine-3'-phosphate
  modified_base 4: mod_base = OTHER; note = 2'-O-methylcytidine-3'-phosphate
  modified_base 5: mod_base = OTHER; note = 2'-O-methyladenosine-3'-phosphate
  modified_base 6: mod_base = OTHER; note = 2'-O-methyluridine-3'-phosphate
  modified_base 7: mod_base = OTHER; note = 2'-deoxy-2'-fluoroguanosine-3'-phosphate
  modified_base 8: mod_base = OTHER; note = 2'-O-methylcytidine-3'-phosphate
  modified_base 9: mod_base = OTHER; note = 2'-deoxy-2'-fluoroadenosine-3'-phosphate
  modified_base 10: mod_base = OTHER; note = 2'-deoxy-2'-fluorouridine-3'-phosphate
  modified_base 11: mod_base = OTHER; note = 2'-deoxy-2'-fluorouridine-3'-phosphate
  modified_base 12: mod_base = OTHER; note = 2'-O-methyluridine-3'-phosphate
  modified_base 13: mod_base = OTHER; note = 2'-O-methyluridine-3'-phosphate
  modified_base 14: mod_base = OTHER; note = 2'-O-methyluridine-3'-phosphate
  modified_base 15: mod_base = OTHER; note = 2'-O-methyladenosine-3'-phosphate
  modified_base 16: mod_base = OTHER; note = 2'-O-methylcytidine-3'-phosphate
  modified_base 17: mod_base = OTHER; note = 2'-O-methyluridine-3'-phosphate
  modified_base 18: mod_base = OTHER; note = 2'-O-methylguanosine-3'-phosphate
  modified_base 19: mod_base = OTHER; note = 2'-O-methyluridine-3'-phosphate
  modified_base 20: mod_base = OTHER; note = 2'-O-methylcytidine-3'-phosphate
  modified_base 21: mod_base = OTHER; note = 2'-O-methyluridine-3'-phosphate ((2S,4R)-1-[29-[[2-(acetylamino)-2-deoxy-beta-D-galactopyra nosyl]oxy]-14,14-bis[[3-[[3-[[5-[[2-(acetylamino)-2-deoxy-b eta-D-galactopyranosyl]oxy]-1-oxopentyl]amino]propyl]amino] -3-oxopropoxy]methyl]-1,12,19,25-tetraoxo-16-oxa-13,20,24-t riazanonacos-1-yl]-4-hydroxy-2-pyrrolidinyl)methyl ester
tgacatgcatttttactgtct

SEQ ID NO: 364 - RNA, 21 nt, synthetic construct
  source 1..21: mol_type = other RNA
  modified_base 1: mod_base = OTHER; note = 2'-O-methylcytidine-3'-phosphorothioate
  modified_base 2: mod_base = OTHER; note = 2'-O-methyluridine-3'-phosphorothioate
  modified_base 3: mod_base = OTHER; note = 2'-O-methylguanosine-3'-phosphate
  modified_base 4: mod_base = OTHER; note = 2'-O-methyluridine-3'-phosphate
  modified_base 5: mod_base = OTHER; note = 2'-O-methylcytidine-3'-phosphate
  modified_base 6: mod_base = OTHER; note = 2'-O-methyluridine-3'-phosphate
  modified_base 7: mod_base = OTHER; note = 2'-deoxy-2'-fluorouridine-3'-phosphate
  modified_base 8: mod_base = OTHER; note = 2'-O-methyluridine-3'-phosphate
  modified_base 9: mod_base = OTHER; note = 2'-deoxy-2'-fluoroadenosine-3'-phosphate
  modified_base 10: mod_base = OTHER; note = 2'-deoxy-2'-fluorouridine-3'-phosphate
  modified_base 11: mod_base = OTHER; note = 2'-deoxy-2'-fluorouridine-3'-phosphate
  modified_base 12: mod_base = OTHER; note = 2'-O-methylcytidine-3'-phosphate
  modified_base 13: mod_base = OTHER; note = 2'-O-methylcytidine-3'-phosphate
  modified_base 14: mod_base = OTHER; note = 2'-O-methyluridine-3'-phosphate
  modified_base 15: mod_base = OTHER; note = 2'-O-methylguanosine-3'-phosphate
  modified_base 16: mod_base = OTHER; note = 2'-O-methyladenosine-3'-phosphate
  modified_base 17: mod_base = OTHER; note = 2'-O-methylcytidine-3'-phosphate
  modified_base 18: mod_base = OTHER; note = 2'-O-methyladenosine-3'-phosphate
  modified_base 19: mod_base = OTHER; note = 2'-O-methylcytidine-3'-phosphate
  modified_base 20: mod_base = OTHER; note = 2'-O-methyluridine-3'-phosphate
  modified_base 21: mod_base = OTHER; note = 2'-O-methyluridine-3'-phosphate ((2S,4R)-1-[29-[[2-(acetylamino)-2-deoxy-beta-D-galactopyra nosyl]oxy]-14,14-bis[[3-[[3-[[5-[[2-(acetylamino)-2-deoxy-b eta-D-galactopyranosyl]oxy]-1-oxopentyl]amino]propyl]amino] -3-oxopropoxy]methyl]-1,12,19,25-tetraoxo-16-oxa-13,20,24-t riazanonacos-1-yl]-4-hydroxy-2-pyrrolidinyl)methyl ester
ctgtctttattcctgacactt

SEQ ID NO: 365 - RNA, 21 nt, synthetic construct
  source 1..21: mol_type = other RNA
  modified_base 1: mod_base = OTHER; note = 2'-O-methylcytidine-3'-phosphorothioate
  modified_base 2: mod_base = OTHER; note = 2'-O-methyluridine-3'-phosphorothioate
  modified_base 3: mod_base = OTHER; note = 2'-O-methylguanosine-3'-phosphate
  modified_base 4: mod_base = OTHER; note = 2'-O-methyladenosine-3'-phosphate
  modified_base 5: mod_base = OTHER; note = 2'-O-methylguanosine-3'-phosphate
  modified_base 6: mod_base = OTHER; note = 2'-O-methyladenosine-3'-phosphate
  modified_base 7: mod_base = OTHER; note = 2'-deoxy-2'-fluorouridine-3'-phosphate
  modified_base 8: mod_base = OTHER; note = 2'-O-methylguanosine-3'-phosphate
  modified_base 9: mod_base = OTHER; note = 2'-deoxy-2'-fluoroadenosine-3'-phosphate
  modified_base 10: mod_base = OTHER; note = 2'-deoxy-2'-fluoroadenosine-3'-phosphate
  modified_base 11: mod_base = OTHER; note = 2'-deoxy-2'-fluorouridine-3'-phosphate
  modified_base 12: mod_base = OTHER; note = 2'-O-methylguanosine-3'-phosphate
  modified_base 13: mod_base = OTHER; note = 2'-O-methyluridine-3'-phosphate
  modified_base 14: mod_base = OTHER; note = 2'-O-methyluridine-3'-phosphate
  modified_base 15: mod_base = OTHER; note = 2'-O-methyluridine-3'-phosphate
  modified_base 16: mod_base = OTHER; note = 2'-O-methyluridine-3'-phosphate
  modified_base 17: mod_base = OTHER; note = 2'-O-methylcytidine-3'-phosphate
  modified_base 18: mod_base = OTHER; note = 2'-O-methyladenosine-3'-phosphate
  modified_base 19: mod_base = OTHER; note = 2'-O-methyladenosine-3'-phosphate
  modified_base 20: mod_base = OTHER; note = 2'-O-methyladenosine-3'-phosphate
  modified_base 21: mod_base = OTHER; note = 2'-O-methyluridine-3'-phosphate ((2S,4R)-1-[29-[[2-(acetylamino)-2-deoxy-beta-D-galactopyra nosyl]oxy]-14,14-bis[[3-[[3-[[5-[[2-(acetylamino)-2-deoxy-b eta-D-galactopyranosyl]oxy]-1-oxopentyl]amino]propyl]amino] -3-oxopropoxy]methyl]-1,12,19,25-tetraoxo-16-oxa-13,20,24-t riazanonacos-1-yl]-4-hydroxy-2-pyrrolidinyl)methyl ester
ctgagatgaatgttttcaaat

SEQ ID NO: 366 - RNA, 21 nt, synthetic construct
  source 1..21: mol_type = other RNA
  modified_base 1: mod_base = OTHER; note = 2'-O-methyluridine-3'-phosphorothioate
  modified_base 2: mod_base = OTHER; note = 2'-O-methylcytidine-3'-phosphorothioate
  modified_base 3: mod_base = OTHER; note = 2'-O-methyladenosine-3'-phosphate
  modified_base 4: mod_base = OTHER; note = 2'-O-methyladenosine-3'-phosphate
  modified_base 5: mod_base = OTHER; note = 2'-O-methyladenosine-3'-phosphate
  modified_base 6: mod_base = OTHER; note = 2'-O-methylguanosine-3'-phosphate
  modified_base 7: mod_base = OTHER; note = 2'-deoxy-2'-fluorocytidine-3'-phosphate
  modified_base 8: mod_base = OTHER; note = 2'-O-methyluridine-3'-phosphate
  modified_base 9: mod_base = OTHER; note = 2'-deoxy-2'-fluoroguanosine-3'-phosphate
  modified_base 10: mod_base = OTHER; note = 2'-deoxy-2'-fluorocytidine-3'-phosphate
  modified_base 11: mod_base = OTHER; note = 2'-deoxy-2'-fluoroadenosine-3'-phosphate
  modified_base 12: mod_base = OTHER; note = 2'-O-methyladenosine-3'-phosphate
  modified_base 13: mod_base = OTHER; note = 2'-O-methylcytidine-3'-phosphate
  modified_base 14: mod_base = OTHER; note = 2'-O-methyladenosine-3'-phosphate
  modified_base 15: mod_base = OTHER; note = 2'-O-methyluridine-3'-phosphate
  modified_base 16: mod_base = OTHER; note = 2'-O-methylguanosine-3'-phosphate
  modified_base 17: mod_base = OTHER; note = 2'-O-methyluridine-3'-phosphate
  modified_base 18: mod_base = OTHER; note = 2'-O-methyladenosine-3'-phosphate
  modified_base 19: mod_base = OTHER; note = 2'-O-methyluridine-3'-phosphate
  modified_base 20: mod_base = OTHER; note = 2'-O-methylguanosine-3'-phosphate
  modified_base 21: mod_base = OTHER; note = 2'-O-methyluridine-3'-phosphate ((2S,4R)-1-[29-[[2-(acetylamino)-2-deoxy-beta-D-galactopyra nosyl]oxy]-14,14-bis[[3-[[3-[[5-[[2-(acetylamino)-2-deoxy-b eta-D-galactopyranosyl]oxy]-1-oxopentyl]amino]propyl]amino] -3-oxopropoxy]methyl]-1,12,19,25-tetraoxo-16-oxa-13,20,24-t riazanonacos-1-yl]-4-hydroxy-2-pyrrolidinyl)methyl ester
tcaaagctgcaacatgtatgt

SEQ ID NO: 367 - RNA, 21 nt, synthetic construct
  source 1..21: mol_type = other RNA
  modified_base 1: mod_base = OTHER; note = 2'-O-methyluridine-3'-phosphorothioate
  modified_base 2: mod_base = OTHER; note = 2'-O-methylcytidine-3'-phosphorothioate
  modified_base 3: mod_base = OTHER; note = 2'-O-methyladenosine-3'-phosphate
  modified_base 4: mod_base = OTHER; note = 2'-O-methyluridine-3'-phosphate
  modified_base 5: mod_base = OTHER; note = 2'-O-methylguanosine-3'-phosphate
  modified_base 6: mod_base = OTHER; note = 2'-O-methylcytidine-3'-phosphate
  modified_base 7: mod_base = OTHER; note = 2'-deoxy-2'-fluoroadenosine-3'-phosphate
  modified_base 8: mod_base = OTHER; note = 2'-O-methyladenosine-3'-phosphate
  modified_base 9: mod_base = OTHER; note = 2'-deoxy-2'-fluoroadenosine-3'-phosphate
  modified_base 10: mod_base = OTHER; note = 2'-deoxy-2'-fluorocytidine-3'-phosphate
  modified_base 11: mod_base = OTHER; note = 2'-deoxy-2'-fluorocytidine-3'-phosphate
  modified_base 12: mod_base = OTHER; note = 2'-O-methylguanosine-3'-phosphate
  modified_base 13: mod_base = OTHER; note = 2'-O-methyladenosine-3'-phosphate
  modified_base 14: mod_base = OTHER; note = 2'-O-methyluridine-3'-phosphate
  modified_base 15: mod_base = OTHER; note = 2'-O-methyluridine-3'-phosphate
  modified_base 16: mod_base = OTHER; note = 2'-O-methylcytidine-3'-phosphate
  modified_base 17: mod_base = OTHER; note = 2'-O-methyluridine-3'-phosphate
  modified_base 18: mod_base = OTHER; note = 2'-O-methylguanosine-3'-phosphate
  modified_base 19: mod_base = OTHER; note = 2'-O-methyluridine-3'-phosphate
  modified_base 20: mod_base = OTHER; note = 2'-O-methyluridine-3'-phosphate
  modified_base 21: mod_base = OTHER; note = 2'-O-methyluridine-3'-phosphate ((2S,4R)-1-[29-[[2-(acetylamino)-2-deoxy-beta-D-galactopyra nosyl]oxy]-14,14-bis[[3-[[3-[[5-[[2-(acetylamino)-2-deoxy-b eta-D-galactopyranosyl]oxy]-1-oxopentyl]amino]propyl]amino] -3-oxopropoxy]methyl]-1,12,19,25-tetraoxo-16-oxa-13,20,24-t riazanonacos-1-yl]-4-hydroxy-2-pyrrolidinyl)methyl ester
tcatgcaaaccgattctgttt

SEQ ID NO: 368 - RNA, 21 nt, synthetic construct
  source 1..21: mol_type = other RNA
  modified_base 1: mod_base = OTHER; note = 2'-O-methyluridine-3'-phosphorothioate
  modified_base 2: mod_base = OTHER; note = 2'-O-methyladenosine-3'-phosphorothioate
  modified_base 3: mod_base = OTHER; note = 2'-O-methyluridine-3'-phosphate
  modified_base 4: mod_base = OTHER; note = 2'-O-methyluridine-3'-phosphate
  modified_base 5: mod_base = OTHER; note = 2'-O-methylguanosine-3'-phosphate
  modified_base 6: mod_base = OTHER; note = 2'-O-methylguanosine-3'-phosphate
  modified_base 7: mod_base = OTHER; note = 2'-deoxy-2'-fluoroguanosine-3'-phosphate
  modified_base 8: mod_base = OTHER; note = 2'-O-methyladenosine-3'-phosphate
  modified_base 9: mod_base = OTHER; note = 2'-deoxy-2'-fluoroadenosine-3'-phosphate
  modified_base 10: mod_base = OTHER; note = 2'-deoxy-2'-fluorouridine-3'-phosphate
  modified_base 11: mod_base = OTHER; note = 2'-deoxy-2'-fluoroguanosine-3'-phosphate
  modified_base 12: mod_base = OTHER; note = 2'-O-methyladenosine-3'-phosphate
  modified_base 13: mod_base = OTHER; note = 2'-O-methyladenosine-3'-phosphate
  modified_base 14: mod_base = OTHER; note = 2'-O-methyladenosine-3'-phosphate
  modified_base 15: mod_base = OTHER; note = 2'-O-methyluridine-3'-phosphate
  modified_base 16: mod_base = OTHER; note = 2'-O-methylcytidine-3'-phosphate
  modified_base 17: mod_base = OTHER; note = 2'-O-methyluridine-3'-phosphate
  modified_base 18: mod_base = OTHER; note = 2'-O-methylguanosine-3'-phosphate
  modified_base 19: mod_base = OTHER; note = 2'-O-methyluridine-3'-phosphate
  modified_base 20: mod_base = OTHER; note = 2'-O-methylcytidine-3'-phosphate
  modified_base 21: mod_base = OTHER; note = 2'-O-methyluridine-3'-phosphate ((2S,4R)-1-[29-[[2-(acetylamino)-2-deoxy-beta-D-galactopyra nosyl]oxy]-14,14-bis[[3-[[3-[[5-[[2-(acetylamino)-2-deoxy-b eta-D-galactopyranosyl]oxy]-1-oxopentyl]amino]propyl]amino] -3-oxopropoxy]methyl]-1,12,19,25-tetraoxo-16-oxa-13,20,24-t riazanonacos-1-yl]-4-hydroxy-2-pyrrolidinyl)methyl ester
tattgggaatgaaatctgtct

SEQ ID NO: 369 - RNA, 21 nt, synthetic construct
  source 1..21: mol_type = other RNA
  modified_base 1: mod_base = OTHER; note = 2'-O-methylcytidine-3'-phosphorothioate
  modified_base 2: mod_base = OTHER; note = 2'-O-methyladenosine-3'-phosphorothioate
  modified_base 3: mod_base = OTHER; note = 2'-O-methylcytidine-3'-phosphate
  modified_base 4: mod_base = OTHER; note = 2'-O-methylcytidine-3'-phosphate
  modified_base 5: mod_base = OTHER; note = 2'-O-methylguanosine-3'-phosphate
  modified_base 6: mod_base = OTHER; note = 2'-O-methyladenosine-3'-phosphate
  modified_base 7: mod_base = OTHER; note = 2'-deoxy-2'-fluorocytidine-3'-phosphate
  modified_base 8: mod_base = OTHER; note = 2'-O-methyluridine-3'-phosphate
  modified_base 9: mod_base = OTHER; note = 2'-deoxy-2'-fluoroguanosine-3'-phosphate
  modified_base 10: mod_base = OTHER; note = 2'-deoxy-2'-fluorocytidine-3'-phosphate
  modified_base 11: mod_base = OTHER; note = 2'-deoxy-2'-fluorouridine-3'-phosphate
  modified_base 12: mod_base = OTHER; note = 2'-O-methyluridine-3'-phosphate
  modified_base 13: mod_base = OTHER; note = 2'-O-methylguanosine-3'-phosphate
  modified_base 14: mod_base = OTHER; note = 2'-O-methyladenosine-3'-phosphate
  modified_base 15: mod_base = OTHER; note = 2'-O-methylcytidine-3'-phosphate
  modified_base 16: mod_base = OTHER; note = 2'-O-methyluridine-3'-phosphate
  modified_base 17: mod_base = OTHER; note = 2'-O-methyluridine-3'-phosphate
  modified_base 18: mod_base = OTHER; note = 2'-O-methylguanosine-3'-phosphate
  modified_base 19: mod_base = OTHER; note = 2'-O-methyladenosine-3'-phosphate
  modified_base 20: mod_base = OTHER; note = 2'-O-methylguanosine-3'-phosphate
  modified_base 21: mod_base = OTHER; note = 2'-O-methyluridine-3'-phosphate ((2S,4R)-1-[29-[[2-(acetylamino)-2-deoxy-beta-D-galactopyra nosyl]oxy]-14,14-bis[[3-[[3-[[5-[[2-(acetylamino)-2-deoxy-b eta-D-galactopyranosyl]oxy]-1-oxopentyl]amino]propyl]amino] -3-oxopropoxy]methyl]-1,12,19,25-tetraoxo-16-oxa-13,20,24-t riazanonacos-1-yl]-4-hydroxy-2-pyrrolidinyl)methyl ester
caccgactgcttgacttgagt

SEQ ID NO: 370 - RNA, 21 nt, synthetic construct
  source 1..21: mol_type = other RNA
  modified_base 1: mod_base = OTHER; note = 2'-O-methylcytidine-3'-phosphorothioate
  modified_base 2: mod_base = OTHER; note = 2'-O-methyluridine-3'-phosphorothioate
  modified_base 3: mod_base = OTHER; note = 2'-O-methylguanosine-3'-phosphate
  modified_base 4: mod_base = OTHER; note = 2'-O-methyluridine-3'-phosphate
  modified_base 5: mod_base = OTHER; note = 2'-O-methyladenosine-3'-phosphate
  modified_base 6: mod_base = OTHER; note = 2'-O-methyluridine-3'-phosphate
  modified_base 7: mod_base = OTHER; note = 2'-deoxy-2'-fluoroadenosine-3'-phosphate
  modified_base 8: mod_base = OTHER; note = 2'-O-methyluridine-3'-phosphate
  modified_base 9: mod_base = OTHER; note = 2'-deoxy-2'-fluoroguanosine-3'-phosphate
  modified_base 10: mod_base = OTHER; note = 2'-deoxy-2'-fluoroadenosine-3'-phosphate
  modified_base 11: mod_base = OTHER; note = 2'-deoxy-2'-fluorouridine-3'-phosphate
  modified_base 12: mod_base = OTHER; note = 2'-O-methylguanosine-3'-phosphate
  modified_base 13: mod_base = OTHER; note = 2'-O-methylguanosine-3'-phosphate
  modified_base 14: mod_base = OTHER; note = 2'-O-methyladenosine-3'-phosphate
  modified_base 15: mod_base = OTHER; note = 2'-O-methylguanosine-3'-phosphate
  modified_base 16: mod_base = OTHER; note = 2'-O-methyluridine-3'-phosphate
  modified_base 17: mod_base = OTHER; note = 2'-O-methylguanosine-3'-phosphate
  modified_base 18: mod_base = OTHER; note = 2'-O-methyladenosine-3'-phosphate
  modified_base 19: mod_base = OTHER; note = 2'-O-methyladenosine-3'-phosphate
  modified_base 20: mod_base = OTHER; note = 2'-O-methylcytidine-3'-phosphate
  modified_base 21: mod_base = OTHER; note = 2'-O-methyluridine-3'-phosphate ((2S,4R)-1-[29-[[2-(acetylamino)-2-deoxy-beta-D-galactopyra nosyl]oxy]-14,14-bis[[3-[[3-[[5-[[2-(acetylamino)-2-deoxy-b eta-D-galactopyranosyl]oxy]-1-oxopentyl]amino]propyl]amino] -3-oxopropoxy]methyl]-1,12,19,25-tetraoxo-16-oxa-13,20,24-t riazanonacos-1-yl]-4-hydroxy-2-pyrrolidinyl)methyl ester
ctgtatatgatggagtgaact

SEQ ID NO: 371 - RNA, 21 nt, synthetic construct
  source 1..21: mol_type = other RNA
  modified_base 1: mod_base = OTHER; note = 2'-O-methylguanosine-3'-phosphorothioate
  modified_base 2: mod_base = OTHER; note = 2'-O-methyladenosine-3'-phosphorothioate
  modified_base 3: mod_base = OTHER; note = 2'-O-methyluridine-3'-phosphate
  modified_base 4: mod_base = OTHER; note = 2'-O-methylguanosine-3'-phosphate
  modified_base 5: mod_base = OTHER; note = 2'-O-methyluridine-3'-phosphate
  modified_base 6: mod_base = OTHER; note = 2'-O-methylguanosine-3'-phosphate
  modified_base 7: mod_base = OTHER; note = 2'-deoxy-2'-fluorouridine-3'-phosphate
  modified_base 8: mod_base = OTHER; note = 2'-O-methyladenosine-3'-phosphate
  modified_base 9: mod_base = OTHER; note = 2'-deoxy-2'-fluoroadenosine-3'-phosphate
  modified_base 10: mod_base = OTHER; note = 2'-deoxy-2'-fluorocytidine-3'-phosphate
  modified_base 11: mod_base = OTHER; note = 2'-deoxy-2'-fluoroadenosine-3'-phosphate
  modified_base 12: mod_base = OTHER; note = 2'-O-methylcytidine-3'-phosphate
  modified_base 13: mod_base = OTHER; note = 2'-O-methyladenosine-3'-phosphate
  modified_base 14: mod_base = OTHER; note = 2'-O-methyladenosine-3'-phosphate
  modified_base 15: mod_base = OTHER; note = 2'-O-methylguanosine-3'-phosphate
  modified_base 16: mod_base = OTHER; note = 2'-O-methyladenosine-3'-phosphate
  modified_base 17: mod_base = OTHER; note = 2'-O-methylcytidine-3'-phosphate
  modified_base 18: mod_base = OTHER; note = 2'-O-methylcytidine-3'-phosphate
  modified_base 19: mod_base = OTHER; note = 2'-O-methyladenosine-3'-phosphate
  modified_base 20: mod_base = OTHER; note = 2'-O-methyladenosine-3'-phosphate
  modified_base 21: mod_base = OTHER; note = 2'-O-methyluridine-3'-phosphate ((2S,4R)-1-[29-[[2-(acetylamino)-2-deoxy-beta-D-galactopyra nosyl]oxy]-14,14-bis[[3-[[3-[[5-[[2-(acetylamino)-2-deoxy-b eta-D-galactopyranosyl]oxy]-1-oxopentyl]amino]propyl]amino] -3-oxopropoxy]methyl]-1,12,19,25-tetraoxo-16-oxa-13,20,24-t riazanonacos-1-yl]-4-hydroxy-2-pyrrolidinyl)methyl ester
gatgtgtaacacaagaccaat

SEQ ID NO: 372 - RNA, 21 nt, synthetic construct
  source 1..21: mol_type = other RNA
  modified_base 1: mod_base = OTHER; note = 2'-O-methyladenosine-3'-phosphorothioate
  modified_base 2: mod_base = OTHER; note = 2'-O-methylcytidine-3'-phosphorothioate
  modified_base 3: mod_base = OTHER; note = 2'-O-methyluridine-3'-phosphate
  modified_base 4: mod_base = OTHER; note = 2'-O-methylguanosine-3'-phosphate
  modified_base 5: mod_base = OTHER; note = 2'-O-methyladenosine-3'-phosphate
  modified_base 6: mod_base = OTHER; note = 2'-O-methylguanosine-3'-phosphate
  modified_base 7: mod_base = OTHER; note = 2'-deoxy-2'-fluoroadenosine-3'-phosphate
  modified_base 8: mod_base = OTHER; note = 2'-O-methylguanosine-3'-phosphate
  modified_base 9: mod_base = OTHER; note = 2'-deoxy-2'-fluorouridine-3'-phosphate
  modified_base 10: mod_base = OTHER; note = 2'-deoxy-2'-fluorocytidine-3'-phosphate
  modified_base 11: mod_base = OTHER; note = 2'-deoxy-2'-fluorouridine-3'-phosphate
  modified_base 12: mod_base = OTHER; note = 2'-O-methylguanosine-3'-phosphate
  modified_base 13: mod_base = OTHER; note = 2'-O-methyladenosine-3'-phosphate
  modified_base 14: mod_base = OTHER; note = 2'-O-methyladenosine-3'-phosphate
  modified_base 15: mod_base = OTHER; note = 2'-O-methyluridine-3'-phosphate
  modified_base 16: mod_base = OTHER; note = 2'-O-methylguanosine-3'-phosphate
  modified_base 17: mod_base = OTHER; note = 2'-O-methyluridine-3'-phosphate
  modified_base 18: mod_base = OTHER; note = 2'-O-methyluridine-3'-phosphate
  modified_base 19: mod_base = OTHER; note = 2'-O-methyladenosine-3'-phosphate
  modified_base 20: mod_base = OTHER; note = 2'-O-methyluridine-3'-phosphate
  modified_base 21: mod_base = OTHER; note = 2'-O-methyluridine-3'-phosphate ((2S,4R)-1-[29-[[2-(acetylamino)-2-deoxy-beta-D-galactopyra nosyl]oxy]-14,14-bis[[3-[[3-[[5-[[2-(acetylamino)-2-deoxy-b eta-D-galactopyranosyl]oxy]-1-oxopentyl]amino]propyl]amino] -3-oxopropoxy]methyl]-1,12,19,25-tetraoxo-16-oxa-13,20,24-t riazanonacos-1-yl]-4-hydroxy-2-pyrrolidinyl)methyl ester
actgagagtctgaatgttatt

SEQ ID NO: 373 - RNA, 21 nt, synthetic construct
  source 1..21: mol_type = other RNA
  modified_base 1: mod_base = OTHER; note = 2'-O-methylcytidine-3'-phosphorothioate
  modified_base 2: mod_base = OTHER; note = 2'-O-methyladenosine-3'-phosphorothioate
  modified_base 3: mod_base = OTHER; note = 2'-O-methylcytidine-3'-phosphate
  modified_base 4: mod_base = OTHER; note = 2'-O-methyladenosine-3'-phosphate
  modified_base 5: mod_base = OTHER; note = 2'-O-methylcytidine-3'-phosphate
  modified_base 6: mod_base = OTHER; note = 2'-O-methylguanosine-3'-phosphate
  modified_base 7: mod_base = OTHER; note = 2'-deoxy-2'-fluorouridine-3'-phosphate
  modified_base 8: mod_base = OTHER; note = 2'-O-methylguanosine-3'-phosphate
  modified_base 9: mod_base = OTHER; note = 2'-deoxy-2'-fluoroadenosine-3'-phosphate
  modified_base 10: mod_base = OTHER; note = 2'-deoxy-2'-fluoroguanosine-3'-phosphate
  modified_base 11: mod_base = OTHER; note = 2'-deoxy-2'-fluorouridine-3'-phosphate
  modified_base 12: mod_base = OTHER; note = 2'-O-methylcytidine-3'-phosphate
  modified_base 13: mod_base = OTHER; note = 2'-O-methyluridine-3'-phosphate
  modified_base 14: mod_base = OTHER; note = 2'-O-methyladenosine-3'-phosphate
  modified_base 15: mod_base = OTHER; note = 2'-O-methylguanosine-3'-phosphate
  modified_base 16: mod_base = OTHER; note = 2'-O-methylguanosine-3'-phosphate
  modified_base 17: mod_base = OTHER; note = 2'-O-methyladenosine-3'-phosphate
  modified_base 18: mod_base = OTHER; note = 2'-O-methyluridine-3'-phosphate
  modified_base 19: mod_base = OTHER; note = 2'-O-methyluridine-3'-phosphate
  modified_base 20: mod_base = OTHER; note = 2'-O-methylguanosine-3'-phosphate
  modified_base 21: mod_base = OTHER; note = 2'-O-methyluridine-3'-phosphate ((2S,4R)-1-[29-[[2-(acetylamino)-2-deoxy-beta-D-galactopyra nosyl]oxy]-14,14-bis[[3-[[3-[[5-[[2-(acetylamino)-2-deoxy-b eta-D-galactopyranosyl]oxy]-1-oxopentyl]amino]propyl]amino] -3-oxopropoxy]methyl]-1,12,19,25-tetraoxo-16-oxa-13,20,24-t riazanonacos-1-yl]-4-hydroxy-2-pyrrolidinyl)methyl ester
cacacgtgagtctaggattgt

SEQ ID NO: 374 - RNA, 21 nt, synthetic construct
  source 1..21: mol_type = other RNA
  modified_base 1: mod_base = OTHER; note = 2'-O-methyladenosine-3'-phosphorothioate
  modified_base 2: mod_base = OTHER; note = 2'-O-methyladenosine-3'-phosphorothioate
  modified_base 3: mod_base = OTHER; note = 2'-O-methylguanosine-3'-phosphate
  modified_base 4: mod_base = OTHER; note = 2'-O-methyladenosine-3'-phosphate
  modified_base 5: mod_base = OTHER; note = 2'-O-methylguanosine-3'-phosphate
  modified_base 6: mod_base = OTHER; note = 2'-O-methylcytidine-3'-phosphate
  modified_base 7: mod_base = OTHER; note = 2'-deoxy-2'-fluoroadenosine-3'-phosphate
  modified_base 8: mod_base = OTHER; note = 2'-O-methyluridine-3'-phosphate
  modified_base 9: mod_base = OTHER; note = 2'-deoxy-2'-fluoroguanosine-3'-phosphate
  modified_base 10: mod_base = OTHER; note = 2'-deoxy-2'-fluorouridine-3'-phosphate
  modified_base 11: mod_base = OTHER; note = 2'-deoxy-2'-fluoroadenosine-3'-phosphate
  modified_base 12: mod_base = OTHER; note = 2'-O-methyladenosine-3'-phosphate
  modified_base 13: mod_base = OTHER; note = 2'-O-methyladenosine-3'-phosphate
  modified_base 14: mod_base = OTHER; note = 2'-O-methyluridine-3'-phosphate
  modified_base 15: mod_base = OTHER; note = 2'-O-methylguanosine-3'-phosphate
  modified_base 16: mod_base = OTHER; note = 2'-O-methyladenosine-3'-phosphate
  modified_base 17: mod_base = OTHER; note = 2'-O-methyladenosine-3'-phosphate
  modified_base 18: mod_base = OTHER; note = 2'-O-methylcytidine-3'-phosphate
  modified_base 19: mod_base = OTHER; note = 2'-O-methyladenosine-3'-phosphate
  modified_base 20: mod_base = OTHER; note = 2'-O-methyladenosine-3'-phosphate
  modified_base 21: mod_base = OTHER; note = 2'-O-methyluridine-3'-phosphate ((2S,4R)-1-[29-[[2-(acetylamino)-2-deoxy-beta-D-galactopyra nosyl]oxy]-14,14-bis[[3-[[3-[[5-[[2-(acetylamino)-2-deoxy-b eta-D-galactopyranosyl]oxy]-1-oxopentyl]amino]propyl]amino] -3-oxopropoxy]methyl]-1,12,19,25-tetraoxo-16-oxa-13,20,24-t riazanonacos-1-yl]-4-hydroxy-2-pyrrolidinyl)methyl ester
aagagcatgtaaatgaacaat

SEQ ID NO: 375 - RNA, 21 nt, synthetic construct
  source 1..21: mol_type = other RNA
  modified_base 1: mod_base = OTHER; note = 2'-O-methyladenosine-3'-phosphorothioate
  modified_base 2: mod_base = OTHER; note = 2'-O-methyladenosine-3'-phosphorothioate
  modified_base 3: mod_base = OTHER; note = 2'-O-methylcytidine-3'-phosphate
  modified_base 4: mod_base = OTHER; note = 2'-O-methyladenosine-3'-phosphate
  modified_base 5: mod_base = OTHER; note = 2'-O-methyladenosine-3'-phosphate
  modified_base 6: mod_base = OTHER; note = 2'-O-methylcytidine-3'-phosphate
  modified_base 7: mod_base = OTHER; note = 2'-deoxy-2'-fluoroadenosine-3'-phosphate
  modified_base 8: mod_base = OTHER; note = 2'-O-methyladenosine-3'-phosphate
  modified_base 9: mod_base = OTHER; note = 2'-deoxy-2'-fluoroguanosine-3'-phosphate
  modified_base 10: mod_base = OTHER; note = 2'-deoxy-2'-fluorocytidine-3'-phosphate
  modified_base 11: mod_base = OTHER; note = 2'-deoxy-2'-fluoroadenosine-3'-phosphate
  modified_base 12: mod_base = OTHER; note = 2'-O-methyladenosine-3'-phosphate
  modified_base 13: mod_base = OTHER; note = 2'-O-methyladenosine-3'-phosphate
  modified_base 14: mod_base = OTHER; note = 2'-O-methyluridine-3'-phosphate
  modified_base 15: mod_base = OTHER; note = 2'-O-methyladenosine-3'-phosphate
  modified_base 16: mod_base = OTHER; note = 2'-O-methyluridine-3'-phosphate
  modified_base 17: mod_base = OTHER; note = 2'-O-methyluridine-3'-phosphate
  modified_base 18: mod_base = OTHER; note = 2'-O-methylguanosine-3'-phosphate
  modified_base 19: mod_base = OTHER; note = 2'-O-methyladenosine-3'-phosphate
  modified_base 20: mod_base = OTHER; note = 2'-O-methyladenosine-3'-phosphate
  modified_base 21: mod_base = OTHER; note = 2'-O-methyluridine-3'-phosphate ((2S,4R)-1-[29-[[2-(acetylamino)-2-deoxy-beta-D-galactopyra nosyl]oxy]-14,14-bis[[3-[[3-[[5-[[2-(acetylamino)-2-deoxy-b eta-D-galactopyranosyl]oxy]-1-oxopentyl]amino]propyl]amino] -3-oxopropoxy]methyl]-1,12,19,25-tetraoxo-16-oxa-13,20,24-t riazanonacos-1-yl]-4-hydroxy-2-pyrrolidinyl)methyl ester
aacaacaagcaaatattgaat

SEQ ID NO: 376 - RNA, 21 nt, synthetic construct
  source 1..21: mol_type = other RNA
  modified_base 1: mod_base = OTHER; note = 2'-O-methylcytidine-3'-phosphorothioate
  modified_base 2: mod_base = OTHER; note = 2'-O-methylcytidine-3'-phosphorothioate
  modified_base 3: mod_base = OTHER; note = 2'-O-methyladenosine-3'-phosphate
  modified_base 4: mod_base = OTHER; note = 2'-O-methylcytidine-3'-phosphate
  modified_base 5: mod_base = OTHER; note = 2'-O-methyluridine-3'-phosphate
  modified_base 6: mod_base = OTHER; note = 2'-O-methyluridine-3'-phosphate
  modified_base 7: mod_base = OTHER; note = 2'-deoxy-2'-fluoroadenosine-3'-phosphate
  modified_base 8: mod_base = OTHER; note = 2'-O-methyluridine-3'-phosphate
  modified_base 9: mod_base = OTHER; note = 2'-deoxy-2'-fluorouridine-3'-phosphate
  modified_base 10: mod_base = OTHER; note = 2'-deoxy-2'-fluorouridine-3'-phosphate
  modified_base 11: mod_base = OTHER; note = 2'-deoxy-2'-fluorocytidine-3'-phosphate
  modified_base 12: mod_base = OTHER; note = 2'-O-methylcytidine-3'-phosphate
  modified_base 13: mod_base = OTHER; note = 2'-O-methylcytidine-3'-phosphate
  modified_base 14: mod_base = OTHER; note = 2'-O-methyladenosine-3'-phosphate
  modified_base 15: mod_base = OTHER; note = 2'-O-methyluridine-3'-phosphate
  modified_base 16: mod_base = OTHER; note = 2'-O-methyluridine-3'-phosphate
  modified_base 17: mod_base = OTHER; note = 2'-O-methylguanosine-3'-phosphate
  modified_base 18: mod_base = OTHER; note = 2'-O-methylcytidine-3'-phosphate
  modified_base 19: mod_base = OTHER; note = 2'-O-methyluridine-3'-phosphate
  modified_base 20: mod_base = OTHER; note = 2'-O-methyladenosine-3'-phosphate
  modified_base 21: mod_base = OTHER; note = 2'-O-methyluridine-3'-phosphate ((2S,4R)-1-[29-[[2-(acetylamino)-2-deoxy-beta-D-galactopyra nosyl]oxy]-14,14-bis[[3-[[3-[[5-[[2-(acetylamino)-2-deoxy-b eta-D-galactopyranosyl]oxy]-1-oxopentyl]amino]propyl]amino] -3-oxopropoxy]methyl]-1,12,19,25-tetraoxo-16-oxa-13,20,24-t riazanonacos-1-yl]-4-hydroxy-2-pyrrolidinyl)methyl ester
ccacttatttcccattgctat

SEQ ID NO: 377 - RNA, 21 nt, synthetic construct
  source 1..21: mol_type = other RNA
  modified_base 1: mod_base = OTHER; note = 2'-O-methylguanosine-3'-phosphorothioate
  modified_base 2: mod_base = OTHER; note = 2'-O-methylcytidine-3'-phosphorothioate
  modified_base 3: mod_base = OTHER; note = 2'-O-methylcytidine-3'-phosphate
  modified_base 4: mod_base = OTHER; note = 2'-O-methylcytidine-3'-phosphate
  modified_base 5: mod_base = OTHER; note = 2'-O-methylguanosine-3'-phosphate
  modified_base 6: mod_base = OTHER; note = 2'-O-methylguanosine-3'-phosphate
  modified_base 7: mod_base = OTHER; note = 2'-deoxy-2'-fluorouridine-3'-phosphate
  modified_base 8: mod_base = OTHER; note = 2'-O-methyluridine-3'-phosphate
  modified_base 9: mod_base = OTHER; note = 2'-deoxy-2'-fluorouridine-3'-phosphate
  modified_base 10: mod_base = OTHER; note = 2'-deoxy-2'-fluorouridine-3'-phosphate
  modified_base 11: mod_base = OTHER; note = 2'-deoxy-2'-fluoroguanosine-3'-phosphate
  modified_base 12: mod_base = OTHER; note = 2'-O-methyladenosine-3'-phosphate
  modified_base 13: mod_base = OTHER; note = 2'-O-methyladenosine-3'-phosphate
  modified_base 14: mod_base = OTHER; note = 2'-O-methyladenosine-3'-phosphate
  modified_base 15: mod_base = OTHER; note = 2'-O-methylcytidine-3'-phosphate
  modified_base 16: mod_base = OTHER; note = 2'-O-methyladenosine-3'-phosphate
  modified_base 17: mod_base = OTHER; note = 2'-O-methylguanosine-3'-phosphate
  modified_base 18: mod_base = OTHER; note = 2'-O-methyluridine-3'-phosphate
  modified_base 19: mod_base = OTHER; note = 2'-O-methylcytidine-3'-phosphate
  modified_base 20: mod_base = OTHER; note = 2'-O-methyluridine-3'-phosphate
  modified_base 21: mod_base = OTHER; note = 2'-O-methyluridine-3'-phosphate ((2S,4R)-1-[29-[[2-(acetylamino)-2-deoxy-beta-D-galactopyra nosyl]oxy]-14,14-bis[[3-[[3-[[5-[[2-(acetylamino)-2-deoxy-b eta-D-galactopyranosyl]oxy]-1-oxopentyl]amino]propyl]amino] -3-oxopropoxy]methyl]-1,12,19,25-tetraoxo-16-oxa-13,20,24-t riazanonacos-1-yl]-4-hydroxy-2-pyrrolidinyl)methyl ester
gcccggttttgaaacagtctt

SEQ ID NO: 378 - RNA, 21 nt, synthetic construct
  source 1..21: mol_type = other RNA
  modified_base 1: mod_base = OTHER; note = 2'-O-methyluridine-3'-phosphorothioate
  modified_base 2: mod_base = OTHER; note = 2'-O-methylcytidine-3'-phosphorothioate
  modified_base 3: mod_base = OTHER; note = 2'-O-methyladenosine-3'-phosphate
  modified_base 4: mod_base = OTHER; note = 2'-O-methylcytidine-3'-phosphate
  modified_base 5: mod_base = OTHER; note = 2'-O-methyladenosine-3'-phosphate
  modified_base 6: mod_base = OTHER; note = 2'-O-methylguanosine-3'-phosphate
  modified_base 7: mod_base = OTHER; note = 2'-deoxy-2'-fluoroguanosine-3'-phosphate
  modified_base 8: mod_base = OTHER; note = 2'-O-methyladenosine-3'-phosphate
  modified_base 9: mod_base = OTHER; note = 2'-deoxy-2'-fluoroguanosine-3'-phosphate
  modified_base 10: mod_base = OTHER; note = 2'-deoxy-2'-fluoroadenosine-3'-phosphate
  modified_base 11: mod_base = OTHER; note = 2'-deoxy-2'-fluoroadenosine-3'-phosphate
  modified_base 12: mod_base = OTHER; note = 2'-O-methyluridine-3'-phosphate
  modified_base 13: mod_base = OTHER; note = 2'-O-methylguanosine-3'-phosphate
  modified_base 14: mod_base = OTHER; note = 2'-O-methyladenosine-3'-phosphate
  modified_base 15: mod_base = OTHER; note = 2'-O-methylcytidine-3'-phosphate
  modified_base 16: mod_base = OTHER; note = 2'-O-methylcytidine-3'-phosphate
  modified_base 17: mod_base = OTHER; note = 2'-O-methyluridine-3'-phosphate
  modified_base 18: mod_base = OTHER; note = 2'-O-methylguanosine-3'-phosphate
  modified_base 19: mod_base = OTHER; note = 2'-O-methyluridine-3'-phosphate
  modified_base 20: mod_base = OTHER; note = 2'-O-methylguanosine-3'-phosphate
  modified_base 21: mod_base = OTHER; note = 2'-O-methyluridine-3'-phosphate ((2S,4R)-1-[29-[[2-(acetylamino)-2-deoxy-beta-D-galactopyra nosyl]oxy]-14,14-bis[[3-[[3-[[5-[[2-(acetylamino)-2-deoxy-b eta-D-galactopyranosyl]oxy]-1-oxopentyl]amino]propyl]amino] -3-oxopropoxy]methyl]-1,12,19,25-tetraoxo-16-oxa-13,20,24-t riazanonacos-1-yl]-4-hydroxy-2-pyrrolidinyl)methyl ester
tcacaggagaatgacctgtgt

SEQ ID NO: 379 - RNA, 21 nt, synthetic construct
  source 1..21: mol_type = other RNA
  modified_base 1: mod_base = OTHER; note = 2'-O-methylguanosine-3'-phosphorothioate
  modified_base 2: mod_base = OTHER; note = 2'-O-methylguanosine-3'-phosphorothioate
  modified_base 3: mod_base = OTHER; note = 2'-O-methyladenosine-3'-phosphate
  modified_base 4: mod_base = OTHER; note = 2'-O-methylguanosine-3'-phosphate
  modified_base 5: mod_base = OTHER; note = 2'-O-methyladenosine-3'-phosphate
  modified_base 6: mod_base = OTHER; note = 2'-O-methylguanosine-3'-phosphate
  modified_base 7: mod_base = OTHER; note = 2'-deoxy-2'-fluoroadenosine-3'-phosphate
  modified_base 8: mod_base = OTHER; note = 2'-O-methyluridine-3'-phosphate
  modified_base 9: mod_base = OTHER; note = 2'-deoxy-2'-fluoroadenosine-3'-phosphate
  modified_base 10: mod_base = OTHER; note = 2'-deoxy-2'-fluorocytidine-3'-phosphate
  modified_base 11: mod_base = OTHER; note = 2'-deoxy-2'-fluoroadenosine-3'-phosphate
  modified_base 12: mod_base = OTHER; note = 2'-O-methyluridine-3'-phosphate
  modified_base 13: mod_base = OTHER; note = 2'-O-methylguanosine-3'-phosphate
  modified_base 14: mod_base = OTHER; note = 2'-O-methyluridine-3'-phosphate
  modified_base 15: mod_base = OTHER; note = 2'-O-methyluridine-3'-phosphate
  modified_base 16: mod_base = OTHER; note = 2'-O-methyluridine-3'-phosphate
  modified_base 17: mod_base = OTHER; note = 2'-O-methyladenosine-3'-phosphate
  modified_base 18: mod_base = OTHER; note = 2'-O-methylguanosine-3'-phosphate
  modified_base 19: mod_base = OTHER; note = 2'-O-methyladenosine-3'-phosphate
  modified_base 20: mod_base = OTHER; note = 2'-O-methyladenosine-3'-phosphate
  modified_base 21: mod_base = OTHER; note = 2'-O-methyluridine-3'-phosphate ((2S,4R)-1-[29-[[2-(acetylamino)-2-deoxy-beta-D-galactopyra nosyl]oxy]-14,14-bis[[3-[[3-[[5-[[2-(acetylamino)-2-deoxy-b eta-D-galactopyranosyl]oxy]-1-oxopentyl]amino]propyl]amino] -3-oxopropoxy]methyl]-1,12,19,25-tetraoxo-16-oxa-13,20,24-t riazanonacos-1-yl]-4-hydroxy-2-pyrrolidinyl)methyl ester
ggagagatacatgtttagaat

SEQ ID NO: 380 - RNA, 21 nt, synthetic construct
  source 1..21: mol_type = other RNA
  modified_base 1: mod_base = OTHER; note = 2'-O-methylguanosine-3'-phosphorothioate
  modified_base 2: mod_base = OTHER; note = 2'-O-methyladenosine-3'-phosphorothioate
  modified_base 3: mod_base = OTHER; note = 2'-O-methyladenosine-3'-phosphate
  modified_base 4: mod_base = OTHER; note = 2'-O-methylguanosine-3'-phosphate
  modified_base 5: mod_base = OTHER; note = 2'-O-methyladenosine-3'-phosphate
  modified_base 6: mod_base = OTHER; note = 2'-O-methylguanosine-3'-phosphate
  modified_base 7: mod_base = OTHER; note = 2'-deoxy-2'-fluoroadenosine-3'-phosphate
  modified_base 8: mod_base = OTHER; note = 2'-O-methyladenosine-3'-phosphate
  modified_base 9: mod_base = OTHER; note = 2'-deoxy-2'-fluoroadenosine-3'-phosphate
  modified_base 10: mod_base = OTHER; note = 2'-deoxy-2'-fluoroguanosine-3'-phosphate
  modified_base 11: mod_base = OTHER; note = 2'-deoxy-2'-fluoroguanosine-3'-phosphate
  modified_base 12: mod_base = OTHER; note = 2'-O-methyladenosine-3'-phosphate
  modified_base 13: mod_base = OTHER; note = 2'-O-methylcytidine-3'-phosphate
  modified_base 14: mod_base = OTHER; note = 2'-O-methyladenosine-3'-phosphate
  modified_base 15: mod_base = OTHER; note = 2'-O-methyladenosine-3'-phosphate
  modified_base 16: mod_base = OTHER; note = 2'-O-methyladenosine-3'-phosphate
  modified_base 17: mod_base = OTHER; note = 2'-O-methylguanosine-3'-phosphate
  modified_base 18: mod_base = OTHER; note = 2'-O-methylguanosine-3'-phosphate
  modified_base 19: mod_base = OTHER; note = 2'-O-methylcytidine-3'-phosphate
  modified_base 20: mod_base = OTHER; note = 2'-O-methyladenosine-3'-phosphate
  modified_base 21: mod_base = OTHER; note = 2'-O-methyluridine-3'-phosphate ((2S,4R)-1-[29-[[2-(acetylamino)-2-deoxy-beta-D-galactopyra nosyl]oxy]-14,14-bis[[3-[[3-[[5-[[2-(acetylamino)-2-deoxy-b eta-D-galactopyranosyl]oxy]-1-oxopentyl]amino]propyl]amino] -3-oxopropoxy]methyl]-1,12,19,25-tetraoxo-16-oxa-13,20,24-t riazanonacos-1-yl]-4-hydroxy-2-pyrrolidinyl)methyl ester
gaagagaaaggacaaaggcat

SEQ ID NO: 381 - RNA, 21 nt, synthetic construct
  source 1..21: mol_type = other RNA
  modified_base 1: mod_base = OTHER; note = 2'-O-methylcytidine-3'-phosphorothioate
  modified_base 2: mod_base = OTHER; note = 2'-O-methyladenosine-3'-phosphorothioate
  modified_base 3: mod_base = OTHER; note = 2'-O-methylcytidine-3'-phosphate
  modified_base 4: mod_base = OTHER; note = 2'-O-methylguanosine-3'-phosphate
  modified_base 5: mod_base = OTHER; note = 2'-O-methyluridine-3'-phosphate
  modified_base 6: mod_base = OTHER; note = 2'-O-methyluridine-3'-phosphate
  modified_base 7: mod_base = OTHER; note = 2'-deoxy-2'-fluorouridine-3'-phosphate
  modified_base 8: mod_base = OTHER; note = 2'-O-methyluridine-3'-phosphate
  modified_base 9: mod_base = OTHER; note = 2'-deoxy-2'-fluoroadenosine-3'-phosphate
  modified_base 10: mod_base = OTHER; note = 2'-deoxy-2'-fluorocytidine-3'-phosphate
  modified_base 11: mod_base = OTHER; note = 2'-deoxy-2'-fluorocytidine-3'-phosphate
  modified_base 12: mod_base = OTHER; note = 2'-O-methyladenosine-3'-phosphate
  modified_base 13: mod_base = OTHER; note = 2'-O-methyluridine-3'-phosphate
  modified_base 14: mod_base = OTHER; note = 2'-O-methyluridine-3'-phosphate
  modified_base 15: mod_base = OTHER; note = 2'-O-methyluridine-3'-phosphate
  modified_base 16: mod_base = OTHER; note = 2'-O-methyladenosine-3'-phosphate
  modified_base 17: mod_base = OTHER; note = 2'-O-methyladenosine-3'-phosphate
  modified_base 18: mod_base = OTHER; note = 2'-O-methyladenosine-3'-phosphate
  modified_base 19: mod_base = OTHER; note = 2'-O-methyladenosine-3'-phosphate
  modified_base 20: mod_base = OTHER; note = 2'-O-methyluridine-3'-phosphate
  modified_base 21: mod_base = OTHER; note = 2'-O-methyluridine-3'-phosphate ((2S,4R)-1-[29-[[2-(acetylamino)-2-deoxy-beta-D-galactopyra nosyl]oxy]-14,14-bis[[3-[[3-[[5-[[2-(acetylamino)-2-deoxy-b eta-D-galactopyranosyl]oxy]-1-oxopentyl]amino]propyl]amino] -3-oxopropoxy]methyl]-1,12,19,25-tetraoxo-16-oxa-13,20,24-t riazanonacos-1-yl]-4-hydroxy-2-pyrrolidinyl)methyl ester
cacgttttaccatttaaaatt

SEQ ID NO: 382 - RNA, 21 nt, synthetic construct
  source 1..21: mol_type = other RNA
  modified_base 1: mod_base = OTHER; note = 2'-O-methylcytidine-3'-phosphorothioate
  modified_base 2: mod_base = OTHER; note = 2'-O-methyladenosine-3'-phosphorothioate
  modified_base 3: mod_base = OTHER; note = 2'-O-methyladenosine-3'-phosphate
  modified_base 4: mod_base = OTHER; note = 2'-O-methyluridine-3'-phosphate
  modified_base 5: mod_base = OTHER; note = 2'-O-methylguanosine-3'-phosphate
  modified_base 6: mod_base = OTHER; note = 2'-O-methylcytidine-3'-phosphate
  modified_base 7: mod_base = OTHER; note = 2'-deoxy-2'-fluoroadenosine-3'-phosphate
  modified_base 8: mod_base = OTHER; note = 2'-O-methyladenosine-3'-phosphate
  modified_base 9: mod_base = OTHER; note = 2'-deoxy-2'-fluorocytidine-3'-phosphate
  modified_base 10: mod_base = OTHER; note = 2'-deoxy-2'-fluoroadenosine-3'-phosphate
  modified_base 11: mod_base = OTHER; note = 2'-deoxy-2'-fluoroguanosine-3'-phosphate
  modified_base 12: mod_base = OTHER; note = 2'-O-methyluridine-3'-phosphate
  modified_base 13: mod_base = OTHER; note = 2'-O-methylcytidine-3'-phosphate
  modified_base 14: mod_base = OTHER; note = 2'-O-methyladenosine-3'-phosphate
  modified_base 15: mod_base = OTHER; note = 2'-O-methyluridine-3'-phosphate
  modified_base 16: mod_base = OTHER; note = 2'-O-methylcytidine-3'-phosphate
  modified_base 17: mod_base = OTHER; note = 2'-O-methyluridine-3'-phosphate
  modified_base 18: mod_base = OTHER; note = 2'-O-methyluridine-3'-phosphate
  modified_base 19: mod_base = OTHER; note = 2'-O-methyladenosine-3'-phosphate
  modified_base 20: mod_base = OTHER; note = 2'-O-methylcytidine-3'-phosphate
  modified_base 21: mod_base = OTHER; note = 2'-O-methyluridine-3'-phosphate ((2S,4R)-1-[29-[[2-(acetylamino)-2-deoxy-beta-D-galactopyra nosyl]oxy]-14,14-bis[[3-[[3-[[5-[[2-(acetylamino)-2-deoxy-b eta-D-galactopyranosyl]oxy]-1-oxopentyl]amino]propyl]amino] -3-oxopropoxy]methyl]-1,12,19,25-tetraoxo-16-oxa-13,20,24-t riazanonacos-1-yl]-4-hydroxy-2-pyrrolidinyl)methyl ester
caatgcaacagtcatcttact

SEQ ID NO: 383 - RNA, 21 nt, synthetic construct
  source 1..21: mol_type = other RNA
  modified_base 1: mod_base = OTHER; note = 2'-O-methyluridine-3'-phosphorothioate
  modified_base 2: mod_base = OTHER; note = 2'-O-methyluridine-3'-phosphorothioate
  modified_base 3: mod_base = OTHER; note = 2'-O-methyladenosine-3'-phosphate
  modified_base 4: mod_base = OTHER; note = 2'-O-methylcytidine-3'-phosphate
  modified_base 5: mod_base = OTHER; note = 2'-O-methyladenosine-3'-phosphate
  modified_base 6: mod_base = OTHER; note = 2'-O-methylguanosine-3'-phosphate
  modified_base 7: mod_base = OTHER; note = 2'-deoxy-2'-fluorocytidine-3'-phosphate
  modified_base 8: mod_base = OTHER; note = 2'-O-methyladenosine-3'-phosphate
  modified_base 9: mod_base = OTHER; note = 2'-deoxy-2'-fluoroguanosine-3'-phosphate
  modified_base 10: mod_base = OTHER; note = 2'-deoxy-2'-fluoroadenosine-3'-phosphate
  modified_base 11: mod_base = OTHER; note = 2'-deoxy-2'-fluoroguanosine-3'-phosphate
  modified_base 12: mod_base = OTHER; note = 2'-O-methyladenosine-3'-phosphate
  modified_base 13: mod_base = OTHER; note = 2'-O-methyladenosine-3'-phosphate
  modified_base 14: mod_base = OTHER; note = 2'-O-methyladenosine-3'-phosphate
  modified_base 15: mod_base = OTHER; note = 2'-O-methyluridine-3'-phosphate
  modified_base 16: mod_base = OTHER; note = 2'-O-methylguanosine-3'-phosphate
  modified_base 17: mod_base = OTHER; note = 2'-O-methylcytidine-3'-phosphate
  modified_base 18: mod_base = OTHER; note = 2'-O-methyladenosine-3'-phosphate
  modified_base 19: mod_base = OTHER; note = 2'-O-methylguanosine-3'-phosphate
  modified_base 20: mod_base = OTHER; note = 2'-O-methyladenosine-3'-phosphate
  modified_base 21: mod_base = OTHER; note = 2'-O-methyluridine-3'-phosphate ((2S,4R)-1-[29-[[2-(acetylamino)-2-deoxy-beta-D-galactopyra nosyl]oxy]-14,14-bis[[3-[[3-[[5-[[2-(acetylamino)-2-deoxy-b eta-D-galactopyranosyl]oxy]-1-oxopentyl]amino]propyl]amino] -3-oxopropoxy]methyl]-1,12,19,25-tetraoxo-16-oxa-13,20,24-t riazanonacos-1-yl]-4-hydroxy-2-pyrrolidinyl)methyl ester
ttacagcagagaaatgcagat

SEQ ID NO: 384 - RNA, 21 nt, synthetic construct
  source 1..21: mol_type = other RNA
  modified_base 1: mod_base = OTHER; note = 2'-O-methylguanosine-3'-phosphorothioate
  modified_base 2: mod_base = OTHER; note = 2'-O-methylcytidine-3'-phosphorothioate
  modified_base 3: mod_base = OTHER; note = 2'-O-methyladenosine-3'-phosphate
  modified_base 4: mod_base = OTHER; note = 2'-O-methylguanosine-3'-phosphate
  modified_base 5: mod_base = OTHER; note = 2'-O-methyladenosine-3'-phosphate
  modified_base 6: mod_base = OTHER; note = 2'-O-methylguanosine-3'-phosphate
  modified_base 7: mod_base = OTHER; note = 2'-deoxy-2'-fluoroadenosine-3'-phosphate
  modified_base 8: mod_base = OTHER; note = 2'-O-methyladenosine-3'-phosphate
  modified_base 9: mod_base = OTHER; note = 2'-deoxy-2'-fluoroadenosine-3'-phosphate
  modified_base 10: mod_base = OTHER; note = 2'-deoxy-2'-fluoroadenosine-3'-phosphate
  modified_base 11: mod_base = OTHER; note = 2'-deoxy-2'-fluoroguanosine-3'-phosphate
  modified_base 12: mod_base = OTHER; note = 2'-O-methylcytidine-3'-phosphate
  modified_base 13: mod_base = OTHER; note = 2'-O-methyladenosine-3'-phosphate
  modified_base 14: mod_base = OTHER; note = 2'-O-methyladenosine-3'-phosphate
  modified_base 15: mod_base = OTHER; note = 2'-O-methyladenosine-3'-phosphate
  modified_base 16: mod_base = OTHER; note = 2'-O-methyladenosine-3'-phosphate
  modified_base 17: mod_base = OTHER; note = 2'-O-methylcytidine-3'-phosphate
  modified_base 18: mod_base = OTHER; note = 2'-O-methyluridine-3'-phosphate
  modified_base 19: mod_base = OTHER; note = 2'-O-methylguanosine-3'-phosphate
  modified_base 20: mod_base = OTHER; note = 2'-O-methylcytidine-3'-phosphate
  modified_base 21: mod_base = OTHER; note = 2'-O-methyluridine-3'-phosphate ((2S,4R)-1-[29-[[2-(acetylamino)-2-deoxy-beta-D-galactopyra nosyl]oxy]-14,14-bis[[3-[[3-[[5-[[2-(acetylamino)-2-deoxy-b eta-D-galactopyranosyl]oxy]-1-oxopentyl]amino]propyl]amino] -3-oxopropoxy]methyl]-1,12,19,25-tetraoxo-16-oxa-13,20,24-t riazanonacos-1-yl]-4-hydroxy-2-pyrrolidinyl)methyl ester
gcagagaaaagcaaaactgct

SEQ ID NO: 385 - RNA, 21 nt, synthetic construct
  source 1..21: mol_type = other RNA
  modified_base 1: mod_base = OTHER; note = 2'-O-methyladenosine-3'-phosphorothioate
  modified_base 2: mod_base = OTHER; note = 2'-O-methylcytidine-3'-phosphorothioate
  modified_base 3: mod_base = OTHER; note = 2'-O-methyluridine-3'-phosphate
  modified_base 4: mod_base = OTHER; note = 2'-O-methylguanosine-3'-phosphate
  modified_base 5: mod_base = OTHER; note = 2'-O-methyluridine-3'-phosphate
  modified_base 6: mod_base = OTHER; note = 2'-O-methylguanosine-3'-phosphate
  modified_base 7: mod_base = OTHER; note = 2'-deoxy-2'-fluoroadenosine-3'-phosphate
  modified_base 8: mod_base = OTHER; note = 2'-O-methyladenosine-3'-phosphate
  modified_base 9: mod_base = OTHER; note = 2'-deoxy-2'-fluorouridine-3'-phosphate
  modified_base 10: mod_base = OTHER; note = 2'-deoxy-2'-fluoroadenosine-3'-phosphate
  modified_base 11: mod_base = OTHER; note = 2'-deoxy-2'-fluoroadenosine-3'-phosphate
  modified_base 12: mod_base = OTHER; note = 2'-O-methyladenosine-3'-phosphate
  modified_base 13: mod_base = OTHER; note = 2'-O-methylguanosine-3'-phosphate
  modified_base 14: mod_base = OTHER; note = 2'-O-methylguanosine-3'-phosphate
  modified_base 15: mod_base = OTHER; note = 2'-O-methylguanosine-3'-phosphate
  modified_base 16: mod_base = OTHER; note = 2'-O-methyluridine-3'-phosphate
  modified_base 17: mod_base = OTHER; note = 2'-O-methylguanosine-3'-phosphate
  modified_base 18: mod_base = OTHER; note = 2'-O-methyladenosine-3'-phosphate
  modified_base 19: mod_base = OTHER; note = 2'-O-methyladenosine-3'-phosphate
  modified_base 20: mod_base = OTHER; note = 2'-O-methyluridine-3'-phosphate
  modified_base 21: mod_base = OTHER; note = 2'-O-methyluridine-3'-phosphate ((2S,4R)-1-[29-[[2-(acetylamino)-2-deoxy-beta-D-galactopyra nosyl]oxy]-14,14-bis[[3-[[3-[[5-[[2-(acetylamino)-2-deoxy-b eta-D-galactopyranosyl]oxy]-1-oxopentyl]amino]propyl]amino] -3-oxopropoxy]methyl]-1,12,19,25-tetraoxo-16-oxa-13,20,24-t riazanonacos-1-yl]-4-hydroxy-2-pyrrolidinyl)methyl ester
actgtgaataaagggtgaatt

SEQ ID NO: 386 - RNA, 21 nt, synthetic construct
  source 1..21: mol_type = other RNA
  modified_base 1: mod_base = OTHER; note = 2'-O-methyluridine-3'-phosphorothioate
  modified_base 2: mod_base = OTHER; note = 2'-O-methyladenosine-3'-phosphorothioate
  modified_base 3: mod_base = OTHER; note = 2'-O-methylguanosine-3'-phosphate
  modified_base 4: mod_base = OTHER; note = 2'-O-methyluridine-3'-phosphate
  modified_base 5: mod_base = OTHER; note = 2'-O-methylcytidine-3'-phosphate
  modified_base 6: mod_base = OTHER; note = 2'-O-methyluridine-3'-phosphate
  modified_base 7: mod_base = OTHER; note = 2'-deoxy-2'-fluorocytidine-3'-phosphate
  modified_base 8: mod_base = OTHER; note = 2'-O-methyladenosine-3'-phosphate
  modified_base 9: mod_base = OTHER; note = 2'-deoxy-2'-fluoroadenosine-3'-phosphate
  modified_base 10: mod_base = OTHER; note = 2'-deoxy-2'-fluoroadenosine-3'-phosphate
  modified_base 11: mod_base = OTHER; note = 2'-deoxy-2'-fluorouridine-3'-phosphate
  modified_base 12: mod_base = OTHER; note = 2'-O-methylcytidine-3'-phosphate
  modified_base 13: mod_base = OTHER; note = 2'-O-methylcytidine-3'-phosphate
  modified_base 14: mod_base = OTHER; note = 2'-O-methyluridine-3'-phosphate
  modified_base 15: mod_base = OTHER; note = 2'-O-methylcytidine-3'-phosphate
  modified_base 16: mod_base = OTHER; note = 2'-O-methyladenosine-3'-phosphate
  modified_base 17: mod_base = OTHER; note = 2'-O-methyladenosine-3'-phosphate
  modified_base 18: mod_base = OTHER; note = 2'-O-methyladenosine-3'-phosphate
  modified_base 19: mod_base = OTHER; note = 2'-O-methylguanosine-3'-phosphate
  modified_base 20: mod_base = OTHER; note = 2'-O-methyladenosine-3'-phosphate
  modified_base 21: mod_base = OTHER; note = 2'-O-methyluridine-3'-phosphate ((2S,4R)-1-[29-[[2-(acetylamino)-2-deoxy-beta-D-galactopyra nosyl]oxy]-14,14-bis[[3-[[3-[[5-[[2-(acetylamino)-2-deoxy-b eta-D-galactopyranosyl]oxy]-1-oxopentyl]amino]propyl]amino] -3-oxopropoxy]methyl]-1,12,19,25-tetraoxo-16-oxa-13,20,24-t riazanonacos-1-yl]-4-hydroxy-2-pyrrolidinyl)methyl ester
tagtctcaaatcctcaaagat

SEQ ID NO: 387 - RNA, 21 nt, synthetic construct
  source 1..21: mol_type = other RNA
  modified_base 1: mod_base = OTHER; note = 2'-O-methyladenosine-3'-phosphorothioate
  modified_base 2: mod_base = OTHER; note = 2'-O-methylguanosine-3'-phosphorothioate
  modified_base 3: mod_base = OTHER; note = 2'-O-methyladenosine-3'-phosphate
  modified_base 4: mod_base = OTHER; note = 2'-O-methylguanosine-3'-phosphate
  modified_base 5: mod_base = OTHER; note = 2'-O-methylcytidine-3'-phosphate
  modified_base 6: mod_base = OTHER; note = 2'-O-methyluridine-3'-phosphate
  modified_base 7: mod_base = OTHER; note = 2'-deoxy-2'-fluoroguanosine-3'-phosphate
  modified_base 8: mod_base = OTHER; note = 2'-O-methyluridine-3'-phosphate
  modified_base 9: mod_base = OTHER; note = 2'-deoxy-2'-fluoroguanosine-3'-phosphate
  modified_base 10: mod_base = OTHER; note = 2'-deoxy-2'-fluorouridine-3'-phosphate
  modified_base 11: mod_base = OTHER; note = 2'-deoxy-2'-fluorouridine-3'-phosphate
  modified_base 12: mod_base = OTHER; note = 2'-O-methyluridine-3'-phosphate
  modified_base 13: mod_base = OTHER; note = 2'-O-methyladenosine-3'-phosphate
  modified_base 14: mod_base = OTHER; note = 2'-O-methyluridine-3'-phosphate
  modified_base 15: mod_base = OTHER; note = 2'-O-methyluridine-3'-phosphate
  modified_base 16: mod_base = OTHER; note = 2'-O-methyluridine-3'-phosphate
  modified_base 17: mod_base = OTHER; note = 2'-O-methylcytidine-3'-phosphate
  modified_base 18: mod_base = OTHER; note = 2'-O-methyladenosine-3'-phosphate
  modified_base 19: mod_base = OTHER; note = 2'-O-methyluridine-3'-phosphate
  modified_base 20: mod_base = OTHER; note = 2'-O-methyluridine-3'-phosphate
  modified_base 21: mod_base = OTHER; note = 2'-O-methyluridine-3'-phosphate ((2S,4R)-1-[29-[[2-(acetylamino)-2-deoxy-beta-D-galactopyra nosyl]oxy]-14,14-bis[[3-[[3-[[5-[[2-(acetylamino)-2-deoxy-b eta-D-galactopyranosyl]oxy]-1-oxopentyl]amino]propyl]amino] -3-oxopropoxy]methyl]-1,12,19,25-tetraoxo-16-oxa-13,20,24-t riazanonacos-1-yl]-4-hydroxy-2-pyrrolidinyl)methyl ester
agagctgtgtttatttcattt

SEQ ID NO: 388 - RNA, 21 nt, synthetic construct
  source 1..21: mol_type = other RNA
  modified_base 1: mod_base = OTHER; note = 2'-O-methyladenosine-3'-phosphorothioate
  modified_base 2: mod_base = OTHER; note = 2'-O-methylcytidine-3'-phosphorothioate
  modified_base 3: mod_base = OTHER; note = 2'-O-methyluridine-3'-phosphate
  modified_base 4: mod_base = OTHER; note = 2'-O-methyluridine-3'-phosphate
  modified_base 5: mod_base = OTHER; note = 2'-O-methyladenosine-3'-phosphate
  modified_base 6: mod_base = OTHER; note = 2'-O-methyladenosine-3'-phosphate
  modified_base 7: mod_base = OTHER; note = 2'-deoxy-2'-fluorouridine-3'-phosphate
  modified_base 8: mod_base = OTHER; note = 2'-O-methyluridine-3'-phosphate
  modified_base 9: mod_base = OTHER; note = 2'-deoxy-2'-fluorouridine-3'-phosphate
  modified_base 10: mod_base = OTHER; note = 2'-deoxy-2'-fluoroguanosine-3'-phosphate
  modified_base 11: mod_base = OTHER; note = 2'-deoxy-2'-fluoroadenosine-3'-phosphate
  modified_base 12: mod_base = OTHER; note = 2'-O-methylcytidine-3'-phosphate
  modified_base 13: mod_base = OTHER; note = 2'-O-methyluridine-3'-phosphate
  modified_base 14: mod_base = OTHER; note = 2'-O-methyladenosine-3'-phosphate
  modified_base 15: mod_base = OTHER; note = 2'-O-methyluridine-3'-phosphate
  modified_base 16: mod_base = OTHER; note = 2'-O-methylcytidine-3'-phosphate
  modified_base 17: mod_base = OTHER; note = 2'-O-methyluridine-3'-phosphate
  modified_base 18: mod_base = OTHER; note = 2'-O-methylguanosine-3'-phosphate
  modified_base 19: mod_base = OTHER; note = 2'-O-methylguanosine-3'-phosphate
  modified_base 20: mod_base = OTHER; note = 2'-O-methyluridine-3'-phosphate
  modified_base 21: mod_base = OTHER; note = 2'-O-methyluridine-3'-phosphate ((2S,4R)-1-[29-[[2-(acetylamino)-2-deoxy-beta-D-galactopyra nosyl]oxy]-14,14-bis[[3-[[3-[[5-[[2-(acetylamino)-2-deoxy-b eta-D-galactopyranosyl]oxy]-1-oxopentyl]amino]propyl]amino] -3-oxopropoxy]methyl]-1,12,19,25-tetraoxo-16-oxa-13,20,24-t riazanonacos-1-yl]-4-hydroxy-2-pyrrolidinyl)methyl ester
acttaatttgactatctggtt

SEQ ID NO: 389 - RNA, 21 nt, synthetic construct
  source 1..21: mol_type = other RNA
  modified_base 1: mod_base = OTHER; note = 2'-O-methylcytidine-3'-phosphorothioate
  modified_base 2: mod_base = OTHER; note = 2'-O-methyluridine-3'-phosphorothioate
  modified_base 3: mod_base = OTHER; note = 2'-O-methylcytidine-3'-phosphate
  modified_base 4: mod_base = OTHER; note = 2'-O-methyladenosine-3'-phosphate
  modified_base 5: mod_base = OTHER; note = 2'-O-methyluridine-3'-phosphate
  modified_base 6: mod_base = OTHER; note = 2'-O-methylguanosine-3'-phosphate
  modified_base 7: mod_base = OTHER; note = 2'-deoxy-2'-fluorouridine-3'-phosphate
  modified_base 8: mod_base = OTHER; note = 2'-O-methyladenosine-3'-phosphate
  modified_base 9: mod_base = OTHER; note = 2'-deoxy-2'-fluoroadenosine-3'-phosphate
  modified_base 10: mod_base = OTHER; note = 2'-deoxy-2'-fluoroguanosine-3'-phosphate
  modified_base 11: mod_base = OTHER; note = 2'-deoxy-2'-fluorouridine-3'-phosphate
  modified_base 12: mod_base = OTHER; note = 2'-O-methylcytidine-3'-phosphate
  modified_base 13: mod_base = OTHER; note = 2'-O-methyladenosine-3'-phosphate
  modified_base 14: mod_base = OTHER; note = 2'-O-methyladenosine-3'-phosphate
  modified_base 15: mod_base = OTHER; note = 2'-O-methylcytidine-3'-phosphate
  modified_base 16: mod_base = OTHER; note = 2'-O-methyladenosine-3'-phosphate
  modified_base 17: mod_base = OTHER; note = 2'-O-methyladenosine-3'-phosphate
  modified_base 18: mod_base = OTHER; note = 2'-O-methylcytidine-3'-phosphate
  modified_base 19: mod_base = OTHER; note = 2'-O-methyladenosine-3'-phosphate
  modified_base 20: mod_base = OTHER; note = 2'-O-methyluridine-3'-phosphate
  modified_base 21: mod_base = OTHER; note = 2'-O-methyluridine-3'-phosphate ((2S,4R)-1-[29-[[2-(acetylamino)-2-deoxy-beta-D-galactopyra nosyl]oxy]-14,14-bis[[3-[[3-[[5-[[2-(acetylamino)-2-deoxy-b eta-D-galactopyranosyl]oxy]-1-oxopentyl]amino]propyl]amino] -3-oxopropoxy]methyl]-1,12,19,25-tetraoxo-16-oxa-13,20,24-t riazanonacos-1-yl]-4-hydroxy-2-pyrrolidinyl)methyl ester
ctcatgtaagtcaacaacatt

SEQ ID NO: 390 - RNA, 21 nt, synthetic construct
  source 1..21: mol_type = other RNA
  modified_base 1: mod_base = OTHER; note = 2'-O-methyluridine-3'-phosphorothioate
  modified_base 2: mod_base = OTHER; note = 2'-O-methyladenosine-3'-phosphorothioate
  modified_base 3: mod_base = OTHER; note = 2'-O-methyladenosine-3'-phosphate
  modified_base 4: mod_base = OTHER; note = 2'-O-methylguanosine-3'-phosphate
  modified_base 5: mod_base = OTHER; note = 2'-O-methyladenosine-3'-phosphate
  modified_base 6: mod_base = OTHER; note = 2'-O-methylcytidine-3'-phosphate
  modified_base 7: mod_base = OTHER; note = 2'-deoxy-2'-fluoroadenosine-3'-phosphate
  modified_base 8: mod_base = OTHER; note = 2'-O-methyluridine-3'-phosphate
  modified_base 9: mod_base = OTHER; note = 2'-deoxy-2'-fluorouridine-3'-phosphate
  modified_base 10: mod_base = OTHER; note = 2'-deoxy-2'-fluorocytidine-3'-phosphate
  modified_base 11: mod_base = OTHER; note = 2'-deoxy-2'-fluorocytidine-3'-phosphate
  modified_base 12: mod_base = OTHER; note = 2'-O-methylcytidine-3'-phosphate
  modified_base 13: mod_base = OTHER; note = 2'-O-methyluridine-3'-phosphate
  modified_base 14: mod_base = OTHER; note = 2'-O-methyluridine-3'-phosphate
  modified_base 15: mod_base = OTHER; note = 2'-O-methyluridine-3'-phosphate
  modified_base 16: mod_base = OTHER; note = 2'-O-methylcytidine-3'-phosphate
  modified_base 17: mod_base = OTHER; note = 2'-O-methyladenosine-3'-phosphate
  modified_base 18: mod_base = OTHER; note = 2'-O-methyluridine-3'-phosphate
  modified_base 19: mod_base = OTHER; note = 2'-O-methylcytidine-3'-phosphate
  modified_base 20: mod_base = OTHER; note = 2'-O-methyluridine-3'-phosphate
  modified_base 21: mod_base = OTHER; note = 2'-O-methyluridine-3'-phosphate ((2S,4R)-1-[29-[[2-(acetylamino)-2-deoxy-beta-D-galactopyra nosyl]oxy]-14,14-bis[[3-[[3-[[5-[[2-(acetylamino)-2-deoxy-b eta-D-galactopyranosyl]oxy]-1-oxopentyl]amino]propyl]amino] -3-oxopropoxy]methyl]-1,12,19,25-tetraoxo-16-oxa-13,20,24-t riazanonacos-1-yl]-4-hydroxy-2-pyrrolidinyl)methyl ester
taagacattccctttcatctt

SEQ ID NO: 391 - RNA, 21 nt, synthetic construct
  source 1..21: mol_type = other RNA
  modified_base 1: mod_base = OTHER; note = 2'-O-methylcytidine-3'-phosphorothioate
  modified_base 2: mod_base = OTHER; note = 2'-O-methyladenosine-3'-phosphorothioate
  modified_base 3: mod_base = OTHER; note = 2'-O-methyluridine-3'-phosphate
  modified_base 4: mod_base = OTHER; note = 2'-O-methylcytidine-3'-phosphate
  modified_base 5: mod_base = OTHER; note = 2'-O-methyluridine-3'-phosphate
  modified_base 6: mod_base = OTHER; note = 2'-O-methyluridine-3'-phosphate
  modified_base 7: mod_base = OTHER; note = 2'-deoxy-2'-fluorouridine-3'-phosphate
  modified_base 8: mod_base = OTHER; note = 2'-O-methylguanosine-3'-phosphate
  modified_base 9: mod_base = OTHER; note = 2'-deoxy-2'-fluorouridine-3'-phosphate
  modified_base 10: mod_base = OTHER; note = 2'-deoxy-2'-fluoroguanosine-3'-phosphate
  modified_base 11: mod_base = OTHER; note = 2'-deoxy-2'-fluorouridine-3'-phosphate
  modified_base 12: mod_base = OTHER; note = 2'-O-methyluridine-3'-phosphate
  modified_base 13: mod_base = OTHER; note = 2'-O-methylcytidine-3'-phosphate
  modified_base 14: mod_base = OTHER; note = 2'-O-methyladenosine-3'-phosphate
  modified_base 15: mod_base = OTHER; note = 2'-O-methyluridine-3'-phosphate
  modified_base 16: mod_base = OTHER; note = 2'-O-methylcytidine-3'-phosphate
  modified_base 17: mod_base = OTHER; note = 2'-O-methyluridine-3'-phosphate
  modified_base 18: mod_base = OTHER; note = 2'-O-methyladenosine-3'-phosphate
  modified_base 19: mod_base = OTHER; note = 2'-O-methylcytidine-3'-phosphate
  modified_base 20: mod_base = OTHER; note = 2'-O-methyluridine-3'-phosphate
  modified_base 21: mod_base = OTHER; note = 2'-O-methyluridine-3'-phosphate ((2S,4R)-1-[29-[[2-(acetylamino)-2-deoxy-beta-D-galactopyra nosyl]oxy]-14,14-bis[[3-[[3-[[5-[[2-(acetylamino)-2-deoxy-b eta-D-galactopyranosyl]oxy]-1-oxopentyl]amino]propyl]amino] -3-oxopropoxy]methyl]-1,12,19,25-tetraoxo-16-oxa-13,20,24-t riazanonacos-1-yl]-4-hydroxy-2-pyrrolidinyl)methyl ester
catctttgtgttcatctactt

SEQ ID NO: 392 - RNA, 21 nt, synthetic construct
  source 1..21: mol_type = other RNA
  modified_base 1: mod_base = OTHER; note = 2'-O-methyladenosine-3'-phosphorothioate
  modified_base 2: mod_base = OTHER; note = 2'-O-methyluridine-3'-phosphorothioate
  modified_base 3: mod_base = OTHER; note = 2'-O-methylguanosine-3'-phosphate
  modified_base 4: mod_base = OTHER; note = 2'-O-methylcytidine-3'-phosphate
  modified_base 5: mod_base = OTHER; note = 2'-O-methyluridine-3'-phosphate
  modified_base 6: mod_base = OTHER; note = 2'-O-methyluridine-3'-phosphate
  modified_base 7: mod_base = OTHER; note = 2'-deoxy-2'-fluorocytidine-3'-phosphate
  modified_base 8: mod_base = OTHER; note = 2'-O-methyluridine-3'-phosphate
  modified_base 9: mod_base = OTHER; note = 2'-deoxy-2'-fluorocytidine-3'-phosphate
  modified_base 10: mod_base = OTHER; note = 2'-deoxy-2'-fluoroadenosine-3'-phosphate
  modified_base 11: mod_base = OTHER; note = 2'-deoxy-2'-fluoroadenosine-3'-phosphate
  modified_base 12: mod_base = OTHER; note = 2'-O-methylguanosine-3'-phosphate
  modified_base 13: mod_base = OTHER; note = 2'-O-methyluridine-3'-phosphate
  modified_base 14: mod_base = OTHER; note = 2'-O-methylcytidine-3'-phosphate
  modified_base 15: mod_base = OTHER; note = 2'-O-methylcytidine-3'-phosphate
  modified_base 16: mod_base = OTHER; note = 2'-O-methylcytidine-3'-phosphate
  modified_base 17: mod_base = OTHER; note = 2'-O-methyluridine-3'-phosphate
  modified_base 18: mod_base = OTHER; note = 2'-O-methyluridine-3'-phosphate
  modified_base 19: mod_base = OTHER; note = 2'-O-methyladenosine-3'-phosphate
  modified_base 20: mod_base = OTHER; note = 2'-O-methyluridine-3'-phosphate
  modified_base 21: mod_base = OTHER; note = 2'-O-methyluridine-3'-phosphate ((2S,4R)-1-[29-[[2-(acetylamino)-2-deoxy-beta-D-galactopyra nosyl]oxy]-14,14-bis[[3-[[3-[[5-[[2-(acetylamino)-2-deoxy-b eta-D-galactopyranosyl]oxy]-1-oxopentyl]amino]propyl]amino] -3-oxopropoxy]methyl]-1,12,19,25-tetraoxo-16-oxa-13,20,24-t riazanonacos-1-yl]-4-hydroxy-2-pyrrolidinyl)methyl ester
atgcttctcaagtcccttatt

SEQ ID NO: 393 - RNA, 21 nt, synthetic construct
  source 1..21: mol_type = other RNA
  modified_base 1: mod_base = OTHER; note = 2'-O-methyluridine-3'-phosphorothioate
  modified_base 2: mod_base = OTHER; note = 2'-O-methyluridine-3'-phosphorothioate
  modified_base 3: mod_base = OTHER; note = 2'-O-methyluridine-3'-phosphate
  modified_base 4: mod_base = OTHER; note = 2'-O-methylguanosine-3'-phosphate
  modified_base 5: mod_base = OTHER; note = 2'-O-methylcytidine-3'-phosphate
  modified_base 6: mod_base = OTHER; note = 2'-O-methyladenosine-3'-phosphate
  modified_base 7: mod_base = OTHER; note = 2'-deoxy-2'-fluorouridine-3'-phosphate
  modified_base 8: mod_base = OTHER; note = 2'-O-methyladenosine-3'-phosphate
  modified_base 9: mod_base = OTHER; note = 2'-deoxy-2'-fluorouridine-3'-phosphate
  modified_base 10: mod_base = OTHER; note = 2'-deoxy-2'-fluoroadenosine-3'-phosphate
  modified_base 11: mod_base = OTHER; note = 2'-deoxy-2'-fluoroadenosine-3'-phosphate
  modified_base 12: mod_base = OTHER; note = 2'-O-methylcytidine-3'-phosphate
  modified_base 13: mod_base = OTHER; note = 2'-O-methylcytidine-3'-phosphate
  modified_base 14: mod_base = OTHER; note = 2'-O-methyluridine-3'-phosphate
  modified_base 15: mod_base = OTHER; note = 2'-O-methyladenosine-3'-phosphate
  modified_base 16: mod_base = OTHER; note = 2'-O-methylcytidine-3'-phosphate
  modified_base 17: mod_base = OTHER; note = 2'-O-methyladenosine-3'-phosphate
  modified_base 18: mod_base = OTHER; note = 2'-O-methyluridine-3'-phosphate
  modified_base 19: mod_base = OTHER; note = 2'-O-methyladenosine-3'-phosphate
  modified_base 20: mod_base = OTHER; note = 2'-O-methylcytidine-3'-phosphate
  modified_base 21: mod_base = OTHER; note = 2'-O-methyluridine-3'-phosphate ((2S,4R)-1-[29-[[2-(acetylamino)-2-deoxy-beta-D-galactopyra nosyl]oxy]-14,14-bis[[3-[[3-[[5-[[2-(acetylamino)-2-deoxy-b eta-D-galactopyranosyl]oxy]-1-oxopentyl]amino]propyl]amino] -3-oxopropoxy]methyl]-1,12,19,25-tetraoxo-16-oxa-13,20,24-t riazanonacos-1-yl]-4-hydroxy-2-pyrrolidinyl)methyl ester
tttgcatataacctacatact

SEQ ID NO: 394 - RNA, 21 nt, synthetic construct
  source 1..21: mol_type = other RNA
  modified_base 1: mod_base = OTHER; note = 2'-O-methyladenosine-3'-phosphorothioate
  modified_base 2: mod_base = OTHER; note = 2'-O-methyluridine-3'-phosphorothioate
  modified_base 3: mod_base = OTHER; note = 2'-O-methyladenosine-3'-phosphate
  modified_base 4: mod_base = OTHER; note = 2'-O-methylcytidine-3'-phosphate
  modified_base 5: mod_base = OTHER; note = 2'-O-methylcytidine-3'-phosphate
  modified_base 6: mod_base = OTHER; note = 2'-O-methyluridine-3'-phosphate
  modified_base 7: mod_base = OTHER; note = 2'-deoxy-2'-fluorouridine-3'-phosphate
  modified_base 8: mod_base = OTHER; note = 2'-O-methylcytidine-3'-phosphate
  modified_base 9: mod_base = OTHER; note = 2'-deoxy-2'-fluorouridine-3'-phosphate
  modified_base 10: mod_base = OTHER; note = 2'-deoxy-2'-fluorocytidine-3'-phosphate
  modified_base 11: mod_base = OTHER; note = 2'-deoxy-2'-fluorouridine-3'-phosphate
  modified_base 12: mod_base = OTHER; note = 2'-O-methyluridine-3'-phosphate
  modified_base 13: mod_base = OTHER; note = 2'-O-methylguanosine-3'-phosphate
  modified_base 14: mod_base = OTHER; note = 2'-O-methyluridine-3'-phosphate
  modified_base 15: mod_base = OTHER; note = 2'-O-methyladenosine-3'-phosphate
  modified_base 16: mod_base = OTHER; note = 2'-O-methyluridine-3'-phosphate
  modified_base 17: mod_base = OTHER; note = 2'-O-methyladenosine-3'-phosphate
  modified_base 18: mod_base = OTHER; note = 2'-O-methyladenosine-3'-phosphate
  modified_base 19: mod_base = OTHER; note = 2'-O-methyluridine-3'-phosphate
  modified_base 20: mod_base = OTHER; note = 2'-O-methylcytidine-3'-phosphate
  modified_base 21: mod_base = OTHER; note = 2'-O-methyluridine-3'-phosphate ((2S,4R)-1-[29-[[2-(acetylamino)-2-deoxy-beta-D-galactopyra nosyl]oxy]-14,14-bis[[3-[[3-[[5-[[2-(acetylamino)-2-deoxy-b eta-D-galactopyranosyl]oxy]-1-oxopentyl]amino]propyl]amino] -3-oxopropoxy]methyl]-1,12,19,25-tetraoxo-16-oxa-13,20,24-t riazanonacos-1-yl]-4-hydroxy-2-pyrrolidinyl)methyl ester
ataccttctcttgtataatct

SEQ ID NO: 395 - RNA, 21 nt, synthetic construct
  source 1..21: mol_type = other RNA
  modified_base 1: mod_base = OTHER; note = 2'-O-methyladenosine-3'-phosphorothioate
  modified_base 2: mod_base = OTHER; note = 2'-O-methyladenosine-3'-phosphorothioate
  modified_base 3: mod_base = OTHER; note = 2'-O-methyladenosine-3'-phosphate
  modified_base 4: mod_base = OTHER; note = 2'-O-methyluridine-3'-phosphate
  modified_base 5: mod_base = OTHER; note = 2'-O-methylguanosine-3'-phosphate
  modified_base 6: mod_base = OTHER; note = 2'-O-methylcytidine-3'-phosphate
  modified_base 7: mod_base = OTHER; note = 2'-deoxy-2'-fluorouridine-3'-phosphate
  modified_base 8: mod_base = OTHER; note = 2'-O-methyladenosine-3'-phosphate
  modified_base 9: mod_base = OTHER; note = 2'-deoxy-2'-fluorouridine-3'-phosphate
  modified_base 10: mod_base = OTHER; note = 2'-deoxy-2'-fluorouridine-3'-phosphate
  modified_base 11: mod_base = OTHER; note = 2'-deoxy-2'-fluorouridine-3'-phosphate
  modified_base 12: mod_base = OTHER; note = 2'-O-methyladenosine-3'-phosphate
  modified_base 13: mod_base = OTHER; note = 2'-O-methyladenosine-3'-phosphate
  modified_base 14: mod_base = OTHER; note = 2'-O-methyluridine-3'-phosphate
  modified_base 15: mod_base = OTHER; note = 2'-O-methylcytidine-3'-phosphate
  modified_base 16: mod_base = OTHER; note = 2'-O-methylguanosine-3'-phosphate
  modified_base 17: mod_base = OTHER; note = 2'-O-methyluridine-3'-phosphate
  modified_base 18: mod_base = OTHER; note = 2'-O-methyluridine-3'-phosphate
  modified_base 19: mod_base = OTHER; note = 2'-O-methylguanosine-3'-phosphate
  modified_base 20: mod_base = OTHER; note = 2'-O-methyluridine-3'-phosphate
  modified_base 21: mod_base = OTHER; note = 2'-O-methyluridine-3'-phosphate ((2S,4R)-1-[29-[[2-(acetylamino)-2-deoxy-beta-D-galactopyra nosyl]oxy]-14,14-bis[[3-[[3-[[5-[[2-(acetylamino)-2-deoxy-b eta-D-galactopyranosyl]oxy]-1-oxopentyl]amino]propyl]amino] -3-oxopropoxy]methyl]-1,12,19,25-tetraoxo-16-oxa-13,20,24-t riazanonacos-1-yl]-4-hydroxy-2-pyrrolidinyl)methyl ester
aaatgctatttaatcgttgtt

SEQ ID NO: 396 - RNA, 21 nt, synthetic construct
  source 1..21: mol_type = other RNA
  modified_base 1: mod_base = OTHER; note = 2'-O-methylguanosine-3'-phosphorothioate
  modified_base 2: mod_base = OTHER; note = 2'-O-methyluridine-3'-phosphorothioate
  modified_base 3: mod_base = OTHER; note = 2'-O-methyluridine-3'-phosphate
  modified_base 4: mod_base = OTHER; note = 2'-O-methylguanosine-3'-phosphate
  modified_base 5: mod_base = OTHER; note = 2'-O-methyluridine-3'-phosphate
  modified_base 6: mod_base = OTHER; note = 2'-O-methyluridine-3'-phosphate
  modified_base 7: mod_base = OTHER; note = 2'-deoxy-2'-fluoroadenosine-3'-phosphate
  modified_base 8: mod_base = OTHER; note = 2'-O-methyluridine-3'-phosphate
  modified_base 9: mod_base = OTHER; note = 2'-deoxy-2'-fluoroadenosine-3'-phosphate
  modified_base 10: mod_base = OTHER; note = 2'-deoxy-2'-fluorocytidine-3'-phosphate
  modified_base 11: mod_base = OTHER; note = 2'-deoxy-2'-fluorouridine-3'-phosphate
  modified_base 12: mod_base = OTHER; note = 2'-O-methylguanosine-3'-phosphate
  modified_base 13: mod_base = OTHER; note = 2'-O-methyluridine-3'-phosphate
  modified_base 14: mod_base = OTHER; note = 2'-O-methyladenosine-3'-phosphate
  modified_base 15: mod_base = OTHER; note = 2'-O-methyluridine-3'-phosphate
  modified_base 16: mod_base = OTHER; note = 2'-O-methyluridine-3'-phosphate
  modified_base 17: mod_base = OTHER; note = 2'-O-methylguanosine-3'-phosphate
  modified_base 18: mod_base = OTHER; note = 2'-O-methyluridine-3'-phosphate
  modified_base 19: mod_base = OTHER; note = 2'-O-methyluridine-3'-phosphate
  modified_base 20: mod_base = OTHER; note = 2'-O-methyluridine-3'-phosphate
  modified_base 21: mod_base = OTHER; note = 2'-O-methyluridine-3'-phosphate ((2S,4R)-1-[29-[[2-(acetylamino)-2-deoxy-beta-D-galactopyra nosyl]oxy]-14,14-bis[[3-[[3-[[5-[[2-(acetylamino)-2-deoxy-b eta-D-galactopyranosyl]oxy]-1-oxopentyl]amino]propyl]amino] -3-oxopropoxy]methyl]-1,12,19,25-tetraoxo-16-oxa-13,20,24-t riazanonacos-1-yl]-4-hydroxy-2-pyrrolidinyl)methyl ester
gttgttatactgtattgtttt

SEQ ID NO: 397 - RNA, 21 nt, synthetic construct
  source 1..21: mol_type = other RNA
  modified_base 1: mod_base = OTHER; note = 2'-O-methylcytidine-3'-phosphorothioate
  modified_base 2: mod_base = OTHER; note = 2'-O-methyladenosine-3'-phosphorothioate
  modified_base 3: mod_base = OTHER; note = 2'-O-methyluridine-3'-phosphate
  modified_base 4: mod_base = OTHER; note = 2'-O-methyladenosine-3'-phosphate
  modified_base 5: mod_base = OTHER; note = 2'-O-methyluridine-3'-phosphate
  modified_base 6: mod_base = OTHER; note = 2'-O-methyluridine-3'-phosphate
  modified_base 7: mod_base = OTHER; note = 2'-deoxy-2'-fluoroguanosine-3'-phosphate
  modified_base 8: mod_base = OTHER; note = 2'-O-methyluridine-3'-phosphate
  modified_base 9: mod_base = OTHER; note = 2'-deoxy-2'-fluorouridine-3'-phosphate
  modified_base 10: mod_base = OTHER; note = 2'-deoxy-2'-fluoroadenosine-3'-phosphate
  modified_base 11: mod_base = OTHER; note = 2'-deoxy-2'-fluorouridine-3'-phosphate
  modified_base 12: mod_base = OTHER; note = 2'-O-methyluridine-3'-phosphate
  modified_base 13: mod_base = OTHER; note = 2'-O-methyluridine-3'-phosphate
  modified_base 14: mod_base = OTHER; note = 2'-O-methyluridine-3'-phosphate
  modified_base 15: mod_base = OTHER; note = 2'-O-methylcytidine-3'-phosphate
  modified_base 16: mod_base = OTHER; note = 2'-O-methyluridine-3'-phosphate
  modified_base 17: mod_base = OTHER; note = 2'-O-methylguanosine-3'-phosphate
  modified_base 18: mod_base = OTHER; note = 2'-O-methyluridine-3'-phosphate
  modified_base 19: mod_base = OTHER; note = 2'-O-methylcytidine-3'-phosphate
  modified_base 20: mod_base = OTHER; note = 2'-O-methyladenosine-3'-phosphate
  modified_base 21: mod_base = OTHER; note = 2'-O-methyluridine-3'-phosphate ((2S,4R)-1-[29-[[2-(acetylamino)-2-deoxy-beta-D-galactopyra nosyl]oxy]-14,14-bis[[3-[[3-[[5-[[2-(acetylamino)-2-deoxy-b eta-D-galactopyranosyl]oxy]-1-oxopentyl]amino]propyl]amino] -3-oxopropoxy]methyl]-1,12,19,25-tetraoxo-16-oxa-13,20,24-t riazanonacos-1-yl]-4-hydroxy-2-pyrrolidinyl)methyl ester
catattgttattttctgtcat

SEQ ID NO: 398 - RNA, 21 nt, synthetic construct
  source 1..21: mol_type = other RNA
  modified_base 1: mod_base = OTHER; note = 2'-O-methylguanosine-3'-phosphorothioate
  modified_base 2: mod_base = OTHER; note = 2'-O-methyluridine-3'-phosphorothioate
  modified_base 3: mod_base = OTHER; note = 2'-O-methylcytidine-3'-phosphate
  modified_base 4: mod_base = OTHER; note = 2'-O-methyladenosine-3'-phosphate
  modified_base 5: mod_base = OTHER; note = 2'-O-methyluridine-3'-phosphate
  modified_base 6: mod_base = OTHER; note = 2'-O-methylcytidine-3'-phosphate
  modified_base 7: mod_base = OTHER; note = 2'-deoxy-2'-fluorouridine-3'-phosphate
  modified_base 8: mod_base = OTHER; note = 2'-O-methyluridine-3'-phosphate
  modified_base 9: mod_base = OTHER; note = 2'-deoxy-2'-fluorouridine-3'-phosphate
  modified_base 10: mod_base = OTHER; note = 2'-deoxy-2'-fluorouridine-3'-phosphate
  modified_base 11: mod_base = OTHER; note = 2'-deoxy-2'-fluorouridine-3'-phosphate
  modified_base 12: mod_base = OTHER; note = 2'-O-methylcytidine-3'-phosphate
  modified_base 13: mod_base = OTHER; note = 2'-O-methyladenosine-3'-phosphate
  modified_base 14: mod_base = OTHER; note = 2'-O-methyladenosine-3'-phosphate
  modified_base 15: mod_base = OTHER; note = 2'-O-methylguanosine-3'-phosphate
  modified_base 16: mod_base = OTHER; note = 2'-O-methyluridine-3'-phosphate
  modified_base 17: mod_base = OTHER; note = 2'-O-methylcytidine-3'-phosphate
  modified_base 18: mod_base = OTHER; note = 2'-O-methyluridine-3'-phosphate
  modified_base 19: mod_base = OTHER; note = 2'-O-methyluridine-3'-phosphate
  modified_base 20: mod_base = OTHER; note = 2'-O-methyluridine-3'-phosphate
  modified_base 21: mod_base = OTHER; note = 2'-O-methyluridine-3'-phosphate ((2S,4R)-1-[29-[[2-(acetylamino)-2-deoxy-beta-D-galactopyra nosyl]oxy]-14,14-bis[[3-[[3-[[5-[[2-(acetylamino)-2-deoxy-b eta-D-galactopyranosyl]oxy]-1-oxopentyl]amino]propyl]amino] -3-oxopropoxy]methyl]-1,12,19,25-tetraoxo-16-oxa-13,20,24-t riazanonacos-1-yl]-4-hydroxy-2-pyrrolidinyl)methyl ester
gtcatctttttcaagtctttt

SEQ ID NO: 399 - RNA, 21 nt, synthetic construct
  source 1..21: mol_type = other RNA
  modified_base 1: mod_base = OTHER; note = 2'-O-methylcytidine-3'-phosphorothioate
  modified_base 2: mod_base = OTHER; note = 2'-O-methyladenosine-3'-phosphorothioate
  modified_base 3: mod_base = OTHER; note = 2'-O-methyluridine-3'-phosphate
  modified_base 4: mod_base = OTHER; note = 2'-O-methylcytidine-3'-phosphate
  modified_base 5: mod_base = OTHER; note = 2'-O-methylcytidine-3'-phosphate
  modified_base 6: mod_base = OTHER; note = 2'-O-methyladenosine-3'-phosphate
  modified_base 7: mod_base = OTHER; note = 2'-deoxy-2'-fluorocytidine-3'-phosphate
  modified_base 8: mod_base = OTHER; note = 2'-O-methyladenosine-3'-phosphate
  modified_base 9: mod_base = OTHER; note = 2'-deoxy-2'-fluoroguanosine-3'-phosphate
  modified_base 10: mod_base = OTHER; note = 2'-deoxy-2'-fluorouridine-3'-phosphate
  modified_base 11: mod_base = OTHER; note = 2'-deoxy-2'-fluorouridine-3'-phosphate
  modified_base 12: mod_base = OTHER; note = 2'-O-methylguanosine-3'-phosphate
  modified_base 13: mod_base = OTHER; note = 2'-O-methylguanosine-3'-phosphate
  modified_base 14: mod_base = OTHER; note = 2'-O-methyluridine-3'-phosphate
  modified_base 15: mod_base = OTHER; note = 2'-O-methyluridine-3'-phosphate
  modified_base 16: mod_base = OTHER; note = 2'-O-methylguanosine-3'-phosphate
  modified_base 17: mod_base = OTHER; note = 2'-O-methyladenosine-3'-phosphate
  modified_base 18: mod_base = OTHER; note = 2'-O-methyladenosine-3'-phosphate
  modified_base 19: mod_base = OTHER; note = 2'-O-methyluridine-3'-phosphate
  modified_base 20: mod_base = OTHER; note = 2'-O-methyluridine-3'-phosphate
  modified_base 21: mod_base = OTHER; note = 2'-O-methyluridine-3'-phosphate ((2S,4R)-1-[29-[[2-(acetylamino)-2-deoxy-beta-D-galactopyra nosyl]oxy]-14,14-bis[[3-[[3-[[5-[[2-(acetylamino)-2-deoxy-b eta-D-galactopyranosyl]oxy]-1-oxopentyl]amino]propyl]amino] -3-oxopropoxy]methyl]-1,12,19,25-tetraoxo-16-oxa-13,20,24-t riazanonacos-1-yl]-4-hydroxy-2-pyrrolidinyl)methyl ester
catccacagttggttgaattt

SEQ ID NO: 400 - RNA, 21 nt, synthetic construct
  source 1..21: mol_type = other RNA
  modified_base 1: mod_base = OTHER; note = 2'-O-methyladenosine-3'-phosphorothioate
  modified_base 2: mod_base = OTHER; note = 2'-O-methylcytidine-3'-phosphorothioate
  modified_base 3: mod_base = OTHER; note = 2'-O-methyluridine-3'-phosphate
  modified_base 4: mod_base = OTHER; note = 2'-O-methylguanosine-3'-phosphate
  modified_base 5: mod_base = OTHER; note = 2'-O-methyluridine-3'-phosphate
  modified_base 6: mod_base = OTHER; note = 2'-O-methyladenosine-3'-phosphate
  modified_base 7: mod_base = OTHER; note = 2'-deoxy-2'-fluorouridine-3'-phosphate
  modified_base 8: mod_base = OTHER; note = 2'-O-methyluridine-3'-phosphate
  modified_base 9: mod_base = OTHER; note = 2'-deoxy-2'-fluorouridine-3'-phosphate
  modified_base 10: mod_base = OTHER; note = 2'-deoxy-2'-fluoroadenosine-3'-phosphate
  modified_base 11: mod_base = OTHER; note = 2'-deoxy-2'-fluoroguanosine-3'-phosphate
  modified_base 12: mod_base = OTHER; note = 2'-O-methylguanosine-3'-phosphate
  modified_base 13: mod_base = OTHER; note = 2'-O-methyladenosine-3'-phosphate
  modified_base 14: mod_base = OTHER; note = 2'-O-methyluridine-3'-phosphate
  modified_base 15: mod_base = OTHER; note = 2'-O-methyladenosine-3'-phosphate
  modified_base 16: mod_base = OTHER; note = 2'-O-methyladenosine-3'-phosphate
  modified_base 17: mod_base = OTHER; note = 2'-O-methyluridine-3'-phosphate
  modified_base 18: mod_base = OTHER; note = 2'-O-methyluridine-3'-phosphate
  modified_base 19: mod_base = OTHER; note = 2'-O-methyluridine-3'-phosphate
  modified_base 20: mod_base = OTHER; note = 2'-O-methylcytidine-3'-phosphate
  modified_base 21: mod_base = OTHER; note = 2'-O-methyluridine-3'-phosphate ((2S,4R)-1-[29-[[2-(acetylamino)-2-deoxy-beta-D-galactopyra nosyl]oxy]-14,14-bis[[3-[[3-[[5-[[2-(acetylamino)-2-deoxy-b eta-D-galactopyranosyl]oxy]-1-oxopentyl]amino]propyl]amino] -3-oxopropoxy]methyl]-1,12,19,25-tetraoxo-16-oxa-13,20,24-t riazanonacos-1-yl]-4-hydroxy-2-pyrrolidinyl)methyl ester
actgtatttaggataatttct

SEQ ID NO: 401 - RNA, 21 nt, synthetic construct
  source 1..21: mol_type = other RNA
  modified_base 1: mod_base = OTHER; note = 2'-O-methylcytidine-3'-phosphorothioate
  modified_base 2: mod_base = OTHER; note = 2'-O-methyladenosine-3'-phosphorothioate
  modified_base 3: mod_base = OTHER; note = 2'-O-methyluridine-3'-phosphate
  modified_base 4: mod_base = OTHER; note = 2'-O-methylcytidine-3'-phosphate
  modified_base 5: mod_base = OTHER; note = 2'-O-methyladenosine-3'-phosphate
  modified_base 6: mod_base = OTHER; note = 2'-O-methylcytidine-3'-phosphate
  modified_base 7: mod_base = OTHER; note = 2'-deoxy-2'-fluorouridine-3'-phosphate
  modified_base 8: mod_base = OTHER; note = 2'-O-methyluridine-3'-phosphate
  modified_base 9: mod_base = OTHER; note = 2'-deoxy-2'-fluorouridine-3'-phosphate
  modified_base 10: mod_base = OTHER; note = 2'-deoxy-2'-fluorouridine-3'-phosphate
  modified_base 11: mod_base = OTHER; note = 2'-deoxy-2'-fluoroadenosine-3'-phosphate
  modified_base 12: mod_base = OTHER; note = 2'-O-methyladenosine-3'-phosphate
  modified_base 13: mod_base = OTHER; note = 2'-O-methyluridine-3'-phosphate
  modified_base 14: mod_base = OTHER; note = 2'-O-methyluridine-3'-phosphate
  modified_base 15: mod_base = OTHER; note = 2'-O-methylcytidine-3'-phosphate
  modified_base 16: mod_base = OTHER; note = 2'-O-methyladenosine-3'-phosphate
  modified_base 17: mod_base = OTHER; note = 2'-O-methyladenosine-3'-phosphate
  modified_base 18: mod_base = OTHER; note = 2'-O-methyladenosine-3'-phosphate
  modified_base 19: mod_base = OTHER; note = 2'-O-methylcytidine-3'-phosphate
  modified_base 20: mod_base = OTHER; note = 2'-O-methylcytidine-3'-phosphate
  modified_base 21: mod_base = OTHER; note = 2'-O-methyluridine-3'-phosphate ((2S,4R)-1-[29-[[2-(acetylamino)-2-deoxy-beta-D-galactopyra nosyl]oxy]-14,14-bis[[3-[[3-[[5-[[2-(acetylamino)-2-deoxy-b eta-D-galactopyranosyl]oxy]-1-oxopentyl]amino]propyl]amino] -3-oxopropoxy]methyl]-1,12,19,25-tetraoxo-16-oxa-13,20,24-t riazanonacos-1-yl]-4-hydroxy-2-pyrrolidinyl)methyl ester
catcacttttaattcaaacct

SEQ ID NO: 402 - RNA, 21 nt, synthetic construct
  source 1..21: mol_type = other RNA
  modified_base 1: mod_base = OTHER; note = 2'-O-methyladenosine-3'-phosphorothioate
  modified_base 2: mod_base = OTHER; note = 2'-O-methyladenosine-3'-phosphorothioate
  modified_base 3: mod_base = OTHER; note = 2'-O-methyladenosine-3'-phosphate
  modified_base 4: mod_base = OTHER; note = 2'-O-methylcytidine-3'-phosphate
  modified_base 5: mod_base = OTHER; note = 2'-O-methylcytidine-3'-phosphate
  modified_base 6: mod_base = OTHER; note = 2'-O-methyladenosine-3'-phosphate
  modified_base 7: mod_base = OTHER; note = 2'-deoxy-2'-fluorocytidine-3'-phosphate
  modified_base 8: mod_base = OTHER; note = 2'-O-methyladenosine-3'-phosphate
  modified_base 9: mod_base = OTHER; note = 2'-deoxy-2'-fluoroadenosine-3'-phosphate
  modified_base 10: mod_base = OTHER; note = 2'-deoxy-2'-fluorouridine-3'-phosphate
  modified_base 11: mod_base = OTHER; note = 2'-deoxy-2'-fluoroadenosine-3'-phosphate
  modified_base 12: mod_base = OTHER; note = 2'-O-methyluridine-3'-phosphate
  modified_base 13: mod_base = OTHER; note = 2'-O-methylguanosine-3'-phosphate
  modified_base 14: mod_base = OTHER; note = 2'-O-methyluridine-3'-phosphate
  modified_base 15: mod_base = OTHER; note = 2'-O-methylguanosine-3'-phosphate
  modified_base 16: mod_base = OTHER; note = 2'-O-methyladenosine-3'-phosphate
  modified_base 17: mod_base = OTHER; note = 2'-O-methyladenosine-3'-phosphate
  modified_base 18: mod_base = OTHER; note = 2'-O-methyluridine-3'-phosphate
  modified_base 19: mod_base = OTHER; note = 2'-O-methyladenosine-3'-phosphate
  modified_base 20: mod_base = OTHER; note = 2'-O-methyladenosine-3'-phosphate
  modified_base 21: mod_base = OTHER; note = 2'-O-methyluridine-3'-phosphate ((2S,4R)-1-[29-[[2-(acetylamino)-2-deoxy-beta-D-galactopyra nosyl]oxy]-14,14-bis[[3-[[3-[[5-[[2-(acetylamino)-2-deoxy-b eta-D-galactopyranosyl]oxy]-1-oxopentyl]amino]propyl]amino] -3-oxopropoxy]methyl]-1,12,19,25-tetraoxo-16-oxa-13,20,24-t riazanonacos-1-yl]-4-hydroxy-2-pyrrolidinyl)methyl ester
aaaccacaatatgtgaataat

SEQ ID NO: 403 - RNA, 21 nt, synthetic construct
  source 1..21: mol_type = other RNA
  modified_base 1: mod_base = OTHER; note = 2'-O-methyladenosine-3'-phosphorothioate
  modified_base 2: mod_base = OTHER; note = 2'-O-methylguanosine-3'-phosphorothioate
  modified_base 3: mod_base = OTHER; note = 2'-O-methylcytidine-3'-phosphate
  modified_base 4: mod_base = OTHER; note = 2'-O-methyladenosine-3'-phosphate
  modified_base 5: mod_base = OTHER; note = 2'-O-methylguanosine-3'-phosphate
  modified_base 6: mod_base = OTHER; note = 2'-O-methyladenosine-3'-phosphate
  modified_base 7: mod_base = OTHER; note = 2'-deoxy-2'-fluorouridine-3'-phosphate
  modified_base 8: mod_base = OTHER; note = 2'-O-methyladenosine-3'-phosphate
  modified_base 9: mod_base = OTHER; note = 2'-deoxy-2'-fluoroguanosine-3'-phosphate
  modified_base 10: mod_base = OTHER; note = 2'-deoxy-2'-fluoroadenosine-3'-phosphate
  modified_base 11: mod_base = OTHER; note = 2'-deoxy-2'-fluoroadenosine-3'-phosphate
  modified_base 12: mod_base = OTHER; note = 2'-O-methyladenosine-3'-phosphate
  modified_base 13: mod_base = OTHER; note = 2'-O-methylguanosine-3'-phosphate
  modified_base 14: mod_base = OTHER; note = 2'-O-methyladenosine-3'-phosphate
  modified_base 15: mod_base = OTHER; note = 2'-O-methyladenosine-3'-phosphate
  modified_base 16: mod_base = OTHER; note = 2'-O-methyluridine-3'-phosphate
  modified_base 17: mod_base = OTHER; note = 2'-O-methylcytidine-3'-phosphate
  modified_base 18: mod_base = OTHER; note = 2'-O-methyluridine-3'-phosphate
  modified_base 19: mod_base = OTHER; note = 2'-O-methyluridine-3'-phosphate
  modified_base 20: mod_base = OTHER; note = 2'-O-methyluridine-3'-phosphate
  modified_base 21: mod_base = OTHER; note = 2'-O-methyluridine-3'-phosphate ((2S,4R)-1-[29-[[2-(acetylamino)-2-deoxy-beta-D-galactopyra nosyl]oxy]-14,14-bis[[3-[[3-[[5-[[2-(acetylamino)-2-deoxy-b eta-D-galactopyranosyl]oxy]-1-oxopentyl]amino]propyl]amino] -3-oxopropoxy]methyl]-1,12,19,25-tetraoxo-16-oxa-13,20,24-t riazanonacos-1-yl]-4-hydroxy-2-pyrrolidinyl)methyl ester
agcagatagaaagaatctttt

SEQ ID NO: 404 - RNA, 21 nt, synthetic construct
  source 1..21: mol_type = other RNA
  modified_base 1: mod_base = OTHER; note = 2'-O-methylguanosine-3'-phosphorothioate
  modified_base 2: mod_base = OTHER; note = 2'-O-methyluridine-3'-phosphorothioate
  modified_base 3: mod_base = OTHER; note = 2'-O-methylcytidine-3'-phosphate
  modified_base 4: mod_base = OTHER; note = 2'-O-methylguanosine-3'-phosphate
  modified_base 5: mod_base = OTHER; note = 2'-O-methyladenosine-3'-phosphate
  modified_base 6: mod_base = OTHER; note = 2'-O-methyluridine-3'-phosphate
  modified_base 7: mod_base = OTHER; note = 2'-deoxy-2'-fluoroguanosine-3'-phosphate
  modified_base 8: mod_base = OTHER; note = 2'-O-methyluridine-3'-phosphate
  modified_base 9: mod_base = OTHER; note = 2'-deoxy-2'-fluorouridine-3'-phosphate
  modified_base 10: mod_base = OTHER; note = 2'-deoxy-2'-fluorocytidine-3'-phosphate
  modified_base 11: mod_base = OTHER; note = 2'-deoxy-2'-fluoroadenosine-3'-phosphate
  modified_base 12: mod_base = OTHER; note = 2'-O-methyladenosine-3'-phosphate
  modified_base 13: mod_base = OTHER; note = 2'-O-methylcytidine-3'-phosphate
  modified_base 14: mod_base = OTHER; note = 2'-O-methyluridine-3'-phosphate
  modified_base 15: mod_base = OTHER; note = 2'-O-methyladenosine-3'-phosphate
  modified_base 16: mod_base = OTHER; note = 2'-O-methyluridine-3'-phosphate
  modified_base 17: mod_base = OTHER; note = 2'-O-methyluridine-3'-phosphate
  modified_base 18: mod_base = OTHER; note = 2'-O-methyluridine-3'-phosphate
  modified_base 19: mod_base = OTHER; note = 2'-O-methyluridine-3'-phosphate
  modified_base 20: mod_base = OTHER; note = 2'-O-methyluridine-3'-phosphate
  modified_base 21: mod_base = OTHER; note = 2'-O-methyluridine-3'-phosphate ((2S,4R)-1-[29-[[2-(acetylamino)-2-deoxy-beta-D-galactopyra nosyl]oxy]-14,14-bis[[3-[[3-[[5-[[2-(acetylamino)-2-deoxy-b eta-D-galactopyranosyl]oxy]-1-oxopentyl]amino]propyl]amino] -3-oxopropoxy]methyl]-1,12,19,25-tetraoxo-16-oxa-13,20,24-t riazanonacos-1-yl]-4-hydroxy-2-pyrrolidinyl)methyl ester
gtcgatgttcaactatttttt

SEQ ID NO: 405 - RNA, 21 nt, synthetic construct
  source 1..21: mol_type = other RNA
  modified_base 1: mod_base = OTHER; note = 2'-O-methyladenosine-3'-phosphorothioate
  modified_base 2: mod_base = OTHER; note = 2'-O-methyladenosine-3'-phosphorothioate
  modified_base 3: mod_base = OTHER; note = 2'-O-methylcytidine-3'-phosphate
  modified_base 4: mod_base = OTHER; note = 2'-O-methyladenosine-3'-phosphate
  modified_base 5: mod_base = OTHER; note = 2'-O-methyluridine-3'-phosphate
  modified_base 6: mod_base = OTHER; note = 2'-O-methylguanosine-3'-phosphate
  modified_base 7: mod_base = OTHER; note = 2'-deoxy-2'-fluoroguanosine-3'-phosphate
  modified_base 8: mod_base = OTHER; note = 2'-O-methyluridine-3'-phosphate
  modified_base 9: mod_base = OTHER; note = 2'-deoxy-2'-fluorouridine-3'-phosphate
  modified_base 10: mod_base = OTHER; note = 2'-deoxy-2'-fluoroguanosine-3'-phosphate
  modified_base 11: mod_base = OTHER; note = 2'-deoxy-2'-fluorocytidine-3'-phosphate
  modified_base 12: mod_base = OTHER; note = 2'-O-methyluridine-3'-phosphate
  modified_base 13: mod_base = OTHER; note = 2'-O-methyluridine-3'-phosphate
  modified_base 14: mod_base = OTHER; note = 2'-O-methyluridine-3'-phosphate
  modified_base 15: mod_base = OTHER; note = 2'-O-methylcytidine-3'-phosphate
  modified_base 16: mod_base = OTHER; note = 2'-O-methyluridine-3'-phosphate
  modified_base 17: mod_base = OTHER; note = 2'-O-methyladenosine-3'-phosphate
  modified_base 18: mod_base = OTHER; note = 2'-O-methyluridine-3'-phosphate
  modified_base 19: mod_base = OTHER; note = 2'-O-methyluridine-3'-phosphate
  modified_base 20: mod_base = OTHER; note = 2'-O-methyluridine-3'-phosphate
  modified_base 21: mod_base = OTHER; note = 2'-O-methyluridine-3'-phosphate ((2S,4R)-1-[29-[[2-(acetylamino)-2-deoxy-beta-D-galactopyra nosyl]oxy]-14,14-bis[[3-[[3-[[5-[[2-(acetylamino)-2-deoxy-b eta-D-galactopyranosyl]oxy]-1-oxopentyl]amino]propyl]amino] -3-oxopropoxy]methyl]-1,12,19,25-tetraoxo-16-oxa-13,20,24-t riazanonacos-1-yl]-4-hydroxy-2-pyrrolidinyl)methyl ester
aacatggttgctttctatttt

SEQ ID NO: 406 - RNA, 21 nt, synthetic construct
  source 1..21: mol_type = other RNA
  modified_base 1: mod_base = OTHER; note = 2'-O-methyluridine-3'-phosphorothioate
  modified_base 2: mod_base = OTHER; note = 2'-O-methylcytidine-3'-phosphorothioate
  modified_base 3: mod_base = OTHER; note = 2'-O-methyluridine-3'-phosphate
  modified_base 4: mod_base = OTHER; note = 2'-O-methyluridine-3'-phosphate
  modified_base 5: mod_base = OTHER; note = 2'-O-methylguanosine-3'-phosphate
  modified_base 6: mod_base = OTHER; note = 2'-O-methylguanosine-3'-phosphate
  modified_base 7: mod_base = OTHER; note = 2'-deoxy-2'-fluoroadenosine-3'-phosphate
  modified_base 8: mod_base = OTHER; note = 2'-O-methyluridine-3'-phosphate
  modified_base 9: mod_base = OTHER; note = 2'-deoxy-2'-fluoroadenosine-3'-phosphate
  modified_base 10: mod_base = OTHER; note = 2'-deoxy-2'-fluorouridine-3'-phosphate
  modified_base 11: mod_base = OTHER; note = 2'-deoxy-2'-fluoroguanosine-3'-phosphate
  modified_base 12: mod_base = OTHER; note = 2'-O-methylguanosine-3'-phosphate
  modified_base 13: mod_base = OTHER; note = 2'-O-methyladenosine-3'-phosphate
  modified_base 14: mod_base = OTHER; note = 2'-O-methylguanosine-3'-phosphate
  modified_base 15: mod_base = OTHER; note = 2'-O-methylguanosine-3'-phosphate
  modified_base 16: mod_base = OTHER; note = 2'-O-methyluridine-3'-phosphate
  modified_base 17: mod_base = OTHER; note = 2'-O-methyluridine-3'-phosphate
  modified_base 18: mod_base = OTHER; note = 2'-O-methyluridine-3'-phosphate
  modified_base 19: mod_base = OTHER; note = 2'-O-methylcytidine-3'-phosphate
  modified_base 20: mod_base = OTHER; note = 2'-O-methyluridine-3'-phosphate
  modified_base 21: mod_base = OTHER; note = 2'-O-methyluridine-3'-phosphate ((2S,4R)-1-[29-[[2-(acetylamino)-2-deoxy-beta-D-galactopyra nosyl]oxy]-14,14-bis[[3-[[3-[[5-[[2-(acetylamino)-2-deoxy-b eta-D-galactopyranosyl]oxy]-1-oxopentyl]amino]propyl]amino] -3-oxopropoxy]methyl]-1,12,19,25-tetraoxo-16-oxa-13,20,24-t riazanonacos-1-yl]-4-hydroxy-2-pyrrolidinyl)methyl ester
tcttggatatggaggtttctt

SEQ ID NO: 407 - RNA, 21 nt, synthetic construct
  source 1..21: mol_type = other RNA
  modified_base 1: mod_base = OTHER; note = 2'-O-methyluridine-3'-phosphorothioate
  modified_base 2: mod_base = OTHER; note = 2'-O-methyluridine-3'-phosphorothioate
  modified_base 3: mod_base = OTHER; note = 2'-O-methylcytidine-3'-phosphate
  modified_base 4: mod_base = OTHER; note = 2'-O-methyluridine-3'-phosphate
  modified_base 5: mod_base = OTHER; note = 2'-O-methyluridine-3'-phosphate
  modified_base 6: mod_base = OTHER; note = 2'-O-methylguanosine-3'-phosphate
  modified_base 7: mod_base = OTHER; note = 2'-deoxy-2'-fluoroadenosine-3'-phosphate
  modified_base 8: mod_base = OTHER; note = 2'-O-methyladenosine-3'-phosphate
  modified_base 9: mod_base = OTHER; note = 2'-deoxy-2'-fluoroguanosine-3'-phosphate
  modified_base 10: mod_base = OTHER; note = 2'-deoxy-2'-fluoroadenosine-3'-phosphate
  modified_base 11: mod_base = OTHER; note = 2'-deoxy-2'-fluorocytidine-3'-phosphate
  modified_base 12: mod_base = OTHER; note = 2'-O-methylcytidine-3'-phosphate
  modified_base 13: mod_base = OTHER; note = 2'-O-methyluridine-3'-phosphate
  modified_base 14: mod_base = OTHER; note = 2'-O-methyladenosine-3'-phosphate
  modified_base 15: mod_base = OTHER; note = 2'-O-methylguanosine-3'-phosphate
  modified_base 16: mod_base = OTHER; note = 2'-O-methyladenosine-3'-phosphate
  modified_base 17: mod_base = OTHER; note = 2'-O-methyladenosine-3'-phosphate
  modified_base 18: mod_base = OTHER; note = 2'-O-methylcytidine-3'-phosphate
  modified_base 19: mod_base = OTHER; note = 2'-O-methyladenosine-3'-phosphate
  modified_base 20: mod_base = OTHER; note = 2'-O-methyluridine-3'-phosphate
  modified_base 21: mod_base = OTHER; note = 2'-O-methyluridine-3'-phosphate ((2S,4R)-1-[29-[[2-(acetylamino)-2-deoxy-beta-D-galactopyra nosyl]oxy]-14,14-bis[[3-[[3-[[5-[[2-(acetylamino)-2-deoxy-b eta-D-galactopyranosyl]oxy]-1-oxopentyl]amino]propyl]amino] -3-oxopropoxy]methyl]-1,12,19,25-tetraoxo-16-oxa-13,20,24-t riazanonacos-1-yl]-4-hydroxy-2-pyrrolidinyl)methyl ester
ttcttgaagacctagaacatt

SEQ ID NO: 408 - RNA, 21 nt, synthetic construct
  source 1..21: mol_type = other RNA
  modified_base 1: mod_base = OTHER; note = 2'-O-methyladenosine-3'-phosphorothioate
  modified_base 2: mod_base = OTHER; note = 2'-O-methylcytidine-3'-phosphorothioate
  modified_base 3: mod_base = OTHER; note = 2'-O-methyladenosine-3'-phosphate
  modified_base 4: mod_base = OTHER; note = 2'-O-methyluridine-3'-phosphate
  modified_base 5: mod_base = OTHER; note = 2'-O-methyladenosine-3'-phosphate
  modified_base 6: mod_base = OTHER; note = 2'-O-methylguanosine-3'-phosphate
  modified_base 7: mod_base = OTHER; note = 2'-deoxy-2'-fluoroadenosine-3'-phosphate
  modified_base 8: mod_base = OTHER; note = 2'-O-methyladenosine-3'-phosphate
  modified_base 9: mod_base = OTHER; note = 2'-deoxy-2'-fluoroguanosine-3'-phosphate
  modified_base 10: mod_base = OTHER; note = 2'-deoxy-2'-fluoroadenosine-3'-phosphate
  modified_base 11: mod_base = OTHER; note = 2'-deoxy-2'-fluoroadenosine-3'-phosphate
  modified_base 12: mod_base = OTHER; note = 2'-O-methyluridine-3'-phosphate
  modified_base 13: mod_base = OTHER; note = 2'-O-methylguanosine-3'-phosphate
  modified_base 14: mod_base = OTHER; note = 2'-O-methylcytidine-3'-phosphate
  modified_base 15: mod_base = OTHER; note = 2'-O-methylcytidine-3'-phosphate
  modified_base 16: mod_base = OTHER; note = 2'-O-methyluridine-3'-phosphate
  modified_base 17: mod_base = OTHER; note = 2'-O-methyladenosine-3'-phosphate
  modified_base 18: mod_base = OTHER; note = 2'-O-methylguanosine-3'-phosphate
  modified_base 19: mod_base = OTHER; note = 2'-O-methyluridine-3'-phosphate
  modified_base 20: mod_base = OTHER; note = 2'-O-methyluridine-3'-phosphate
  modified_base 21: mod_base = OTHER; note = 2'-O-methyluridine-3'-phosphate ((2S,4R)-1-[29-[[2-(acetylamino)-2-deoxy-beta-D-galactopyra nosyl]oxy]-14,14-bis[[3-[[3-[[5-[[2-(acetylamino)-2-deoxy-b eta-D-galactopyranosyl]oxy]-1-oxopentyl]amino]propyl]amino] -3-oxopropoxy]methyl]-1,12,19,25-tetraoxo-16-oxa-13,20,24-t riazanonacos-1-yl]-4-hydroxy-2-pyrrolidinyl)methyl ester
acatagaagaatgcctagttt

SEQ ID NO: 409 - RNA, 21 nt, synthetic construct
  source 1..21: mol_type = other RNA
  modified_base 1: mod_base = OTHER; note = 2'-O-methyluridine-3'-phosphorothioate
  modified_base 2: mod_base = OTHER; note = 2'-O-methyladenosine-3'-phosphorothioate
  modified_base 3: mod_base = OTHER; note = 2'-O-methyluridine-3'-phosphate
  modified_base 4: mod_base = OTHER; note = 2'-O-methylguanosine-3'-phosphate
  modified_base 5: mod_base = OTHER; note = 2'-O-methyladenosine-3'-phosphate
  modified_base 6: mod_base = OTHER; note = 2'-O-methylguanosine-3'-phosphate
  modified_base 7: mod_base = OTHER; note = 2'-deoxy-2'-fluorouridine-3'-phosphate
  modified_base 8: mod_base = OTHER; note = 2'-O-methyluridine-3'-phosphate
  modified_base 9: mod_base = OTHER; note = 2'-deoxy-2'-fluorouridine-3'-phosphate
  modified_base 10: mod_base = OTHER; note = 2'-deoxy-2'-fluorouridine-3'-phosphate
  modified_base 11: mod_base = OTHER; note = 2'-deoxy-2'-fluoroadenosine-3'-phosphate
  modified_base 12: mod_base = OTHER; note = 2'-O-methylguanosine-3'-phosphate
  modified_base 13: mod_base = OTHER; note = 2'-O-methylguanosine-3'-phosphate
  modified_base 14: mod_base = OTHER; note = 2'-O-methylcytidine-3'-phosphate
  modified_base 15: mod_base = OTHER; note = 2'-O-methylcytidine-3'-phosphate
  modified_base 16: mod_base = OTHER; note = 2'-O-methyladenosine-3'-phosphate
  modified_base 17: mod_base = OTHER; note = 2'-O-methyladenosine-3'-phosphate
  modified_base 18: mod_base = OTHER; note = 2'-O-methyladenosine-3'-phosphate
  modified_base 19: mod_base = OTHER; note = 2'-O-methyluridine-3'-phosphate
  modified_base 20: mod_base = OTHER; note = 2'-O-methylcytidine-3'-phosphate
  modified_base 21: mod_base = OTHER; note = 2'-O-methyluridine-3'-phosphate ((2S,4R)-1-[29-[[2-(acetylamino)-2-deoxy-beta-D-galactopyra nosyl]oxy]-14,14-bis[[3-[[3-[[5-[[2-(acetylamino)-2-deoxy-b eta-D-galactopyranosyl]oxy]-1-oxopentyl]amino]propyl]amino] -3-oxopropoxy]methyl]-1,12,19,25-tetraoxo-16-oxa-13,20,24-t riazanonacos-1-yl]-4-hydroxy-2-pyrrolidinyl)methyl ester
tatgagttttaggccaaatct

SEQ ID NO: 410 - RNA, 21 nt, synthetic construct
  source 1..21: mol_type = other RNA
  modified_base 1: mod_base = OTHER; note = 2'-O-methyladenosine-3'-phosphorothioate
  modified_base 2: mod_base = OTHER; note = 2'-O-methyladenosine-3'-phosphorothioate
  modified_base 3: mod_base = OTHER; note = 2'-O-methyladenosine-3'-phosphate
  modified_base 4: mod_base = OTHER; note = 2'-O-methyluridine-3'-phosphate
  modified_base 5: mod_base = OTHER; note = 2'-O-methylcytidine-3'-phosphate
  modified_base 6: mod_base = OTHER; note = 2'-O-methyluridine-3'-phosphate
  modified_base 7: mod_base = OTHER; note = 2'-deoxy-2'-fluoroguanosine-3'-phosphate
  modified_base 8: mod_base = OTHER; note = 2'-O-methyladenosine-3'-phosphate
  modified_base 9: mod_base = OTHER; note = 2'-deoxy-2'-fluoroguanosine-3'-phosphate
  modified_base 10: mod_base = OTHER; note = 2'-deoxy-2'-fluoroadenosine-3'-phosphate
  modified_base 11: mod_base = OTHER; note = 2'-deoxy-2'-fluoroadenosine-3'-phosphate
  modified_base 12: mod_base = OTHER; note = 2'-O-methyladenosine-3'-phosphate
  modified_base 13: mod_base = OTHER; note = 2'-O-methyladenosine-3'-phosphate
  modified_base 14: mod_base = OTHER; note = 2'-O-methylguanosine-3'-phosphate
  modified_base 15: mod_base = OTHER; note = 2'-O-methyladenosine-3'-phosphate
  modified_base 16: mod_base = OTHER; note = 2'-O-methyluridine-3'-phosphate
  modified_base 17: mod_base = OTHER; note = 2'-O-methylcytidine-3'-phosphate
  modified_base 18: mod_base = OTHER; note = 2'-O-methyladenosine-3'-phosphate
  modified_base 19: mod_base = OTHER; note = 2'-O-methyladenosine-3'-phosphate
  modified_base 20: mod_base = OTHER; note = 2'-O-methyladenosine-3'-phosphate
  modified_base 21: mod_base = OTHER; note = 2'-O-methyluridine-3'-phosphate ((2S,4R)-1-[29-[[2-(acetylamino)-2-deoxy-beta-D-galactopyra nosyl]oxy]-14,14-bis[[3-[[3-[[5-[[2-(acetylamino)-2-deoxy-b eta-D-galactopyranosyl]oxy]-1-oxopentyl]amino]propyl]amino] -3-oxopropoxy]methyl]-1,12,19,25-tetraoxo-16-oxa-13,20,24-t riazanonacos-1-yl]-4-hydroxy-2-pyrrolidinyl)methyl ester
aaatctgagaaaagatcaaat

SEQ ID NO: 411 - RNA, 21 nt, synthetic construct
  source 1..21: mol_type = other RNA
  modified_base 1: mod_base = OTHER; note = 2'-O-methyluridine-3'-phosphorothioate
  modified_base 2: mod_base = OTHER; note = 2'-O-methyladenosine-3'-phosphorothioate
  modified_base 3: mod_base = OTHER; note = 2'-O-methyladenosine-3'-phosphate
  modified_base 4: mod_base = OTHER; note = 2'-O-methylguanosine-3'-phosphate
  modified_base 5: mod_base = OTHER; note = 2'-O-methylcytidine-3'-phosphate
  modified_base 6: mod_base = OTHER; note = 2'-O-methyladenosine-3'-phosphate
  modified_base 7: mod_base = OTHER; note = 2'-deoxy-2'-fluorouridine-3'-phosphate
  modified_base 8: mod_base = OTHER; note = 2'-O-methyladenosine-3'-phosphate
  modified_base 9: mod_base = OTHER; note = 2'-deoxy-2'-fluorouridine-3'-phosphate
  modified_base 10: mod_base = OTHER; note = 2'-deoxy-2'-fluorocytidine-3'-phosphate
  modified_base 11: mod_base = OTHER; note = 2'-deoxy-2'-fluoroadenosine-3'-phosphate
  modified_base 12: mod_base = OTHER; note = 2'-O-methylguanosine-3'-phosphate
  modified_base 13: mod_base = OTHER; note = 2'-O-methylguanosine-3'-phosphate
  modified_base 14: mod_base = OTHER; note = 2'-O-methyluridine-3'-phosphate
  modified_base 15: mod_base = OTHER; note = 2'-O-methyluridine-3'-phosphate
  modified_base 16: mod_base = OTHER; note = 2'-O-methyladenosine-3'-phosphate
  modified_base 17: mod_base = OTHER; note = 2'-O-methylguanosine-3'-phosphate
  modified_base 18: mod_base = OTHER; note = 2'-O-methyladenosine-3'-phosphate
  modified_base 19: mod_base = OTHER; note = 2'-O-methyladenosine-3'-phosphate
  modified_base 20: mod_base = OTHER; note = 2'-O-methylcytidine-3'-phosphate
  modified_base 21: mod_base = OTHER; note = 2'-O-methyluridine-3'-phosphate ((2S,4R)-1-[29-[[2-(acetylamino)-2-deoxy-beta-D-galactopyra nosyl]oxy]-14,14-bis[[3-[[3-[[5-[[2-(acetylamino)-2-deoxy-b eta-D-galactopyranosyl]oxy]-1-oxopentyl]amino]propyl]amino] -3-oxopropoxy]methyl]-1,12,19,25-tetraoxo-16-oxa-13,20,24-t riazanonacos-1-yl]-4-hydroxy-2-pyrrolidinyl)methyl ester
taagcatatcaggttagaact

SEQ ID NO: 412 - RNA, 21 nt, synthetic construct
  source 1..21: mol_type = other RNA
  modified_base 1: mod_base = OTHER; note = 2'-O-methyladenosine-3'-phosphorothioate
  modified_base 2: mod_base = OTHER; note = 2'-O-methylguanosine-3'-phosphorothioate
  modified_base 3: mod_base = OTHER; note = 2'-O-methyladenosine-3'-phosphate
  modified_base 4: mod_base = OTHER; note = 2'-O-methyladenosine-3'-phosphate
  modified_base 5: mod_base = OTHER; note = 2'-O-methylcytidine-3'-phosphate
  modified_base 6: mod_base = OTHER; note = 2'-O-methyluridine-3'-phosphate
  modified_base 7: mod_base = OTHER; note = 2'-deoxy-2'-fluorocytidine-3'-phosphate
  modified_base 8: mod_base = OTHER; note = 2'-O-methyluridine-3'-phosphate
  modified_base 9: mod_base = OTHER; note = 2'-deoxy-2'-fluorocytidine-3'-phosphate
  modified_base 10: mod_base = OTHER; note = 2'-deoxy-2'-fluoroadenosine-3'-phosphate
  modified_base 11: mod_base = OTHER; note = 2'-deoxy-2'-fluorouridine-3'-phosphate
  modified_base 12: mod_base = OTHER; note = 2'-O-methylcytidine-3'-phosphate
  modified_base 13: mod_base = OTHER; note = 2'-O-methyladenosine-3'-phosphate
  modified_base 14: mod_base = OTHER; note = 2'-O-methylcytidine-3'-phosphate
  modified_base 15: mod_base = OTHER; note = 2'-O-methyladenosine-3'-phosphate
  modified_base 16: mod_base = OTHER; note = 2'-O-methyluridine-3'-phosphate
  modified_base 17: mod_base = OTHER; note = 2'-O-methylguanosine-3'-phosphate
  modified_base 18: mod_base = OTHER; note = 2'-O-methyluridine-3'-phosphate
  modified_base 19: mod_base = OTHER; note = 2'-O-methyluridine-3'-phosphate
  modified_base 20: mod_base = OTHER; note = 2'-O-methylcytidine-3'-phosphate
  modified_base 21: mod_base = OTHER; note = 2'-O-methyluridine-3'-phosphate ((2S,4R)-1-[29-[[2-(acetylamino)-2-deoxy-beta-D-galactopyra nosyl]oxy]-14,14-bis[[3-[[3-[[5-[[2-(acetylamino)-2-deoxy-b eta-D-galactopyranosyl]oxy]-1-oxopentyl]amino]propyl]amino] -3-oxopropoxy]methyl]-1,12,19,25-tetraoxo-16-oxa-13,20,24-t riazanonacos-1-yl]-4-hydroxy-2-pyrrolidinyl)methyl ester
agaactctcatcacatgttct

SEQ ID NO: 413 - RNA, 21 nt, synthetic construct
  source 1..21: mol_type = other RNA
  modified_base 1: mod_base = OTHER; note = 2'-O-methyluridine-3'-phosphorothioate
  modified_base 2: mod_base = OTHER; note = 2'-O-methylguanosine-3'-phosphorothioate
  modified_base 3: mod_base = OTHER; note = 2'-O-methylguanosine-3'-phosphate
  modified_base 4: mod_base = OTHER; note = 2'-O-methyladenosine-3'-phosphate
  modified_base 5: mod_base = OTHER; note = 2'-O-methylguanosine-3'-phosphate
  modified_base 6: mod_base = OTHER; note = 2'-O-methylcytidine-3'-phosphate
  modified_base 7: mod_base = OTHER; note = 2'-deoxy-2'-fluoroadenosine-3'-phosphate
  modified_base 8: mod_base = OTHER; note = 2'-O-methyladenosine-3'-phosphate
  modified_base 9: mod_base = OTHER; note = 2'-deoxy-2'-fluoroadenosine-3'-phosphate
  modified_base 10: mod_base = OTHER; note = 2'-deoxy-2'-fluoroadenosine-3'-phosphate
  modified_base 11: mod_base = OTHER; note = 2'-deoxy-2'-fluoroguanosine-3'-phosphate
  modified_base 12: mod_base = OTHER; note = 2'-O-methyladenosine-3'-phosphate
  modified_base 13: mod_base = OTHER; note = 2'-O-methylguanosine-3'-phosphate
  modified_base 14: mod_base = OTHER; note = 2'-O-methyluridine-3'-phosphate
  modified_base 15: mod_base = OTHER; note = 2'-O-methyladenosine-3'-phosphate
  modified_base 16: mod_base = OTHER; note = 2'-O-methyladenosine-3'-phosphate
  modified_base 17: mod_base = OTHER; note = 2'-O-methyladenosine-3'-phosphate
  modified_base 18: mod_base = OTHER; note = 2'-O-methyluridine-3'-phosphate
  modified_base 19: mod_base = OTHER; note = 2'-O-methyladenosine-3'-phosphate
  modified_base 20: mod_base = OTHER; note = 2'-O-methyladenosine-3'-phosphate
  modified_base 21: mod_base = OTHER; note = 2'-O-methyluridine-3'-phosphate ((2S,4R)-1-[29-[[2-(acetylamino)-2-deoxy-beta-D-galactopyra nosyl]oxy]-14,14-bis[[3-[[3-[[5-[[2-(acetylamino)-2-deoxy-b eta-D-galactopyranosyl]oxy]-1-oxopentyl]amino]propyl]amino] -3-oxopropoxy]methyl]-1,12,19,25-tetraoxo-16-oxa-13,20,24-t riazanonacos-1-yl]-4-hydroxy-2-pyrrolidinyl)methyl ester
tggagcaaaagagtaaataat

SEQ ID NO: 414 - RNA, 23 nt, synthetic construct
  source 1..23: mol_type = other RNA
  modified_base 1: mod_base = OTHER; note = 2'-O-methyladenosine-3'-phosphorothioate
  modified_base 2: mod_base = OTHER; note = 2'-deoxy-2'-fluoroadenosine-3'-phosphorothioate
  modified_base 3: mod_base = OTHER; note = 2'-O-methyladenosine-3'-phosphate
  modified_base 4: mod_base = OTHER; note = 2'-O-methyluridine-3'-phosphate
  modified_base 5: mod_base = OTHER; note = 2'-O-methylcytidine-3'-phosphate
  modified_base 6: mod_base = OTHER; note = 2'-deoxy-2'-fluorocytidine-3'-phosphate
  modified_base 7: mod_base = OTHER; note = 2'-O-methylcytidine-3'-phosphate
  modified_base 8: mod_base = OTHER; note = 2'-deoxy-2'-fluoroadenosine-3'-phosphate
  modified_base 9: mod_base = OTHER; note = 2'-deoxy-2'-fluoroguanosine-3'-phosphate
  modified_base 10: mod_base = OTHER; note = 2'-O-methylguanosine-3'-phosphate
  modified_base 11: mod_base = OTHER; note = 2'-O-methyladenosine-3'-phosphate
  modified_base 12: mod_base = OTHER; note = 2'-O-methyluridine-3'-phosphate
  modified_base 13: mod_base = OTHER; note = 2'-O-methylguanosine-3'-phosphate
  modified_base 14: mod_base = OTHER; note = 2'-deoxy-2'-fluorouridine-3'-phosphate
  modified_base 15: mod_base = OTHER; note = 2'-O-methyluridine-3'-phosphate
  modified_base 16: mod_base = OTHER; note = 2'-deoxy-2'-fluoroguanosine-3'-phosphate
  modified_base 17: mod_base = OTHER; note = 2'-O-methyluridine-3'-phosphate
  modified_base 18: mod_base = OTHER; note = 2'-O-methyluridine-3'-phosphate
  modified_base 19: mod_base = OTHER; note = 2'-O-methylguanosine-3'-phosphate
  modified_base 20: mod_base = OTHER; note = 2'-O-methyladenosine-3'-phosphate
  modified_base 21: mod_base = OTHER; note = 2'-O-methylcytidine-3'-phosphorothioate
  modified_base 22: mod_base = OTHER; note = 2'-O-methyluridine-3'-phosphorothioate
  modified_base 23: mod_base = OTHER; note = 2'-O-methyluridine
aaatcccaggatgttgttgactt

SEQ ID NO: 415 - RNA, 23 nt, synthetic construct
  source 1..23: mol_type = other RNA
  modified_base 1: mod_base = OTHER; note = 2'-O-methyladenosine-3'-phosphorothioate
  modified_base 2: mod_base = OTHER; note = 2'-deoxy-2'-fluorocytidine-3'-phosphorothioate
  modified_base 3: mod_base = OTHER; note = 2'-O-methylcytidine-3'-phosphate
  modified_base 4: mod_base = OTHER; note = 2'-O-methyluridine-3'-phosphate
  modified_base 5: mod_base = OTHER; note = 2'-O-methylguanosine-3'-phosphate
  modified_base 6: mod_base = OTHER; note = 2'-deoxy-2'-fluoroadenosine-3'-phosphate
  modified_base 7: mod_base = OTHER; note = 2'-O-methyluridine-3'-phosphate
  modified_base 8: mod_base = OTHER; note = 2'-deoxy-2'-fluorouridine-3'-phosphate
  modified_base 9: mod_base = OTHER; note = 2'-deoxy-2'-fluorouridine-3'-phosphate
  modified_base 10: mod_base = OTHER; note = 2'-O-methylcytidine-3'-phosphate
  modified_base 11: mod_base = OTHER; note = 2'-O-methyladenosine-3'-phosphate
  modified_base 12: mod_base = OTHER; note = 2'-O-methylguanosine-3'-phosphate
  modified_base 13: mod_base = OTHER; note = 2'-O-methyladenosine-3'-phosphate
  modified_base 14: mod_base = OTHER; note = 2'-deoxy-2'-fluoroadenosine-3'-phosphate
  modified_base 15: mod_base = OTHER; note = 2'-O-methyladenosine-3'-phosphate
  modified_base 16: mod_base = OTHER; note = 2'-deoxy-2'-fluorouridine-3'-phosphate
  modified_base 17: mod_base = OTHER; note = 2'-O-methyladenosine-3'-phosphate
  modified_base 18: mod_base = OTHER; note = 2'-O-methyladenosine-3'-phosphate
  modified_base 19: mod_base = OTHER; note = 2'-O-methyladenosine-3'-phosphate
  modified_base 20: mod_base = OTHER; note = 2'-O-methyladenosine-3'-phosphate
  modified_base 21: mod_base = OTHER; note = 2'-O-methylguanosine-3'-phosphorothioate
  modified_base 22: mod_base = OTHER; note = 2'-O-methyladenosine-3'-phosphorothioate
  modified_base 23: mod_base = OTHER; note = 2'-O-methyladenosine
acctgatttcagaaataaaagaa

SEQ ID NO: 416 - RNA, 23 nt, synthetic construct
  source 1..23: mol_type = other RNA
  modified_base 1: mod_base = OTHER; note = 2'-O-methyladenosine-3'-phosphorothioate
  modified_base 2: mod_base = OTHER; note = 2'-deoxy-2'-fluorouridine-3'-phosphorothioate
  modified_base 3: mod_base = OTHER; note = 2'-O-methylguanosine-3'-phosphate
  modified_base 4: mod_base = OTHER; note = 2'-O-methylguanosine-3'-phosphate
  modified_base 5: mod_base = OTHER; note = 2'-O-methylguanosine-3'-phosphate
  modified_base 6: mod_base = OTHER; note = 2'-deoxy-2'-fluorouridine-3'-phosphate
  modified_base 7: mod_base = OTHER; note = 2'-O-methyladenosine-3'-phosphate
  modified_base 8: mod_base = OTHER; note = 2'-deoxy-2'-fluorouridine-3'-phosphate
  modified_base 9: mod_base = OTHER; note = 2'-deoxy-2'-fluorouridine-3'-phosphate
  modified_base 10: mod_base = OTHER; note = 2'-O-methylcytidine-3'-phosphate
  modified_base 11: mod_base = OTHER; note = 2'-O-methyladenosine-3'-phosphate
  modified_base 12: mod_base = OTHER; note = 2'-O-methylcytidine-3'-phosphate
  modified_base 13: mod_base = OTHER; note = 2'-O-methyladenosine-3'-phosphate
  modified_base 14: mod_base = OTHER; note = 2'-deoxy-2'-fluorouridine-3'-phosphate
  modified_base 15: mod_base = OTHER; note = 2'-O-methyladenosine-3'-phosphate
  modified_base 16: mod_base = OTHER; note = 2'-deoxy-2'-fluoroguanosine-3'-phosphate
  modified_base 17: mod_base = OTHER; note = 2'-O-methyluridine-3'-phosphate
  modified_base 18: mod_base = OTHER; note = 2'-O-methylcytidine-3'-phosphate
  modified_base 19: mod_base = OTHER; note = 2'-O-methyladenosine-3'-phosphate
  modified_base 20: mod_base = OTHER; note = 2'-O-methyluridine-3'-phosphate
  modified_base 21: mod_base = OTHER; note = 2'-O-methylcytidine-3'-phosphorothioate
  modified_base 22: mod_base = OTHER; note = 2'-O-methylcytidine-3'-phosphorothioate
  modified_base 23: mod_base = OTHER; note = 2'-O-methyladenosine
atgggtattcacatagtcatcca

SEQ ID NO: 417 - RNA, 23 nt, synthetic construct
  source 1..23: mol_type = other RNA
  modified_base 1: mod_base = OTHER; note = 2'-O-methyladenosine-3'-phosphorothioate
  modified_base 2: mod_base = OTHER; note = 2'-deoxy-2'-fluorouridine-3'-phosphorothioate
  modified_base 3: mod_base = OTHER; note = 2'-O-methyluridine-3'-phosphate
  modified_base 4: mod_base = OTHER; note = 2'-O-methyladenosine-3'-phosphate
  modified_base 5: mod_base = OTHER; note = 2'-O-methylguanosine-3'-phosphate
  modified_base 6: mod_base = OTHER; note = 2'-deoxy-2'-fluorouridine-3'-phosphate
  modified_base 7: mod_base = OTHER; note = 2'-O-methylguanosine-3'-phosphate
  modified_base 8: mod_base = OTHER; note = 2'-deoxy-2'-fluoroadenosine-3'-phosphate
  modified_base 9: mod_base = OTHER; note = 2'-deoxy-2'-fluorocytidine-3'-phosphate
  modified_base 10: mod_base = OTHER; note = 2'-O-methyladenosine-3'-phosphate
  modified_base 11: mod_base = OTHER; note = 2'-O-methylcytidine-3'-phosphate
  modified_base 12: mod_base = OTHER; note = 2'-O-methyluridine-3'-phosphate
  modified_base 13: mod_base = OTHER; note = 2'-O-methylguanosine-3'-phosphate
  modified_base 14: mod_base = OTHER; note = 2'-deoxy-2'-fluoroadenosine-3'-phosphate
  modified_base 15: mod_base = OTHER; note = 2'-O-methyladenosine-3'-phosphate
  modified_base 16: mod_base = OTHER; note = 2'-deoxy-2'-fluorocytidine-3'-phosphate
  modified_base 17: mod_base = OTHER; note = 2'-O-methyladenosine-3'-phosphate
  modified_base 18: mod_base = OTHER; note = 2'-O-methylguanosine-3'-phosphate
  modified_base 19: mod_base = OTHER; note = 2'-O-methyluridine-3'-phosphate
  modified_base 20: mod_base = OTHER; note = 2'-O-methylguanosine-3'-phosphate
  modified_base 21: mod_base = OTHER; note = 2'-O-methyladenosine-3'-phosphorothioate
  modified_base 22: mod_base = OTHER; note = 2'-O-methyladenosine-3'-phosphorothioate
  modified_base 23: mod_base = OTHER; note = 2'-O-methylguanosine
attagtgacactgaacagtgaag

SEQ ID NO: 418 - RNA, 23 nt, synthetic construct
  source 1..23: mol_type = other RNA
  modified_base 1: mod_base = OTHER; note = 2'-O-methyladenosine-3'-phosphorothioate
  modified_base 2: mod_base = OTHER; note = 2'-deoxy-2'-fluoroadenosine-3'-phosphorothioate
  modified_base 3: mod_base = OTHER; note = 2'-O-methyluridine-3'-phosphate
  modified_base 4: mod_base = OTHER; note = 2'-O-methyluridine-3'-phosphate
  modified_base 5: mod_base = OTHER; note = 2'-O-methylcytidine-3'-phosphate
  modified_base 6: mod_base = OTHER; note = 2'-deoxy-2'-fluorouridine-3'-phosphate
  modified_base 7: mod_base = OTHER; note = 2'-O-methyluridine-3'-phosphate
  modified_base 8: mod_base = OTHER; note = 2'-deoxy-2'-fluorocytidine-3'-phosphate
  modified_base 9: mod_base = OTHER; note = 2'-deoxy-2'-fluorouridine-3'-phosphate
  modified_base 10: mod_base = OTHER; note = 2'-O-methyladenosine-3'-phosphate
  modified_base 11: mod_base = OTHER; note = 2'-O-methyluridine-3'-phosphate
  modified_base 12: mod_base = OTHER; note = 2'-O-methyladenosine-3'-phosphate
  modified_base 13: mod_base = OTHER; note = 2'-O-methylcytidine-3'-phosphate
  modified_base 14: mod_base = OTHER; note = 2'-deoxy-2'-fluorouridine-3'-phosphate
  modified_base 15: mod_base = OTHER; note = 2'-O-methyluridine-3'-phosphate
  modified_base 16: mod_base = OTHER; note = 2'-deoxy-2'-fluorocytidine-3'-phosphate
  modified_base 17: mod_base = OTHER; note = 2'-O-methylcytidine-3'-phosphate
  modified_base 18: mod_base = OTHER; note = 2'-O-methyluridine-3'-phosphate
  modified_base 19: mod_base = OTHER; note = 2'-O-methylguanosine-3'-phosphate
  modified_base 20: mod_base = OTHER; note = 2'-O-methylcytidine-3'-phosphate
  modified_base 21: mod_base = OTHER; note = 2'-O-methyluridine-3'-phosphorothioate
  modified_base 22: mod_base = OTHER; note = 2'-O-methylcytidine-3'-phosphorothioate
  modified_base 23: mod_base = OTHER; note = 2'-O-methylcytidine
aattcttctatacttcctgctcc

SEQ ID NO: 419 - RNA, 23 nt, synthetic construct
  source 1..23: mol_type = other RNA
  modified_base 1: mod_base = OTHER; note = 2'-O-methyladenosine-3'-phosphorothioate
  modified_base 2: mod_base = OTHER; note = 2'-deoxy-2'-fluorocytidine-3'-phosphorothioate
  modified_base 3: mod_base = OTHER; note = 2'-O-methyluridine-3'-phosphate
  modified_base 4: mod_base = OTHER; note = 2'-O-methylcytidine-3'-phosphate
  modified_base 5: mod_base = OTHER; note = 2'-O-methyladenosine-3'-phosphate
  modified_base 6: mod_base = OTHER; note = 2'-deoxy-2'-fluorocytidine-3'-phosphate
  modified_base 7: mod_base = OTHER; note = 2'-O-methyladenosine-3'-phosphate
  modified_base 8: mod_base = OTHER; note = 2'-deoxy-2'-fluorouridine-3'-phosphate
  modified_base 9: mod_base = OTHER; note = 2'-deoxy-2'-fluorouridine-3'-phosphate
  modified_base 10: mod_base = OTHER; note = 2'-O-methyluridine-3'-phosphate
  modified_base 11: mod_base = OTHER; note = 2'-O-methyluridine-3'-phosphate
  modified_base 12: mod_base = OTHER; note = 2'-O-methylguanosine-3'-phosphate
  modified_base 13: mod_base = OTHER; note = 2'-O-methylcytidine-3'-phosphate
  modified_base 14: mod_base = OTHER; note = 2'-deoxy-2'-fluorouridine-3'-phosphate
  modified_base 15: mod_base = OTHER; note = 2'-O-methylguanosine-3'-phosphate
  modified_base 16: mod_base = OTHER; note = 2'-deoxy-2'-fluorocytidine-3'-phosphate
  modified_base 17: mod_base = OTHER; note = 2'-O-methyladenosine-3'-phosphate
  modified_base 18: mod_base = OTHER; note = 2'-O-methylcytidine-3'-phosphate
  modified_base 19: mod_base = OTHER; note = 2'-O-methyladenosine-3'-phosphate
  modified_base 20: mod_base = OTHER; note = 2'-O-methyluridine-3'-phosphate
  modified_base 21: mod_base = OTHER; note = 2'-O-methyluridine-3'-phosphorothioate
  modified_base 22: mod_base = OTHER; note = 2'-O-methylcytidine-3'-phosphorothioate
  modified_base 23: mod_base = OTHER; note = 2'-O-methyluridine
actcacattttgctgcacattct

SEQ ID NO: 420 - RNA, 23 nt, synthetic construct
  source 1..23: mol_type = other RNA
  modified_base 1: mod_base = OTHER; note = 2'-O-methyladenosine-3'-phosphorothioate
  modified_base 2: mod_base = OTHER; note = 2'-deoxy-2'-fluoroadenosine-3'-phosphorothioate
  modified_base 3: mod_base = OTHER; note = 2'-O-methylguanosine-3'-phosphate
  modified_base 4: mod_base = OTHER; note = 2'-O-methylguanosine-3'-phosphate
  modified_base 5: mod_base = OTHER; note = 2'-O-methyluridine-3'-phosphate
  modified_base 6: mod_base = OTHER; note = 2'-deoxy-2'-fluoroguanosine-3'-phosphate
  modified_base 7: mod_base = OTHER; note = 2'-O-methyladenosine-3'-phosphate
  modified_base 8: mod_base = OTHER; note = 2'-deoxy-2'-fluoroadenosine-3'-phosphate
  modified_base 9: mod_base = OTHER; note = 2'-deoxy-2'-fluorouridine-3'-phosphate
  modified_base 10: mod_base = OTHER; note = 2'-O-methyluridine-3'-phosphate
  modified_base 11: mod_base = OTHER; note = 2'-O-methylcytidine-3'-phosphate
  modified_base 12: mod_base = OTHER; note = 2'-O-methyluridine-3'-phosphate
  modified_base 13: mod_base = OTHER; note = 2'-O-methyluridine-3'-phosphate
  modified_base 14: mod_base = OTHER; note = 2'-deoxy-2'-fluorocytidine-3'-phosphate
  modified_base 15: mod_base = OTHER; note = 2'-O-methylguanosine-3'-phosphate
  modified_base 16: mod_base = OTHER; note = 2'-deoxy-2'-fluorouridine-3'-phosphate
  modified_base 17: mod_base = OTHER; note = 2'-O-methylcytidine-3'-phosphate
  modified_base 18: mod_base = OTHER; note = 2'-O-methylcytidine-3'-phosphate
  modified_base 19: mod_base = OTHER; note = 2'-O-methyluridine-3'-phosphate
  modified_base 20: mod_base = OTHER; note = 2'-O-methylcytidine-3'-phosphate
  modified_base 21: mod_base = OTHER; note = 2'-O-methylcytidine-3'-phosphorothioate
  modified_base 22: mod_base = OTHER; note = 2'-O-methyluridine-3'-phosphorothioate
  modified_base 23: mod_base = OTHER; note = 2'-O-methylcytidine
aaggtgaattcttcgtcctcctc

SEQ ID NO: 421 - RNA, 23 nt, synthetic construct
  source 1..23: mol_type = other RNA
  modified_base 1: mod_base = OTHER; note = 2'-O-methyladenosine-3'-phosphorothioate
  modified_base 2: mod_base = OTHER; note = 2'-deoxy-2'-fluorouridine-3'-phosphorothioate
  modified_base 3: mod_base = OTHER; note = 2'-O-methyluridine-3'-phosphate
  modified_base 4: mod_base = OTHER; note = 2'-O-methyluridine-3'-phosphate
  modified_base 5: mod_base = OTHER; note = 2'-O-methyladenosine-3'-phosphate
  modified_base 6: mod_base = OTHER; note = 2'-deoxy-2'-fluorocytidine-3'-phosphate
  modified_base 7: mod_base = OTHER; note = 2'-O-methyluridine-3'-phosphate
  modified_base 8: mod_base = OTHER; note = 2'-deoxy-2'-fluoroguanosine-3'-phosphate
  modified_base 9: mod_base = OTHER; note = 2'-deoxy-2'-fluorouridine-3'-phosphate
  modified_base 10: mod_base = OTHER; note = 2'-O-methylguanosine-3'-phosphate
  modified_base 11: mod_base = OTHER; note = 2'-O-methyladenosine-3'-phosphate
  modified_base 12: mod_base = OTHER; note = 2'-O-methyluridine-3'-phosphate
  modified_base 13: mod_base = OTHER; note = 2'-O-methyladenosine-3'-phosphate
  modified_base 14: mod_base = OTHER; note = 2'-deoxy-2'-fluorouridine-3'-phosphate
  modified_base 15: mod_base = OTHER; note = 2'-O-methyluridine-3'-phosphate
  modified_base 16: mod_base = OTHER; note = 2'-deoxy-2'-fluoroguanosine-3'-phosphate
  modified_base 17: mod_base = OTHER; note = 2'-O-methylguanosine-3'-phosphate
  modified_base 18: mod_base = OTHER; note = 2'-O-methyladenosine-3'-phosphate
  modified_base 19: mod_base = OTHER; note = 2'-O-methyladenosine-3'-phosphate
  modified_base 20: mod_base = OTHER; note = 2'-O-methyluridine-3'-phosphate
  modified_base 21: mod_base = OTHER; note = 2'-O-methylguanosine-3'-phosphorothioate
  modified_base 22: mod_base = OTHER; note = 2'-O-methylcytidine-3'-phosphorothioate
  modified_base 23: mod_base = OTHER; note = 2'-O-methylcytidine
atttactgtgatattggaatgcc

SEQ ID NO: 422 - RNA, 23 nt, synthetic construct
  source 1..23: mol_type = other RNA
  modified_base 1: mod_base = OTHER; note = 2'-O-methyladenosine-3'-phosphorothioate
  modified_base 2: mod_base = OTHER; note = 2'-deoxy-2'-fluoroadenosine-3'-phosphorothioate
  modified_base 3: mod_base = OTHER; note = 2'-O-methyluridine-3'-phosphate
  modified_base 4: mod_base = OTHER; note = 2'-O-methyluridine-3'-phosphate
  modified_base 5: mod_base = OTHER; note = 2'-O-methyladenosine-3'-phosphate
  modified_base 6: mod_base = OTHER; note = 2'-deoxy-2'-fluorouridine-3'-phosphate
  modified_base 7: mod_base = OTHER; note = 2'-O-methylcytidine-3'-phosphate
  modified_base 8: mod_base = OTHER; note = 2'-deoxy-2'-fluoroadenosine-3'-phosphate
  modified_base 9: mod_base = OTHER; note = 2'-deoxy-2'-fluorocytidine-3'-phosphate
  modified_base 10: mod_base = OTHER; note = 2'-O-methyladenosine-3'-phosphate
  modified_base 11: mod_base = OTHER; note = 2'-O-methylcytidine-3'-phosphate
  modified_base 12: mod_base = OTHER; note = 2'-O-methyladenosine-3'-phosphate
  modified_base 13: mod_base = OTHER; note = 2'-O-methyluridine-3'-phosphate
  modified_base 14: mod_base = OTHER; note = 2'-deoxy-2'-fluorouridine-3'-phosphate
  modified_base 15: mod_base = OTHER; note = 2'-O-methylguanosine-3'-phosphate
  modified_base 16: mod_base = OTHER; note = 2'-deoxy-2'-fluorouridine-3'-phosphate
  modified_base 17: mod_base = OTHER; note = 2'-O-methyluridine-3'-phosphate
  modified_base 18: mod_base = OTHER; note = 2'-O-methylguanosine-3'-phosphate
  modified_base 19: mod_base = OTHER; note = 2'-O-methylcytidine-3'-phosphate
  modified_base 20: mod_base = OTHER; note = 2'-O-methyluridine-3'-phosphate
  modified_base 21: mod_base = OTHER; note = 2'-O-methylcytidine-3'-phosphorothioate
  modified_base 22: mod_base = OTHER; note = 2'-O-methyluridine-3'-phosphorothioate
  modified_base 23: mod_base = OTHER; note = 2'-O-methyluridine
aattatcacacattgttgctctt

SEQ ID NO: 423 - RNA, 23 nt, synthetic construct
  source 1..23: mol_type = other RNA
  modified_base 1: mod_base = OTHER; note = 2'-O-methyladenosine-3'-phosphorothioate
  modified_base 2: mod_base = OTHER; note = 2'-deoxy-2'-fluoroadenosine-3'-phosphorothioate
  modified_base 3: mod_base = OTHER; note = 2'-O-methylguanosine-3'-phosphate
  modified_base 4: mod_base = OTHER; note = 2'-O-methylguanosine-3'-phosphate
  modified_base 5: mod_base = OTHER; note = 2'-O-methyladenosine-3'-phosphate
  modified_base 6: mod_base = OTHER; note = 2'-deoxy-2'-fluorocytidine-3'-phosphate
  modified_base 7: mod_base = OTHER; note = 2'-O-methyluridine-3'-phosphate
  modified_base 8: mod_base = OTHER; note = 2'-deoxy-2'-fluorouridine-3'-phosphate
  modified_base 9: mod_base = OTHER; note = 2'-deoxy-2'-fluorocytidine-3'-phosphate
  modified_base 10: mod_base = OTHER; note = 2'-O-methylcytidine-3'-phosphate
  modified_base 11: mod_base = OTHER; note = 2'-O-methyluridine-3'-phosphate
  modified_base 12: mod_base = OTHER; note = 2'-O-methylguanosine-3'-phosphate
  modified_base 13: mod_base = OTHER; note = 2'-O-methyluridine-3'-phosphate
  modified_base 14: mod_base = OTHER; note = 2'-deoxy-2'-fluorouridine-3'-phosphate
  modified_base 15: mod_base = OTHER; note = 2'-O-methyluridine-3'-phosphate
  modified_base 16: mod_base = OTHER; note = 2'-deoxy-2'-fluorouridine-3'-phosphate
  modified_base 17: mod_base = OTHER; note = 2'-O-methylcytidine-3'-phosphate
  modified_base 18: mod_base = OTHER; note = 2'-O-methyladenosine-3'-phosphate
  modified_base 19: mod_base = OTHER; note = 2'-O-methylguanosine-3'-phosphate
  modified_base 20: mod_base = OTHER; note = 2'-O-methylcytidine-3'-phosphate
  modified_base 21: mod_base = OTHER; note = 2'-O-methylcytidine-3'-phosphorothioate
  modified_base 22: mod_base = OTHER; note = 2'-O-methyladenosine-3'-phosphorothioate
  modified_base 23: mod_base = OTHER; note = 2'-O-methyluridine
aaggacttcctgttttcagccat

SEQ ID NO: 424 - RNA, 23 nt, synthetic construct
  source 1..23: mol_type = other RNA
  modified_base 1: mod_base = OTHER; note = 2'-O-methyladenosine-3'-phosphorothioate
  modified_base 2: mod_base = OTHER; note = 2'-deoxy-2'-fluoroadenosine-3'-phosphorothioate
  modified_base 3: mod_base = OTHER; note = 2'-O-methyluridine-3'-phosphate
  modified_base 4: mod_base = OTHER; note = 2'-O-methylcytidine-3'-phosphate
  modified_base 5: mod_base = OTHER; note = 2'-O-methylcytidine-3'-phosphate
  modified_base 6: mod_base = OTHER; note = 2'-deoxy-2'-fluorouridine-3'-phosphate
  modified_base 7: mod_base = OTHER; note = 2'-O-methyladenosine-3'-phosphate
  modified_base 8: mod_base = OTHER; note = 2'-deoxy-2'-fluoroadenosine-3'-phosphate
  modified_base 9: mod_base = OTHER; note = 2'-deoxy-2'-fluorouridine-3'-phosphate
  modified_base 10: mod_base = OTHER; note = 2'-O-methylguanosine-3'-phosphate
  modified_base 11: mod_base = OTHER; note = 2'-O-methyladenosine-3'-phosphate
  modified_base 12: mod_base = OTHER; note = 2'-O-methyluridine-3'-phosphate
  modified_base 13: mod_base = OTHER; note = 2'-O-methyluridine-3'-phosphate
  modified_base 14: mod_base = OTHER; note = 2'-deoxy-2'-fluoroadenosine-3'-phosphate
  modified_base 15: mod_base = OTHER; note = 2'-O-methyluridine-3'-phosphate
  modified_base 16: mod_base = OTHER; note = 2'-deoxy-2'-fluoroguanosine-3'-phosphate
  modified_base 17: mod_base = OTHER; note = 2'-O-methylguanosine-3'-phosphate
  modified_base 18: mod_base = OTHER; note = 2'-O-methyladenosine-3'-phosphate
  modified_base 19: mod_base = OTHER; note = 2'-O-methylguanosine-3'-phosphate
  modified_base 20: mod_base = OTHER; note = 2'-O-methylguanosine-3'-phosphate
  modified_base 21: mod_base = OTHER; note = 2'-O-methyladenosine-3'-phosphorothioate
  modified_base 22: mod_base = OTHER; note = 2'-O-methylcytidine-3'-phosphorothioate
  modified_base 23: mod_base = OTHER; note = 2'-O-methyluridine
aatcctaatgattatggaggact

SEQ ID NO: 425 - RNA, 23 nt, synthetic construct
  source 1..23: mol_type = other RNA
  modified_base 1: mod_base = OTHER; note = 2'-O-methyladenosine-3'-phosphorothioate
  modified_base 2: mod_base = OTHER; note = 2'-deoxy-2'-fluorocytidine-3'-phosphorothioate
  modified_base 3: mod_base = OTHER; note = 2'-O-methyladenosine-3'-phosphate
  modified_base 4: mod_base = OTHER; note = 2'-O-methyladenosine-3'-phosphate
  modified_base 5: mod_base = OTHER; note = 2'-O-methyladenosine-3'-phosphate
  modified_base 6: mod_base = OTHER; note = 2'-deoxy-2'-fluorouridine-3'-phosphate
  modified_base 7: mod_base = OTHER; note = 2'-O-methyladenosine-3'-phosphate
  modified_base 8: mod_base = OTHER; note = 2'-deoxy-2'-fluoroadenosine-3'-phosphate
  modified_base 9: mod_base = OTHER; note = 2'-deoxy-2'-fluoroadenosine-3'-phosphate
  modified_base 10: mod_base = OTHER; note = 2'-O-methyladenosine-3'-phosphate
  modified_base 11: mod_base = OTHER; note = 2'-O-methylcytidine-3'-phosphate
  modified_base 12: mod_base = OTHER; note = 2'-O-methyluridine-3'-phosphate
  modified_base 13: mod_base = OTHER; note = 2'-O-methyladenosine-3'-phosphate
  modified_base 14: mod_base = OTHER; note = 2'-deoxy-2'-fluorocytidine-3'-phosphate
  modified_base 15: mod_base = OTHER; note = 2'-O-methyladenosine-3'-phosphate
  modified_base 16: mod_base = OTHER; note = 2'-deoxy-2'-fluorouridine-3'-phosphate
  modified_base 17: mod_base = OTHER; note = 2'-O-methylcytidine-3'-phosphate
  modified_base 18: mod_base = OTHER; note = 2'-O-methyluridine-3'-phosphate
  modified_base 19: mod_base = OTHER; note = 2'-O-methylcytidine-3'-phosphate
  modified_base 20: mod_base = OTHER; note = 2'-O-methyluridine-3'-phosphate
  modified_base 21: mod_base = OTHER; note = 2'-O-methylcytidine-3'-phosphorothioate
  modified_base 22: mod_base = OTHER; note = 2'-O-methyladenosine-3'-phosphorothioate
  modified_base 23: mod_base = OTHER; note = 2'-O-methyluridine
acaaataaaactacatctctcat

SEQ ID NO: 426 - RNA, 23 nt, synthetic construct
  source 1..23: mol_type = other RNA
  modified_base 1: mod_base = OTHER; note = 2'-O-methyladenosine-3'-phosphorothioate
  modified_base 2: mod_base = OTHER; note = 2'-deoxy-2'-fluorouridine-3'-phosphorothioate
  modified_base 3: mod_base = OTHER; note = 2'-O-methylcytidine-3'-phosphate
  modified_base 4: mod_base = OTHER; note = 2'-O-methyluridine-3'-phosphate
  modified_base 5: mod_base = OTHER; note = 2'-O-methyluridine-3'-phosphate
  modified_base 6: mod_base = OTHER; note = 2'-deoxy-2'-fluoroguanosine-3'-phosphate
  modified_base 7: mod_base = OTHER; note = 2'-O-methylcytidine-3'-phosphate
  modified_base 8: mod_base = OTHER; note = 2'-deoxy-2'-fluoroadenosine-3'-phosphate
  modified_base 9: mod_base = OTHER; note = 2'-deoxy-2'-fluorocytidine-3'-phosphate
  modified_base 10: mod_base = OTHER; note = 2'-O-methyluridine-3'-phosphate
  modified_base 11: mod_base = OTHER; note = 2'-O-methylcytidine-3'-phosphate
  modified_base 12: mod_base = OTHER; note = 2'-O-methyluridine-3'-phosphate
  modified_base 13: mod_base = OTHER; note = 2'-O-methylguanosine-3'-phosphate
  modified_base 14: mod_base = OTHER; note = 2'-deoxy-2'-fluoroadenosine-3'-phosphate
  modified_base 15: mod_base = OTHER; note = 2'-O-methylguanosine-3'-phosphate
  modified_base 16: mod_base = OTHER; note = 2'-deoxy-2'-fluoroadenosine-3'-phosphate
  modified_base 17: mod_base = OTHER; note = 2'-O-methylguanosine-3'-phosphate
  modified_base 18: mod_base = OTHER; note = 2'-O-methyladenosine-3'-phosphate
  modified_base 19: mod_base = OTHER; note = 2'-O-methyluridine-3'-phosphate
  modified_base 20: mod_base = OTHER; note = 2'-O-methyladenosine-3'-phosphate
  modified_base 21: mod_base = OTHER; note = 2'-O-methylcytidine-3'-phosphorothioate
  modified_base 22: mod_base = OTHER; note = 2'-O-methyladenosine-3'-phosphorothioate
  modified_base 23: mod_base = OTHER; note = 2'-O-methylcytidine
atcttgcactctgagagatacac

SEQ ID NO: 427 - RNA, 23 nt, synthetic construct
  source 1..23: mol_type = other RNA
  modified_base 1: mod_base = OTHER; note = 2'-O-methyladenosine-3'-phosphorothioate
  modified_base 2: mod_base = OTHER; note = 2'-deoxy-2'-fluorouridine-3'-phosphorothioate
  modified_base 3: mod_base = OTHER; note = 2'-O-methyladenosine-3'-phosphate
  modified_base 4: mod_base = OTHER; note = 2'-O-methylguanosine-3'-phosphate
  modified_base 5: mod_base = OTHER; note = 2'-O-methyluridine-3'-phosphate
  modified_base 6: mod_base = OTHER; note = 2'-deoxy-2'-fluorouridine-3'-phosphate
  modified_base 7: mod_base = OTHER; note = 2'-O-methylcytidine-3'-phosphate
  modified_base 8: mod_base = OTHER; note = 2'-deoxy-2'-fluorouridine-3'-phosphate
  modified_base 9: mod_base = OTHER; note = 2'-deoxy-2'-fluorouridine-3'-phosphate
  modified_base 10: mod_base = OTHER; note = 2'-O-methyluridine-3'-phosphate
  modified_base 11: mod_base = OTHER; note = 2'-O-methylcytidine-3'-phosphate
  modified_base 12: mod_base = OTHER; note = 2'-O-methylcytidine-3'-phosphate
  modified_base 13: mod_base = OTHER; note = 2'-O-methyladenosine-3'-phosphate
  modified_base 14: mod_base = OTHER; note = 2'-deoxy-2'-fluorouridine-3'-phosphate
  modified_base 15: mod_base = OTHER; note = 2'-O-methyluridine-3'-phosphate
  modified_base 16: mod_base = OTHER; note = 2'-deoxy-2'-fluorocytidine-3'-phosphate
  modified_base 17: mod_base = OTHER; note = 2'-O-methylcytidine-3'-phosphate
  modified_base 18: mod_base = OTHER; note = 2'-O-methylcytidine-3'-phosphate
  modified_base 19: mod_base = OTHER; note = 2'-O-methyladenosine-3'-phosphate
  modified_base 20: mod_base = OTHER; note = 2'-O-methylguanosine-3'-phosphate
  modified_base 21: mod_base = OTHER; note = 2'-O-methyluridine-3'-phosphorothioate
  modified_base 22: mod_base = OTHER; note = 2'-O-methylcytidine-3'-phosphorothioate
  modified_base 23: mod_base = OTHER; note = 2'-O-methyluridine
atagttctttccattcccagtct

SEQ ID NO: 428 - RNA, 23 nt, synthetic construct
  source 1..23: mol_type = other RNA
  modified_base 1: mod_base = OTHER; note = 2'-O-methyladenosine-3'-phosphorothioate
  modified_base 2: mod_base = OTHER; note = 2'-deoxy-2'-fluorouridine-3'-phosphorothioate
  modified_base 3: mod_base = OTHER; note = 2'-O-methyluridine-3'-phosphate
  modified_base 4: mod_base = OTHER; note = 2'-O-methyluridine-3'-phosphate
  modified_base 5: mod_base = OTHER; note = 2'-O-methylguanosine-3'-phosphate
  modified_base 6: mod_base = OTHER; note = 2'-deoxy-2'-fluorouridine-3'-phosphate
  modified_base 7: mod_base = OTHER; note = 2'-O-methyluridine-3'-phosphate
  modified_base 8: mod_base = OTHER; note = 2'-deoxy-2'-fluorouridine-3'-phosphate
  modified_base 9: mod_base = OTHER; note = 2'-deoxy-2'-fluorouridine-3'-phosphate
  modified_base 10: mod_base = OTHER; note = 2'-O-methylguanosine-3'-phosphate
  modified_base 11: mod_base = OTHER; note = 2'-O-methylguanosine-3'-phosphate
  modified_base 12: mod_base = OTHER; note = 2'-O-methyladenosine-3'-phosphate
  modified_base 13: mod_base = OTHER; note = 2'-O-methylcytidine-3'-phosphate
  modified_base 14: mod_base = OTHER; note = 2'-deoxy-2'-fluoroadenosine-3'-phosphate
  modified_base 15: mod_base = OTHER; note = 2'-O-methyluridine-3'-phosphate
  modified_base 16: mod_base = OTHER; note = 2'-deoxy-2'-fluorocytidine-3'-phosphate
  modified_base 17: mod_base = OTHER; note = 2'-O-methylguanosine-3'-phosphate
  modified_base 18: mod_base = OTHER; note = 2'-O-methyluridine-3'-phosphate
  modified_base 19: mod_base = OTHER; note = 2'-O-methylcytidine-3'-phosphate
  modified_base 20: mod_base = OTHER; note = 2'-O-methylcytidine-3'-phosphate
  modified_base 21: mod_base = OTHER; note = 2'-O-methylcytidine-3'-phosphorothioate
  modified_base 22: mod_base = OTHER; note = 2'-O-methyluridine-3'-phosphorothioate
  modified_base 23: mod_base = OTHER; note = 2'-O-methylcytidine
atttgttttggacatcgtccctc

SEQ ID NO: 429 - RNA, 23 nt, synthetic construct
  source 1..23: mol_type = other RNA
  modified_base 1: mod_base = OTHER; note = 2'-O-methyladenosine-3'-phosphorothioate
  modified_base 2: mod_base = OTHER; note = 2'-deoxy-2'-fluoroadenosine-3'-phosphorothioate
  modified_base 3: mod_base = OTHER; note = 2'-O-methylguanosine-3'-phosphate
  modified_base 4: mod_base = OTHER; note = 2'-O-methylcytidine-3'-phosphate
  modified_base 5: mod_base = OTHER; note = 2'-O-methyladenosine-3'-phosphate
  modified_base 6: mod_base = OTHER; note = 2'-deoxy-2'-fluoroguanosine-3'-phosphate
  modified_base 7: mod_base = OTHER; note = 2'-O-methylguanosine-3'-phosphate
  modified_base 8: mod_base = OTHER; note = 2'-deoxy-2'-fluorouridine-3'-phosphate
  modified_base 9: mod_base = OTHER; note = 2'-deoxy-2'-fluoroguanosine-3'-phosphate
  modified_base 10: mod_base = OTHER; note = 2'-O-methyladenosine-3'-phosphate
  modified_base 11: mod_base = OTHER; note = 2'-O-methylguanosine-3'-phosphate
  modified_base 12: mod_base = OTHER; note = 2'-O-methyladenosine-3'-phosphate
  modified_base 13: mod_base = OTHER; note = 2'-O-methyladenosine-3'-phosphate
  modified_base 14: mod_base = OTHER; note = 2'-deoxy-2'-fluorouridine-3'-phosphate
  modified_base 15: mod_base = OTHER; note = 2'-O-methylcytidine-3'-phosphate
  modified_base 16: mod_base = OTHER; note = 2'-deoxy-2'-fluorouridine-3'-phosphate
  modified_base 17: mod_base = OTHER; note = 2'-O-methyladenosine-3'-phosphate
  modified_base 18: mod_base = OTHER; note = 2'-O-methylguanosine-3'-phosphate
  modified_base 19: mod_base = OTHER; note = 2'-O-methylguanosine-3'-phosphate
  modified_base 20: mod_base = OTHER; note = 2'-O-methyluridine-3'-phosphate
  modified_base 21: mod_base = OTHER; note = 2'-O-methylcytidine-3'-phosphorothioate
  modified_base 22: mod_base = OTHER; note = 2'-O-methyluridine-3'-phosphorothioate
  modified_base 23: mod_base = OTHER; note = 2'-O-methylguanosine
aagcaggtgagaatctaggtctg

SEQ ID NO: 430 - RNA, 23 nt, synthetic construct
  source 1..23: mol_type = other RNA
  modified_base 1: mod_base = OTHER; note = 2'-O-methyladenosine-3'-phosphorothioate
  modified_base 2: mod_base = OTHER; note = 2'-deoxy-2'-fluorouridine-3'-phosphorothioate
  modified_base 3: mod_base = OTHER; note = 2'-O-methylcytidine-3'-phosphate
  modified_base 4: mod_base = OTHER; note = 2'-O-methylguanosine-3'-phosphate
  modified_base 5: mod_base = OTHER; note = 2'-O-methyluridine-3'-phosphate
  modified_base 6: mod_base = OTHER; note = 2'-deoxy-2'-fluorouridine-3'-phosphate
  modified_base 7: mod_base = OTHER; note = 2'-O-methylguanosine-3'-phosphate
  modified_base 8: mod_base = OTHER; note = 2'-deoxy-2'-fluorouridine-3'-phosphate
  modified_base 9: mod_base = OTHER; note = 2'-deoxy-2'-fluorocytidine-3'-phosphate
  modified_base 10: mod_base = OTHER; note = 2'-O-methyluridine-3'-phosphate
  modified_base 11: mod_base = OTHER; note = 2'-O-methylguanosine-3'-phosphate
  modified_base 12: mod_base = OTHER; note = 2'-O-methylguanosine-3'-phosphate
  modified_base 13: mod_base = OTHER; note = 2'-O-methyladenosine-3'-phosphate
  modified_base 14: mod_base = OTHER; note = 2'-deoxy-2'-fluorouridine-3'-phosphate
  modified_base 15: mod_base = OTHER; note = 2'-O-methyluridine-3'-phosphate
  modified_base 16: mod_base = OTHER; note = 2'-deoxy-2'-fluorocytidine-3'-phosphate
  modified_base 17: mod_base = OTHER; note = 2'-O-methylcytidine-3'-phosphate
  modified_base 18: mod_base = OTHER; note = 2'-O-methyluridine-3'-phosphate
  modified_base 19: mod_base = OTHER; note = 2'-O-methylguanosine-3'-phosphate
  modified_base 20: mod_base = OTHER; note = 2'-O-methylcytidine-3'-phosphate
  modified_base 21: mod_base = OTHER; note = 2'-O-methyladenosine-3'-phosphorothioate
  modified_base 22: mod_base = OTHER; note = 2'-O-methylguanosine-3'-phosphorothioate
  modified_base 23: mod_base = OTHER; note = 2'-O-methyluridine
atcgttgtctggattcctgcagt

SEQ ID NO: 431 - RNA, 23 nt, synthetic construct
  source 1..23: mol_type = other RNA
  modified_base 1: mod_base = OTHER; note = 2'-O-methyladenosine-3'-phosphorothioate
  modified_base 2: mod_base = OTHER; note = 2'-deoxy-2'-fluorouridine-3'-phosphorothioate
  modified_base 3: mod_base = OTHER; note = 2'-O-methyluridine-3'-phosphate
  modified_base 4: mod_base = OTHER; note = 2'-O-methylcytidine-3'-phosphate
  modified_base 5: mod_base = OTHER; note = 2'-O-methyluridine-3'-phosphate
  modified_base 6: mod_base = OTHER; note = 2'-deoxy-2'-fluoroguanosine-3'-phosphate
  modified_base 7: mod_base = OTHER; note = 2'-O-methylguanosine-3'-phosphate
  modified_base 8: mod_base = OTHER; note = 2'-deoxy-2'-fluoroadenosine-3'-phosphate
  modified_base 9: mod_base = OTHER; note = 2'-deoxy-2'-fluorouridine-3'-phosphate
  modified_base 10: mod_base = OTHER; note = 2'-O-methylcytidine-3'-phosphate
  modified_base 11: mod_base = OTHER; note = 2'-O-methyladenosine-3'-phosphate
  modified_base 12: mod_base = OTHER; note = 2'-O-methylguanosine-3'-phosphate
  modified_base 13: mod_base = OTHER; note = 2'-O-methyluridine-3'-phosphate
  modified_base 14: mod_base = OTHER; note = 2'-deoxy-2'-fluoroadenosine-3'-phosphate
  modified_base 15: mod_base = OTHER; note = 2'-O-methylguanosine-3'-phosphate
  modified_base 16: mod_base = OTHER; note = 2'-deoxy-2'-fluorouridine-3'-phosphate
  modified_base 17: mod_base = OTHER; note = 2'-O-methyladenosine-3'-phosphate
  modified_base 18: mod_base = OTHER; note = 2'-O-methyluridine-3'-phosphate
  modified_base 19: mod_base = OTHER; note = 2'-O-methyladenosine-3'-phosphate
  modified_base 20: mod_base = OTHER; note = 2'-O-methylguanosine-3'-phosphate
  modified_base 21: mod_base = OTHER; note = 2'-O-methylcytidine-3'-phosphorothioate
  modified_base 22: mod_base = OTHER; note = 2'-O-methyladenosine-3'-phosphorothioate
  modified_base 23: mod_base = OTHER; note = 2'-O-methylcytidine
attctggatcagtagtatagcac

SEQ ID NO: 432 - RNA, 23 nt, synthetic construct
  source 1..23: mol_type = other RNA
  modified_base 1: mod_base = OTHER; note = 2'-O-methyladenosine-3'-phosphorothioate
  modified_base 2: mod_base = OTHER; note = 2'-deoxy-2'-fluoroguanosine-3'-phosphorothioate
  modified_base 3: mod_base = OTHER; note = 2'-O-methyladenosine-3'-phosphate
  modified_base 4: mod_base = OTHER; note = 2'-O-methyladenosine-3'-phosphate
  modified_base 5: mod_base = OTHER; note = 2'-O-methyluridine-3'-phosphate
  modified_base 6: mod_base = OTHER; note = 2'-deoxy-2'-fluoroguanosine-3'-phosphate
  modified_base 7: mod_base = OTHER; note = 2'-O-methyluridine-3'-phosphate
  modified_base 8: mod_base = OTHER; note = 2'-deoxy-2'-fluorocytidine-3'-phosphate
  modified_base 9: mod_base = OTHER; note = 2'-deoxy-2'-fluoroguanosine-3'-phosphate
  modified_base 10: mod_base = OTHER; note = 2'-O-methylcytidine-3'-phosphate
  modified_base 11: mod_base = OTHER; note = 2'-O-methyladenosine-3'-phosphate
  modified_base 12: mod_base = OTHER; note = 2'-O-methylguanosine-3'-phosphate
  modified_base 13: mod_base = OTHER; note = 2'-O-methyluridine-3'-phosphate
  modified_base 14: mod_base = OTHER; note = 2'-deoxy-2'-fluoroadenosine-3'-phosphate
  modified_base 15: mod_base = OTHER; note = 2'-O-methylguanosine-3'-phosphate
  modified_base 16: mod_base = OTHER; note = 2'-deoxy-2'-fluorouridine-3'-phosphate
  modified_base 17: mod_base = OTHER; note = 2'-O-methylcytidine-3'-phosphate
  modified_base 18: mod_base = OTHER; note = 2'-O-methyladenosine-3'-phosphate
  modified_base 19: mod_base = OTHER; note = 2'-O-methyluridine-3'-phosphate
  modified_base 20: mod_base = OTHER; note = 2'-O-methyladenosine-3'-phosphate
  modified_base 21: mod_base = OTHER; note = 2'-O-methyluridine-3'-phosphorothioate
  modified_base 22: mod_base = OTHER; note = 2'-O-methylcytidine-3'-phosphorothioate
  modified_base 23: mod_base = OTHER; note = 2'-O-methyluridine
agaatgtcgcagtagtcatatct

SEQ ID NO: 433 - RNA, 23 nt, synthetic construct
  source 1..23: mol_type = other RNA
  modified_base 1: mod_base = OTHER; note = 2'-O-methyladenosine-3'-phosphorothioate
  modified_base 2: mod_base = OTHER; note = 2'-deoxy-2'-fluorouridine-3'-phosphorothioate
  modified_base 3: mod_base = OTHER; note = 2'-O-methyluridine-3'-phosphate
  modified_base 4: mod_base = OTHER; note = 2'-O-methylcytidine-3'-phosphate
  modified_base 5: mod_base = OTHER; note = 2'-O-methylcytidine-3'-phosphate
  modified_base 6: mod_base = OTHER; note = 2'-deoxy-2'-fluorouridine-3'-phosphate
  modified_base 7: mod_base = OTHER; note = 2'-O-methylcytidine-3'-phosphate
  modified_base 8: mod_base = OTHER; note = 2'-deoxy-2'-fluorouridine-3'-phosphate
  modified_base 9: mod_base = OTHER; note = 2'-deoxy-2'-fluorouridine-3'-phosphate
  modified_base 10: mod_base = OTHER; note = 2'-O-methylcytidine-3'-phosphate
  modified_base 11: mod_base = OTHER; note = 2'-O-methyladenosine-3'-phosphate
  modified_base 12: mod_base = OTHER; note = 2'-O-methylcytidine-3'-phosphate
  modified_base 13: mod_base = OTHER; note = 2'-O-methyladenosine-3'-phosphate
  modified_base 14: mod_base = OTHER; note = 2'-deoxy-2'-fluorocytidine-3'-phosphate
  modified_base 15: mod_base = OTHER; note = 2'-O-methyluridine-3'-phosphate
  modified_base 16: mod_base = OTHER; note = 2'-deoxy-2'-fluorocytidine-3'-phosphate
  modified_base 17: mod_base = OTHER; note = 2'-O-methyladenosine-3'-phosphate
  modified_base 18: mod_base = OTHER; note = 2'-O-methyladenosine-3'-phosphate
  modified_base 19: mod_base = OTHER; note = 2'-O-methylguanosine-3'-phosphate
  modified_base 20: mod_base = OTHER; note = 2'-O-methyladenosine-3'-phosphate
  modified_base 21: mod_base = OTHER; note = 2'-O-methyladenosine-3'-phosphorothioate
  modified_base 22: mod_base = OTHER; note = 2'-O-methyluridine-3'-phosphorothioate
  modified_base 23: mod_base = OTHER; note = 2'-O-methylguanosine
attcctcttcacactcaagaatg

SEQ ID NO: 434 - RNA, 23 nt, synthetic construct
  source 1..23: mol_type = other RNA
  modified_base 1: mod_base = OTHER; note = 2'-O-methyladenosine-3'-phosphorothioate
  modified_base 2: mod_base = OTHER; note = 2'-deoxy-2'-fluoroadenosine-3'-phosphorothioate
  modified_base 3: mod_base = OTHER; note = 2'-O-methylcytidine-3'-phosphate
  modified_base 4: mod_base = OTHER; note = 2'-O-methyluridine-3'-phosphate
  modified_base 5: mod_base = OTHER; note = 2'-O-methylguanosine-3'-phosphate
  modified_base 6: mod_base = OTHER; note = 2'-deoxy-2'-fluorocytidine-3'-phosphate
  modified_base 7: mod_base = OTHER; note = 2'-O-methyladenosine-3'-phosphate
  modified_base 8: mod_base = OTHER; note = 2'-deoxy-2'-fluoroadenosine-3'-phosphate
  modified_base 9: mod_base = OTHER; note = 2'-deoxy-2'-fluorouridine-3'-phosphate
  modified_base 10: mod_base = OTHER; note = 2'-O-methylguanosine-3'-phosphate
  modified_base 11: mod_base = OTHER; note = 2'-O-methylcytidine-3'-phosphate
  modified_base 12: mod_base = OTHER; note = 2'-O-methyladenosine-3'-phosphate
  modified_base 13: mod_base = OTHER; note = 2'-O-methyluridine-3'-phosphate
  modified_base 14: mod_base = OTHER; note = 2'-deoxy-2'-fluoroadenosine-3'-phosphate
  modified_base 15: mod_base = OTHER; note = 2'-O-methylcytidine-3'-phosphate
  modified_base 16: mod_base = OTHER; note = 2'-deoxy-2'-fluoroadenosine-3'-phosphate
  modified_base 17: mod_base = OTHER; note = 2'-O-methyluridine-3'-phosphate
  modified_base 18: mod_base = OTHER; note = 2'-O-methyluridine-3'-phosphate
  modified_base 19: mod_base = OTHER; note = 2'-O-methylcytidine-3'-phosphate
  modified_base 20: mod_base = OTHER; note = 2'-O-methylcytidine-3'-phosphate
  modified_base 21: mod_base = OTHER; note = 2'-O-methyluridine-3'-phosphorothioate
  modified_base 22: mod_base = OTHER; note = 2'-O-methylcytidine-3'-phosphorothioate
  modified_base 23: mod_base = OTHER; note = 2'-O-methyluridine
aactgcaatgcatacattcctct

SEQ ID NO: 435 - RNA, 23 nt, synthetic construct
  source 1..23: mol_type = other RNA
  modified_base 1: mod_base = OTHER; note = 2'-O-methyladenosine-3'-phosphorothioate
  modified_base 2: mod_base = OTHER; note = 2'-deoxy-2'-fluorocytidine-3'-phosphorothioate
  modified_base 3: mod_base = OTHER; note = 2'-O-methylguanosine-3'-phosphate
  modified_base 4: mod_base = OTHER; note = 2'-O-methyluridine-3'-phosphate
  modified_base 5: mod_base = OTHER; note = 2'-O-methylcytidine-3'-phosphate
  modified_base 6: mod_base = OTHER; note = 2'-deoxy-2'-fluoroadenosine-3'-phosphate
  modified_base 7: mod_base = OTHER; note = 2'-O-methyluridine-3'-phosphate
  modified_base 8: mod_base = OTHER; note = 2'-deoxy-2'-fluoroadenosine-3'-phosphate
  modified_base 9: mod_base = OTHER; note = 2'-deoxy-2'-fluoroguanosine-3'-phosphate
  modified_base 10: mod_base = OTHER; note = 2'-O-methyluridine-3'-phosphate
  modified_base 11: mod_base = OTHER; note = 2'-O-methyluridine-3'-phosphate
  modified_base 12: mod_base = OTHER; note = 2'-O-methyluridine-3'-phosphate
  modified_base 13: mod_base = OTHER; note = 2'-O-methyluridine-3'-phosphate
  modified_base 14: mod_base = OTHER; note = 2'-deoxy-2'-fluorocytidine-3'-phosphate
  modified_base 15: mod_base = OTHER; note = 2'-O-methyluridine-3'-phosphate
  modified_base 16: mod_base = OTHER; note = 2'-deoxy-2'-fluorocytidine-3'-phosphate
  modified_base 17: mod_base = OTHER; note = 2'-O-methylcytidine-3'-phosphate
  modified_base 18: mod_base = OTHER; note = 2'-O-methyladenosine-3'-phosphate
  modified_base 19: mod_base = OTHER; note = 2'-O-methylcytidine-3'-phosphate
  modified_base 20: mod_base = OTHER; note = 2'-O-methyluridine-3'-phosphate
  modified_base 21: mod_base = OTHER; note = 2'-O-methylguanosine-3'-phosphorothioate
  modified_base 22: mod_base = OTHER; note = 2'-O-methylcytidine-3'-phosphorothioate
  modified_base 23: mod_base = OTHER; note = 2'-O-methyladenosine
acgtcatagttttctccactgca

SEQ ID NO: 436 - RNA, 23 nt, synthetic construct
  source 1..23: mol_type = other RNA
  modified_base 1: mod_base = OTHER; note = 2'-O-methyladenosine-3'-phosphorothioate
  modified_base 2: mod_base = OTHER; note = 2'-deoxy-2'-fluoroadenosine-3'-phosphorothioate
  modified_base 3: mod_base = OTHER; note = 2'-O-methyluridine-3'-phosphate
  modified_base 4: mod_base = OTHER; note = 2'-O-methylguanosine-3'-phosphate
  modified_base 5: mod_base = OTHER; note = 2'-O-methylguanosine-3'-phosphate
  modified_base 6: mod_base = OTHER; note = 2'-deoxy-2'-fluorouridine-3'-phosphate
  modified_base 7: mod_base = OTHER; note = 2'-O-methylcytidine-3'-phosphate
  modified_base 8: mod_base = OTHER; note = 2'-deoxy-2'-fluorouridine-3'-phosphate
  modified_base 9: mod_base = OTHER; note = 2'-deoxy-2'-fluorouridine-3'-phosphate
  modified_base 10: mod_base = OTHER; note = 2'-O-methylguanosine-3'-phosphate
  modified_base 11: mod_base = OTHER; note = 2'-O-methylguanosine-3'-phosphate
  modified_base 12: mod_base = OTHER; note = 2'-O-methyladenosine-3'-phosphate
  modified_base 13: mod_base = OTHER; note = 2'-O-methyladenosine-3'-phosphate
  modified_base 14: mod_base = OTHER; note = 2'-deoxy-2'-fluoroadenosine-3'-phosphate
  modified_base 15: mod_base = OTHER; note = 2'-O-methyluridine-3'-phosphate
  modified_base 16: mod_base = OTHER; note = 2'-deoxy-2'-fluorouridine-3'-phosphate
  modified_base 17: mod_base = OTHER; note = 2'-O-methyluridine-3'-phosphate
  modified_base 18: mod_base = OTHER; note = 2'-O-methyluridine-3'-phosphate
  modified_base 19: mod_base = OTHER; note = 2'-O-methylguanosine-3'-phosphate
  modified_base 20: mod_base = OTHER; note = 2'-O-methylcytidine-3'-phosphate
  modified_base 21: mod_base = OTHER; note = 2'-O-methylcytidine-3'-phosphorothioate
  modified_base 22: mod_base = OTHER; note = 2'-O-methylguanosine-3'-phosphorothioate
  modified_base 23: mod_base = OTHER; note = 2'-O-methyluridine
aatggtcttggaaattttgccgt

SEQ ID NO: 437 - RNA, 23 nt, synthetic construct
  source 1..23: mol_type = other RNA
  modified_base 1: mod_base = OTHER; note = 2'-O-methyladenosine-3'-phosphorothioate
  modified_base 2: mod_base = OTHER; note = 2'-deoxy-2'-fluoroadenosine-3'-phosphorothioate
  modified_base 3: mod_base = OTHER; note = 2'-O-methylguanosine-3'-phosphate
  modified_base 4: mod_base = OTHER; note = 2'-O-methylguanosine-3'-phosphate
  modified_base 5: mod_base = OTHER; note = 2'-O-methyladenosine-3'-phosphate
  modified_base 6: mod_base = OTHER; note = 2'-deoxy-2'-fluoroadenosine-3'-phosphate
  modified_base 7: mod_base = OTHER; note = 2'-O-methyluridine-3'-phosphate
  modified_base 8: mod_base = OTHER; note = 2'-deoxy-2'-fluoroguanosine-3'-phosphate
  modified_base 9: mod_base = OTHER; note = 2'-deoxy-2'-fluorouridine-3'-phosphate
  modified_base 10: mod_base = OTHER; note = 2'-O-methyladenosine-3'-phosphate
  modified_base 11: mod_base = OTHER; note = 2'-O-methyluridine-3'-phosphate
  modified_base 12: mod_base = OTHER; note = 2'-O-methylcytidine-3'-phosphate
  modified_base 13: mod_base = OTHER; note = 2'-O-methylcytidine-3'-phosphate
  modified_base 14: mod_base = OTHER; note = 2'-deoxy-2'-fluoroadenosine-3'-phosphate
  modified_base 15: mod_base = OTHER; note = 2'-O-methyluridine-3'-phosphate
  modified_base 16: mod_base = OTHER; note = 2'-deoxy-2'-fluoroguanosine-3'-phosphate
  modified_base 17: mod_base = OTHER; note = 2'-O-methyladenosine-3'-phosphate
  modified_base 18: mod_base = OTHER; note = 2'-O-methylguanosine-3'-phosphate
  modified_base 19: mod_base = OTHER; note = 2'-O-methylcytidine-3'-phosphate
  modified_base 20: mod_base = OTHER; note = 2'-O-methylguanosine-3'-phosphate
  modified_base 21: mod_base = OTHER; note = 2'-O-methyluridine-3'-phosphorothioate
  modified_base 22: mod_base = OTHER; note = 2'-O-methylguanosine-3'-phosphorothioate
  modified_base 23: mod_base = OTHER; note = 2'-O-methyluridine
aaggaatgtatccatgagcgtgt

SEQ ID NO: 438 - RNA, 23 nt, synthetic construct
  source 1..23: mol_type = other RNA
  modified_base 1: mod_base = OTHER; note = 2'-O-methyladenosine-3'-phosphorothioate
  modified_base 2: mod_base = OTHER; note = 2'-deoxy-2'-fluoroguanosine-3'-phosphorothioate
  modified_base 3: mod_base = OTHER; note = 2'-O-methyluridine-3'-phosphate
  modified_base 4: mod_base = OTHER; note = 2'-O-methyluridine-3'-phosphate
  modified_base 5: mod_base = OTHER; note = 2'-O-methyluridine-3'-phosphate
  modified_base 6: mod_base = OTHER; note = 2'-deoxy-2'-fluoroguanosine-3'-phosphate
  modified_base 7: mod_base = OTHER; note = 2'-O-methylguanosine-3'-phosphate
  modified_base 8: mod_base = OTHER; note = 2'-deoxy-2'-fluoroadenosine-3'-phosphate
  modified_base 9: mod_base = OTHER; note = 2'-deoxy-2'-fluoroadenosine-3'-phosphate
  modified_base 10: mod_base = OTHER; note = 2'-O-methyladenosine-3'-phosphate
  modified_base 11: mod_base = OTHER; note = 2'-O-methyluridine-3'-phosphate
  modified_base 12: mod_base = OTHER; note = 2'-O-methyluridine-3'-phosphate
  modified_base 13: mod_base = OTHER; note = 2'-O-methyluridine-3'-phosphate
  modified_base 14: mod_base = OTHER; note = 2'-deoxy-2'-fluoroguanosine-3'-phosphate
  modified_base 15: mod_base = OTHER; note = 2'-O-methylguanosine-3'-phosphate
  modified_base 16: mod_base = OTHER; note = 2'-deoxy-2'-fluoroadenosine-3'-phosphate
  modified_base 17: mod_base = OTHER; note = 2'-O-methyladenosine-3'-phosphate
  modified_base 18: mod_base = OTHER; note = 2'-O-methylguanosine-3'-phosphate
  modified_base 19: mod_base = OTHER; note = 2'-O-methylguanosine-3'-phosphate
  modified_base 20: mod_base = OTHER; note = 2'-O-methyladenosine-3'-phosphate
  modified_base 21: mod_base = OTHER; note = 2'-O-methyladenosine-3'-phosphorothioate
  modified_base 22: mod_base = OTHER; note = 2'-O-methyluridine-3'-phosphorothioate
  modified_base 23: mod_base = OTHER; note = 2'-O-methylguanosine
agtttggaaatttggaaggaatg

SEQ ID NO: 439 - RNA, 23 nt, synthetic construct
  source 1..23: mol_type = other RNA
  modified_base 1: mod_base = OTHER; note = 2'-O-methyladenosine-3'-phosphorothioate
  modified_base 2: mod_base = OTHER; note = 2'-deoxy-2'-fluoroadenosine-3'-phosphorothioate
  modified_base 3: mod_base = OTHER; note = 2'-O-methylguanosine-3'-phosphate
  modified_base 4: mod_base = OTHER; note = 2'-O-methyluridine-3'-phosphate
  modified_base 5: mod_base = OTHER; note = 2'-O-methyladenosine-3'-phosphate
  modified_base 6: mod_base = OTHER; note = 2'-deoxy-2'-fluoroadenosine-3'-phosphate
  modified_base 7: mod_base = OTHER; note = 2'-O-methyluridine-3'-phosphate
  modified_base 8: mod_base = OTHER; note = 2'-deoxy-2'-fluorouridine-3'-phosphate
  modified_base 9: mod_base = OTHER; note = 2'-deoxy-2'-fluorocytidine-3'-phosphate
  modified_base 10: mod_base = OTHER; note = 2'-O-methyluridine-3'-phosphate
  modified_base 11: mod_base = OTHER; note = 2'-O-methyluridine-3'-phosphate
  modified_base 12: mod_base = OTHER; note = 2'-O-methylcytidine-3'-phosphate
  modified_base 13: mod_base = OTHER; note = 2'-O-methyluridine-3'-phosphate
  modified_base 14: mod_base = OTHER; note = 2'-deoxy-2'-fluorouridine-3'-phosphate
  modified_base 15: mod_base = OTHER; note = 2'-O-methylcytidine-3'-phosphate
  modified_base 16: mod_base = OTHER; note = 2'-deoxy-2'-fluoroadenosine-3'-phosphate
  modified_base 17: mod_base = OTHER; note = 2'-O-methylguanosine-3'-phosphate
  modified_base 18: mod_base = OTHER; note = 2'-O-methylguanosine-3'-phosphate
  modified_base 19: mod_base = OTHER; note = 2'-O-methyluridine-3'-phosphate
  modified_base 20: mod_base = OTHER; note = 2'-O-methyluridine-3'-phosphate
  modified_base 21: mod_base = OTHER; note = 2'-O-methylcytidine-3'-phosphorothioate
  modified_base 22: mod_base = OTHER; note = 2'-O-methyluridine-3'-phosphorothioate
  modified_base 23: mod_base = OTHER; note = 2'-O-methyluridine
aagtaattcttcttcaggttctt

SEQ ID NO: 440 - RNA, 23 nt, synthetic construct
  source 1..23: mol_type = other RNA
  modified_base 1: mod_base = OTHER; note = 2'-O-methyladenosine-3'-phosphorothioate
  modified_base 2: mod_base = OTHER; note = 2'-deoxy-2'-fluoroguanosine-3'-phosphorothioate
  modified_base 3: mod_base = OTHER; note = 2'-O-methyluridine-3'-phosphate
  modified_base 4: mod_base = OTHER; note = 2'-O-methylcytidine-3'-phosphate
  modified_base 5: mod_base = OTHER; note = 2'-O-methylguanosine-3'-phosphate
  modified_base 6: mod_base = OTHER; note = 2'-deoxy-2'-fluoroguanosine-3'-phosphate
  modified_base 7: mod_base = OTHER; note = 2'-O-methyluridine-3'-phosphate
  modified_base 8: mod_base = OTHER; note = 2'-deoxy-2'-fluoroguanosine-3'-phosphate
  modified_base 9: mod_base = OTHER; note = 2'-deoxy-2'-fluoroguanosine-3'-phosphate
  modified_base 10: mod_base = OTHER; note = 2'-O-methyluridine-3'-phosphate
  modified_base 11: mod_base = OTHER; note = 2'-O-methylguanosine-3'-phosphate
  modified_base 12: mod_base = OTHER; note = 2'-O-methyladenosine-3'-phosphate
  modified_base 13: mod_base = OTHER; note = 2'-O-methyladenosine-3'-phosphate
  modified_base 14: mod_base = OTHER; note = 2'-deoxy-2'-fluoroadenosine-3'-phosphate
  modified_base 15: mod_base = OTHER; note = 2'-O-methylcytidine-3'-phosphate
  modified_base 16: mod_base = OTHER; note = 2'-deoxy-2'-fluoroadenosine-3'-phosphate
  modified_base 17: mod_base = OTHER; note = 2'-O-methylcytidine-3'-phosphate
  modified_base 18: mod_base = OTHER; note = 2'-O-methylcytidine-3'-phosphate
  modified_base 19: mod_base = OTHER; note = 2'-O-methyladenosine-3'-phosphate
  modified_base 20: mod_base = OTHER; note = 2'-O-methyladenosine-3'-phosphate
  modified_base 21: mod_base = OTHER; note = 2'-O-methylguanosine-3'-phosphorothioate
  modified_base 22: mod_base = OTHER; note = 2'-O-methylguanosine-3'-phosphorothioate
  modified_base 23: mod_base = OTHER; note = 2'-O-methylcytidine
agtcggtggtgaaacaccaaggc

SEQ ID NO: 441 - RNA, 23 nt, synthetic construct
  source 1..23: mol_type = other RNA
  modified_base 1: mod_base = OTHER; note = 2'-O-methyladenosine-3'-phosphorothioate
  modified_base 2: mod_base = OTHER; note = 2'-deoxy-2'-fluoroguanosine-3'-phosphorothioate
  modified_base 3: mod_base = OTHER; note = 2'-O-methylguanosine-3'-phosphate
  modified_base 4: mod_base = OTHER; note = 2'-O-methyladenosine-3'-phosphate
  modified_base 5: mod_base = OTHER; note = 2'-O-methyluridine-3'-phosphate
  modified_base 6: mod_base = OTHER; note = 2'-deoxy-2'-fluoroguanosine-3'-phosphate
  modified_base 7: mod_base = OTHER; note = 2'-O-methyluridine-3'-phosphate
  modified_base 8: mod_base = OTHER; note = 2'-deoxy-2'-fluorocytidine-3'-phosphate
  modified_base 9: mod_base = OTHER; note = 2'-deoxy-2'-fluoroadenosine-3'-phosphate
  modified_base 10: mod_base = OTHER; note = 2'-O-methylcytidine-3'-phosphate
  modified_base 11: mod_base = OTHER; note = 2'-O-methyladenosine-3'-phosphate
  modified_base 12: mod_base = OTHER; note = 2'-O-methyladenosine-3'-phosphate
  modified_base 13: mod_base = OTHER; note = 2'-O-methyladenosine-3'-phosphate
  modified_base 14: mod_base = OTHER; note = 2'-deoxy-2'-fluoroguanosine-3'-phosphate
  modified_base 15: mod_base = OTHER; note = 2'-O-methyluridine-3'-phosphate
  modified_base 16: mod_base = OTHER; note = 2'-deoxy-2'-fluorouridine-3'-phosphate
  modified_base 17: mod_base = OTHER; note = 2'-O-methylcytidine-3'-phosphate
  modified_base 18: mod_base = OTHER; note = 2'-O-methylcytidine-3'-phosphate
  modified_base 19: mod_base = OTHER; note = 2'-O-methylcytidine-3'-phosphate
  modified_base 20: mod_base = OTHER; note = 2'-O-methyladenosine-3'-phosphate
  modified_base 21: mod_base = OTHER; note = 2'-O-methylguanosine-3'-phosphorothioate
  modified_base 22: mod_base = OTHER; note = 2'-O-methylcytidine-3'-phosphorothioate
  modified_base 23: mod_base = OTHER; note = 2'-O-methylguanosine
aggatgtcacaaagttcccagcg

SEQ ID NO: 442 - RNA, 23 nt, synthetic construct
  source 1..23: mol_type = other RNA
  modified_base 1: mod_base = OTHER; note = 2'-O-methyladenosine-3'-phosphorothioate
  modified_base 2: mod_base = OTHER; note = 2'-deoxy-2'-fluoroadenosine-3'-phosphorothioate
  modified_base 3: mod_base = OTHER; note = 2'-O-methylcytidine-3'-phosphate
  modified_base 4: mod_base = OTHER; note = 2'-O-methylcytidine-3'-phosphate
  modified_base 5: mod_base = OTHER; note = 2'-O-methyladenosine-3'-phosphate
  modified_base 6: mod_base = OTHER; note = 2'-deoxy-2'-fluoroguanosine-3'-phosphate
  modified_base 7: mod_base = OTHER; note = 2'-O-methyladenosine-3'-phosphate
  modified_base 8: mod_base = OTHER; note = 2'-deoxy-2'-fluoroadenosine-3'-phosphate
  modified_base 9: mod_base = OTHER; note = 2'-deoxy-2'-fluoroguanosine-3'-phosphate
  modified_base 10: mod_base = OTHER; note = 2'-O-methyladenosine-3'-phosphate
  modified_base 11: mod_base = OTHER; note = 2'-O-methyluridine-3'-phosphate
  modified_base 12: mod_base = OTHER; note = 2'-O-methylguanosine-3'-phosphate
  modified_base 13: mod_base = OTHER; note = 2'-O-methylguanosine-3'-phosphate
  modified_base 14: mod_base = OTHER; note = 2'-deoxy-2'-fluorouridine-3'-phosphate
  modified_base 15: mod_base = OTHER; note = 2'-O-methylguanosine-3'-phosphate
  modified_base 16: mod_base = OTHER; note = 2'-deoxy-2'-fluoroguanosine-3'-phosphate
  modified_base 17: mod_base = OTHER; note = 2'-O-methyladenosine-3'-phosphate
  modified_base 18: mod_base = OTHER; note = 2'-O-methylguanosine-3'-phosphate
  modified_base 19: mod_base = OTHER; note = 2'-O-methylguanosine-3'-phosphate
  modified_base 20: mod_base = OTHER; note = 2'-O-methyluridine-3'-phosphate
  modified_base 21: mod_base = OTHER; note = 2'-O-methylguanosine-3'-phosphorothioate
  modified_base 22: mod_base = OTHER; note = 2'-O-methyluridine-3'-phosphorothioate
  modified_base 23: mod_base = OTHER; note = 2'-O-methyluridine
aaccagaagatggtggaggtgtt

SEQ ID NO: 443 - RNA, 23 nt, synthetic construct
  source 1..23: mol_type = other RNA
  modified_base 1: mod_base = OTHER; note = 2'-O-methyladenosine-3'-phosphorothioate
  modified_base 2: mod_base = OTHER; note = 2'-deoxy-2'-fluorouridine-3'-phosphorothioate
  modified_base 3: mod_base = OTHER; note = 2'-O-methyluridine-3'-phosphate
  modified_base 4: mod_base = OTHER; note = 2'-O-methylcytidine-3'-phosphate
  modified_base 5: mod_base = OTHER; note = 2'-O-methyladenosine-3'-phosphate
  modified_base 6: mod_base = OTHER; note = 2'-deoxy-2'-fluoroguanosine-3'-phosphate
  modified_base 7: mod_base = OTHER; note = 2'-O-methyladenosine-3'-phosphate
  modified_base 8: mod_base = OTHER; note = 2'-deoxy-2'-fluorocytidine-3'-phosphate
  modified_base 9: mod_base = OTHER; note = 2'-deoxy-2'-fluoroadenosine-3'-phosphate
  modified_base 10: mod_base = OTHER; note = 2'-O-methylcytidine-3'-phosphate
  modified_base 11: mod_base = OTHER; note = 2'-O-methyluridine-3'-phosphate
  modified_base 12: mod_base = OTHER; note = 2'-O-methylguanosine-3'-phosphate
  modified_base 13: mod_base = OTHER; note = 2'-O-methylguanosine-3'-phosphate
  modified_base 14: mod_base = OTHER; note = 2'-deoxy-2'-fluorouridine-3'-phosphate
  modified_base 15: mod_base = OTHER; note = 2'-O-methyladenosine-3'-phosphate
  modified_base 16: mod_base = OTHER; note = 2'-deoxy-2'-fluoroguanosine-3'-phosphate
  modified_base 17: mod_base = OTHER; note = 2'-O-methylguanosine-3'-phosphate
  modified_base 18: mod_base = OTHER; note = 2'-O-methyluridine-3'-phosphate
  modified_base 19: mod_base = OTHER; note = 2'-O-methylguanosine-3'-phosphate
  modified_base 20: mod_base = OTHER; note = 2'-O-methylguanosine-3'-phosphate
  modified_base 21: mod_base = OTHER; note = 2'-O-methylguanosine-3'-phosphorothioate
  modified_base 22: mod_base = OTHER; note = 2'-O-methyladenosine-3'-phosphorothioate
  modified_base 23: mod_base = OTHER; note = 2'-O-methylcytidine
attcagacactggtaggtgggac

SEQ ID NO: 444 - RNA, 23 nt, synthetic construct
  source 1..23: mol_type = other RNA
  modified_base 1: mod_base = OTHER; note = 2'-O-methyladenosine-3'-phosphorothioate
  modified_base 2: mod_base = OTHER; note = 2'-deoxy-2'-fluorouridine-3'-phosphorothioate
  modified_base 3: mod_base = OTHER; note = 2'-O-methyluridine-3'-phosphate
  modified_base 4: mod_base = OTHER; note = 2'-O-methyluridine-3'-phosphate
  modified_base 5: mod_base = OTHER; note = 2'-O-methyluridine-3'-phosphate
  modified_base 6: mod_base = OTHER; note = 2'-deoxy-2'-fluorocytidine-3'-phosphate
  modified_base 7: mod_base = OTHER; note = 2'-O-methyladenosine-3'-phosphate
  modified_base 8: mod_base = OTHER; note = 2'-deoxy-2'-fluorocytidine-3'-phosphate
  modified_base 9: mod_base = OTHER; note = 2'-deoxy-2'-fluorocytidine-3'-phosphate
  modified_base 10: mod_base = OTHER; note = 2'-O-methyluridine-3'-phosphate
  modified_base 11: mod_base = OTHER; note = 2'-O-methylguanosine-3'-phosphate
  modified_base 12: mod_base = OTHER; note = 2'-O-methyluridine-3'-phosphate
  modified_base 13: mod_base = OTHER; note = 2'-O-methyluridine-3'-phosphate
  modified_base 14: mod_base = OTHER; note = 2'-deoxy-2'-fluorocytidine-3'-phosphate
  modified_base 15: mod_base = OTHER; note = 2'-O-methylcytidine-3'-phosphate
  modified_base 16: mod_base = OTHER; note = 2'-deoxy-2'-fluorocytidine-3'-phosphate
  modified_base 17: mod_base = OTHER; note = 2'-O-methyluridine-3'-phosphate
  modified_base 18: mod_base = OTHER; note = 2'-O-methyluridine-3'-phosphate
  modified_base 19: mod_base = OTHER; note = 2'-O-methylcytidine-3'-phosphate
  modified_base 20: mod_base = OTHER; note = 2'-O-methyladenosine-3'-phosphate
  modified_base 21: mod_base = OTHER; note = 2'-O-methylguanosine-3'-phosphorothioate
  modified_base 22: mod_base = OTHER; note = 2'-O-methyladenosine-3'-phosphorothioate
  modified_base 23: mod_base = OTHER; note = 2'-O-methylcytidine
attttcacctgttcccttcagac

SEQ ID NO: 445 - RNA, 23 nt, synthetic construct
  source 1..23: mol_type = other RNA
  modified_base 1: mod_base = OTHER; note = 2'-O-methyladenosine-3'-phosphorothioate
  modified_base 2: mod_base = OTHER; note = 2'-deoxy-2'-fluoroguanosine-3'-phosphorothioate
  modified_base 3: mod_base = OTHER; note = 2'-O-methylguanosine-3'-phosphate
  modified_base 4: mod_base = OTHER; note = 2'-O-methyluridine-3'-phosphate
  modified_base 5: mod_base = OTHER; note = 2'-O-methyladenosine-3'-phosphate
  modified_base 6: mod_base = OTHER; note = 2'-deoxy-2'-fluoroadenosine-3'-phosphate
  modified_base 7: mod_base = OTHER; note = 2'-O-methylcytidine-3'-phosphate
  modified_base 8: mod_base = OTHER; note = 2'-deoxy-2'-fluoroadenosine-3'-phosphate
  modified_base 9: mod_base = OTHER; note = 2'-deoxy-2'-fluoroguanosine-3'-phosphate
  modified_base 10: mod_base = OTHER; note = 2'-O-methylcytidine-3'-phosphate
  modified_base 11: mod_base = OTHER; note = 2'-O-methylcytidine-3'-phosphate
  modified_base 12: mod_base = OTHER; note = 2'-O-methyladenosine-3'-phosphate
  modified_base 13: mod_base = OTHER; note = 2'-O-methylcytidine-3'-phosphate
  modified_base 14: mod_base = OTHER; note = 2'-deoxy-2'-fluoroadenosine-3'-phosphate
  modified_base 15: mod_base = OTHER; note = 2'-O-methyluridine-3'-phosphate
  modified_base 16: mod_base = OTHER; note = 2'-deoxy-2'-fluorouridine-3'-phosphate
  modified_base 17: mod_base = OTHER; note = 2'-O-methylcytidine-3'-phosphate
  modified_base 18: mod_base = OTHER; note = 2'-O-methylcytidine-3'-phosphate
  modified_base 19: mod_base = OTHER; note = 2'-O-methylcytidine-3'-phosphate
  modified_base 20: mod_base = OTHER; note = 2'-O-methylguanosine-3'-phosphate
  modified_base 21: mod_base = OTHER; note = 2'-O-methylcytidine-3'-phosphorothioate
  modified_base 22: mod_base = OTHER; note = 2'-O-methylguanosine-3'-phosphorothioate
  modified_base 23: mod_base = OTHER; note = 2'-O-methyladenosine
aggtaacagccacattcccgcga

SEQ ID NO: 446 - RNA, 23 nt, synthetic construct
  source 1..23: mol_type = other RNA
  modified_base 1: mod_base = OTHER; note = 2'-O-methyladenosine-3'-phosphorothioate
  modified_base 2: mod_base = OTHER; note = 2'-deoxy-2'-fluoroguanosine-3'-phosphorothioate
  modified_base 3: mod_base = OTHER; note = 2'-O-methyladenosine-3'-phosphate
  modified_base 4: mod_base = OTHER; note = 2'-O-methyladenosine-3'-phosphate
  modified_base 5: mod_base = OTHER; note = 2'-O-methylguanosine-3'-phosphate
  modified_base 6: mod_base = OTHER; note = 2'-deoxy-2'-fluorouridine-3'-phosphate
  modified_base 7: mod_base = OTHER; note = 2'-O-methyluridine-3'-phosphate
  modified_base 8: mod_base = OTHER; note = 2'-deoxy-2'-fluorouridine-3'-phosphate
  modified_base 9: mod_base = OTHER; note = 2'-deoxy-2'-fluorouridine-3'-phosphate
  modified_base 10: mod_base = OTHER; note = 2'-O-methylcytidine-3'-phosphate
  modified_base 11: mod_base = OTHER; note = 2'-O-methyluridine-3'-phosphate
  modified_base 12: mod_base = OTHER; note = 2'-O-methylguanosine-3'-phosphate
  modified_base 13: mod_base = OTHER; note = 2'-O-methylguanosine-3'-phosphate
  modified_base 14: mod_base = OTHER; note = 2'-deoxy-2'-fluorouridine-3'-phosphate
  modified_base 15: mod_base = OTHER; note = 2'-O-methylguanosine-3'-phosphate
  modified_base 16: mod_base = OTHER; note = 2'-deoxy-2'-fluorouridine-3'-phosphate
  modified_base 17: mod_base = OTHER; note = 2'-O-methylcytidine-3'-phosphate
  modified_base 18: mod_base = OTHER; note = 2'-O-methylcytidine-3'-phosphate
  modified_base 19: mod_base = OTHER; note = 2'-O-methyluridine-3'-phosphate
  modified_base 20: mod_base = OTHER; note = 2'-O-methylguanosine-3'-phosphate
  modified_base 21: mod_base = OTHER; note = 2'-O-methyluridine-3'-phosphorothioate
  modified_base 22: mod_base = OTHER; note = 2'-O-methyluridine-3'-phosphorothioate
  modified_base 23: mod_base = OTHER; note = 2'-O-methyladenosine
agaagttttctggtgtcctgtta

SEQ ID NO: 447 - RNA, 23 nt, synthetic construct
  source 1..23: mol_type = other RNA
  modified_base 1: mod_base = OTHER; note = 2'-O-methyladenosine-3'-phosphorothioate
  modified_base 2: mod_base = OTHER; note = 2'-deoxy-2'-fluoroguanosine-3'-phosphorothioate
  modified_base 3: mod_base = OTHER; note = 2'-O-methylcytidine-3'-phosphate
  modified_base 4: mod_base = OTHER; note = 2'-O-methyladenosine-3'-phosphate
  modified_base 5: mod_base = OTHER; note = 2'-O-methylguanosine-3'-phosphate
  modified_base 6: mod_base = OTHER; note = 2'-deoxy-2'-fluorouridine-3'-phosphate
  modified_base 7: mod_base = OTHER; note = 2'-O-methyladenosine-3'-phosphate
  modified_base 8: mod_base = OTHER; note = 2'-deoxy-2'-fluoroguanosine-3'-phosphate
  modified_base 9: mod_base = OTHER; note = 2'-deoxy-2'-fluorouridine-3'-phosphate
  modified_base 10: mod_base = OTHER; note = 2'-O-methyluridine-3'-phosphate
  modified_base 11: mod_base = OTHER; note = 2'-O-methyluridine-3'-phosphate
  modified_base 12: mod_base = OTHER; note = 2'-O-methyluridine-3'-phosphate
  modified_base 13: mod_base = OTHER; note = 2'-O-methylcytidine-3'-phosphate
  modified_base 14: mod_base = OTHER; note = 2'-deoxy-2'-fluoroadenosine-3'-phosphate
  modified_base 15: mod_base = OTHER; note = 2'-O-methyluridine-3'-phosphate
  modified_base 16: mod_base = OTHER; note = 2'-deoxy-2'-fluorocytidine-3'-phosphate
  modified_base 17: mod_base = OTHER; note = 2'-O-methylcytidine-3'-phosphate
  modified_base 18: mod_base = OTHER; note = 2'-O-methyladenosine-3'-phosphate
  modified_base 19: mod_base = OTHER; note = 2'-O-methyladenosine-3'-phosphate
  modified_base 20: mod_base = OTHER; note = 2'-O-methyladenosine-3'-phosphate
  modified_base 21: mod_base = OTHER; note = 2'-O-methyluridine-3'-phosphorothioate
  modified_base 22: mod_base = OTHER; note = 2'-O-methyluridine-3'-phosphorothioate
  modified_base 23: mod_base = OTHER; note = 2'-O-methyluridine
agcagtagttttcatccaaattt

SEQ ID NO: 448 - RNA, 23 nt, synthetic construct
  source 1..23: mol_type = other RNA
  modified_base 1: mod_base = OTHER; note = 2'-O-methyladenosine-3'-phosphorothioate
  modified_base 2: mod_base = OTHER; note = 2'-deoxy-2'-fluorouridine-3'-phosphorothioate
  modified_base 3: mod_base = OTHER; note = 2'-O-methyluridine-3'-phosphate
  modified_base 4: mod_base = OTHER; note = 2'-O-methyluridine-3'-phosphate
  modified_base 5: mod_base = OTHER; note = 2'-O-methylcytidine-3'-phosphate
  modified_base 6: mod_base = OTHER; note = 2'-deoxy-2'-fluorocytidine-3'-phosphate
  modified_base 7: mod_base = OTHER; note = 2'-O-methylguanosine-3'-phosphate
  modified_base 8: mod_base = OTHER; note = 2'-deoxy-2'-fluorouridine-3'-phosphate
  modified_base 9: mod_base = OTHER; note = 2'-deoxy-2'-fluorocytidine-3'-phosphate
  modified_base 10: mod_base = OTHER; note = 2'-O-methyladenosine-3'-phosphate
  modified_base 11: mod_base = OTHER; note = 2'-O-methylguanosine-3'-phosphate
  modified_base 12: mod_base = OTHER; note = 2'-O-methylguanosine-3'-phosphate
  modified_base 13: mod_base = OTHER; note = 2'-O-methyladenosine-3'-phosphate
  modified_base 14: mod_base = OTHER; note = 2'-deoxy-2'-fluorouridine-3'-phosphate
  modified_base 15: mod_base = OTHER; note = 2'-O-methyluridine-3'-phosphate
  modified_base 16: mod_base = OTHER; note = 2'-deoxy-2'-fluoroguanosine-3'-phosphate
  modified_base 17: mod_base = OTHER; note = 2'-O-methylcytidine-3'-phosphate
  modified_base 18: mod_base = OTHER; note = 2'-O-methylguanosine-3'-phosphate
  modified_base 19: mod_base = OTHER; note = 2'-O-methylguanosine-3'-phosphate
  modified_base 20: mod_base = OTHER; note = 2'-O-methylcytidine-3'-phosphate
  modified_base 21: mod_base = OTHER; note = 2'-O-methyladenosine-3'-phosphorothioate
  modified_base 22: mod_base = OTHER; note = 2'-O-methylguanosine-3'-phosphorothioate
  modified_base 23: mod_base = OTHER; note = 2'-O-methyluridine
atttccgtcaggattgcggcagt

SEQ ID NO: 449 - RNA, 23 nt, synthetic construct
  source 1..23: mol_type = other RNA
  modified_base 1: mod_base = OTHER; note = 2'-O-methyladenosine-3'-phosphorothioate
  modified_base 2: mod_base = OTHER; note = 2'-deoxy-2'-fluoroguanosine-3'-phosphorothioate
  modified_base 3: mod_base = OTHER; note = 2'-O-methylguanosine-3'-phosphate
  modified_base 4: mod_base = OTHER; note = 2'-O-methylcytidine-3'-phosphate
  modified_base 5: mod_base = OTHER; note = 2'-O-methyluridine-3'-phosphate
  modified_base 6: mod_base = OTHER; note = 2'-deoxy-2'-fluoroguanosine-3'-phosphate
  modified_base 7: mod_base = OTHER; note = 2'-O-methyluridine-3'-phosphate
  modified_base 8: mod_base = OTHER; note = 2'-deoxy-2'-fluorouridine-3'-phosphate
  modified_base 9: mod_base = OTHER; note = 2'-deoxy-2'-fluoroguanosine-3'-phosphate
  modified_base 10: mod_base = OTHER; note = 2'-O-methylguanosine-3'-phosphate
  modified_base 11: mod_base = OTHER; note = 2'-O-methyluridine-3'-phosphate
  modified_base 12: mod_base = OTHER; note = 2'-O-methyluridine-3'-phosphate
  modified_base 13: mod_base = OTHER; note = 2'-O-methylguanosine-3'-phosphate
  modified_base 14: mod_base = OTHER; note = 2'-deoxy-2'-fluorouridine-3'-phosphate
  modified_base 15: mod_base = OTHER; note = 2'-O-methyladenosine-3'-phosphate
  modified_base 16: mod_base = OTHER; note = 2'-deoxy-2'-fluorouridine-3'-phosphate
  modified_base 17: mod_base = OTHER; note = 2'-O-methylguanosine-3'-phosphate
  modified_base 18: mod_base = OTHER; note = 2'-O-methylguanosine-3'-phosphate
  modified_base 19: mod_base = OTHER; note = 2'-O-methylcytidine-3'-phosphate
  modified_base 20: mod_base = OTHER; note = 2'-O-methyladenosine-3'-phosphate
  modified_base 21: mod_base = OTHER; note = 2'-O-methylcytidine-3'-phosphorothioate
  modified_base 22: mod_base = OTHER; note = 2'-O-methylcytidine-3'-phosphorothioate
  modified_base 23: mod_base = OTHER; note = 2'-O-methyladenosine
aggctgttggttgtatggcacca

SEQ ID NO: 450 - RNA, 23 nt, synthetic construct
  source 1..23: mol_type = other RNA
  modified_base 1: mod_base = OTHER; note = 2'-O-methyladenosine-3'-phosphorothioate
  modified_base 2: mod_base = OTHER; note = 2'-deoxy-2'-fluoroadenosine-3'-phosphorothioate
  modified_base 3: mod_base = OTHER; note = 2'-O-methylguanosine-3'-phosphate
  modified_base 4: mod_base = OTHER; note = 2'-O-methylguanosine-3'-phosphate
  modified_base 5: mod_base = OTHER; note = 2'-O-methyladenosine-3'-phosphate
  modified_base 6: mod_base = OTHER; note = 2'-deoxy-2'-fluorocytidine-3'-phosphate
  modified_base 7: mod_base = OTHER; note = 2'-O-methylguanosine-3'-phosphate
  modified_base 8: mod_base = OTHER; note = 2'-deoxy-2'-fluoroguanosine-3'-phosphate
  modified_base 9: mod_base = OTHER; note = 2'-deoxy-2'-fluorouridine-3'-phosphate
  modified_base 10: mod_base = OTHER; note = 2'-O-methyladenosine-3'-phosphate
  modified_base 11: mod_base = OTHER; note = 2'-O-methyluridine-3'-phosphate
  modified_base 12: mod_base = OTHER; note = 2'-O-methylcytidine-3'-phosphate
  modified_base 13: mod_base = OTHER; note = 2'-O-methyluridine-3'-phosphate
  modified_base 14: mod_base = OTHER; note = 2'-deoxy-2'-fluorouridine-3'-phosphate
  modified_base 15: mod_base = OTHER; note = 2'-O-methyladenosine-3'-phosphate
  modified_base 16: mod_base = OTHER; note = 2'-deoxy-2'-fluorocytidine-3'-phosphate
  modified_base 17: mod_base = OTHER; note = 2'-O-methyladenosine-3'-phosphate
  modified_base 18: mod_base = OTHER; note = 2'-O-methylguanosine-3'-phosphate
  modified_base 19: mod_base = OTHER; note = 2'-O-methyluridine-3'-phosphate
  modified_base 20: mod_base = OTHER; note = 2'-O-methyladenosine-3'-phosphate
  modified_base 21: mod_base = OTHER; note = 2'-O-methylcytidine-3'-phosphorothioate
  modified_base 22: mod_base = OTHER; note = 2'-O-methyluridine-3'-phosphorothioate
  modified_base 23: mod_base = OTHER; note = 2'-O-methylcytidine
aaggacggtatcttacagtactc

SEQ ID NO: 451 - RNA, 23 nt, synthetic construct
  source 1..23: mol_type = other RNA
  modified_base 1: mod_base = OTHER; note = 2'-O-methyladenosine-3'-phosphorothioate
  modified_base 2: mod_base = OTHER; note = 2'-deoxy-2'-fluoroguanosine-3'-phosphorothioate
  modified_base 3: mod_base = OTHER; note = 2'-O-methyladenosine-3'-phosphate
  modified_base 4: mod_base = OTHER; note = 2'-O-methylcytidine-3'-phosphate
  modified_base 5: mod_base = OTHER; note = 2'-O-methyluridine-3'-phosphate
  modified_base 6: mod_base = OTHER; note = 2'-deoxy-2'-fluoroguanosine-3'-phosphate
  modified_base 7: mod_base = OTHER; note = 2'-O-methyladenosine-3'-phosphate
  modified_base 8: mod_base = OTHER; note = 2'-deoxy-2'-fluorocytidine-3'-phosphate
  modified_base 9: mod_base = OTHER; note = 2'-deoxy-2'-fluoroadenosine-3'-phosphate
  modified_base 10: mod_base = OTHER; note = 2'-O-methylcytidine-3'-phosphate
  modified_base 11: mod_base = OTHER; note = 2'-O-methyluridine-3'-phosphate
  modified_base 12: mod_base = OTHER; note = 2'-O-methyluridine-3'-phosphate
  modified_base 13: mod_base = OTHER; note = 2'-O-methylcytidine-3'-phosphate
  modified_base 14: mod_base = OTHER; note = 2'-deoxy-2'-fluorouridine-3'-phosphate
  modified_base 15: mod_base = OTHER; note = 2'-O-methyluridine-3'-phosphate
  modified_base 16: mod_base = OTHER; note = 2'-deoxy-2'-fluorouridine-3'-phosphate
  modified_base 17: mod_base = OTHER; note = 2'-O-methylcytidine-3'-phosphate
  modified_base 18: mod_base = OTHER; note = 2'-O-methylcytidine-3'-phosphate
  modified_base 19: mod_base = OTHER; note = 2'-O-methyluridine-3'-phosphate
  modified_base 20: mod_base = OTHER; note = 2'-O-methylguanosine-3'-phosphate
  modified_base 21: mod_base = OTHER; note = 2'-O-methyluridine-3'-phosphorothioate
  modified_base 22: mod_base = OTHER; note = 2'-O-methylguanosine-3'-phosphorothioate
  modified_base 23: mod_base = OTHER; note = 2'-O-methylguanosine
agactgacacttctttcctgtgg

SEQ ID NO: 452 - RNA, 23 nt, synthetic construct
  source 1..23: mol_type = other RNA
  modified_base 1: mod_base = OTHER; note = 2'-O-methyladenosine-3'-phosphorothioate
  modified_base 2: mod_base = OTHER; note = 2'-deoxy-2'-fluoroguanosine-3'-phosphorothioate
  modified_base 3: mod_base = OTHER; note = 2'-O-methyluridine-3'-phosphate
  modified_base 4: mod_base = OTHER; note = 2'-O-methylcytidine-3'-phosphate
  modified_base 5: mod_base = OTHER; note = 2'-O-methyladenosine-3'-phosphate
  modified_base 6: mod_base = OTHER; note = 2'-deoxy-2'-fluorouridine-3'-phosphate
  modified_base 7: mod_base = OTHER; note = 2'-O-methyladenosine-3'-phosphate
  modified_base 8: mod_base = OTHER; note = 2'-deoxy-2'-fluoroguanosine-3'-phosphate
  modified_base 9: mod_base = OTHER; note = 2'-deoxy-2'-fluoroadenosine-3'-phosphate
  modified_base 10: mod_base = OTHER; note = 2'-O-methyluridine-3'-phosphate
  modified_base 11: mod_base = OTHER; note = 2'-O-methylguanosine-3'-phosphate
  modified_base 12: mod_base = OTHER; note = 2'-O-methyladenosine-3'-phosphate
  modified_base 13: mod_base = OTHER; note = 2'-O-methylcytidine-3'-phosphate
  modified_base 14: mod_base = OTHER; note = 2'-deoxy-2'-fluorocytidine-3'-phosphate
  modified_base 15: mod_base = OTHER; note = 2'-O-methyladenosine-3'-phosphate
  modified_base 16: mod_base = OTHER; note = 2'-deoxy-2'-fluoroadenosine-3'-phosphate
  modified_base 17: mod_base = OTHER; note = 2'-O-methylguanosine-3'-phosphate
  modified_base 18: mod_base = OTHER; note = 2'-O-methyladenosine-3'-phosphate
  modified_base 19: mod_base = OTHER; note = 2'-O-methylcytidine-3'-phosphate
  modified_base 20: mod_base = OTHER; note = 2'-O-methyluridine-3'-phosphate
  modified_base 21: mod_base = OTHER; note = 2'-O-methylguanosine-3'-phosphorothioate
  modified_base 22: mod_base = OTHER; note = 2'-O-methyladenosine-3'-phosphorothioate
  modified_base 23: mod_base = OTHER; note = 2'-O-methylcytidine
agtcatagatgaccaagactgac

SEQ ID NO: 453 - RNA, 23 nt, synthetic construct
  source 1..23: mol_type = other RNA
  modified_base 1: mod_base = OTHER; note = 2'-O-methyladenosine-3'-phosphorothioate
  modified_base 2: mod_base = OTHER; note = 2'-deoxy-2'-fluoroadenosine-3'-phosphorothioate
  modified_base 3: mod_base = OTHER; note = 2'-O-methylguanosine-3'-phosphate
  modified_base 4: mod_base = OTHER; note = 2'-O-methyluridine-3'-phosphate
  modified_base 5: mod_base = OTHER; note = 2'-O-methyluridine-3'-phosphate
  modified_base 6: mod_base = OTHER; note = 2'-deoxy-2'-fluorocytidine-3'-phosphate
  modified_base 7: mod_base = OTHER; note = 2'-O-methyladenosine-3'-phosphate
  modified_base 8: mod_base = OTHER; note = 2'-deoxy-2'-fluorouridine-3'-phosphate
  modified_base 9: mod_base = OTHER; note = 2'-deoxy-2'-fluorouridine-3'-phosphate
  modified_base 10: mod_base = OTHER; note = 2'-O-methylguanosine-3'-phosphate
  modified_base 11: mod_base = OTHER; note = 2'-O-methyluridine-3'-phosphate
  modified_base 12: mod_base = OTHER; note = 2'-O-methylcytidine-3'-phosphate
  modified_base 13: mod_base = OTHER; note = 2'-O-methyladenosine-3'-phosphate
  modified_base 14: mod_base = OTHER; note = 2'-deoxy-2'-fluoroguanosine-3'-phosphate
  modified_base 15: mod_base = OTHER; note = 2'-O-methylguanosine-3'-phosphate
  modified_base 16: mod_base = OTHER; note = 2'-deoxy-2'-fluorocytidine-3'-phosphate
  modified_base 17: mod_base = OTHER; note = 2'-O-methylcytidine-3'-phosphate
  modified_base 18: mod_base = OTHER; note = 2'-O-methyladenosine-3'-phosphate
  modified_base 19: mod_base = OTHER; note = 2'-O-methylguanosine-3'-phosphate
  modified_base 20: mod_base = OTHER; note = 2'-O-methylcytidine-3'-phosphate
  modified_base 21: mod_base = OTHER; note = 2'-O-methyladenosine-3'-phosphorothioate
  modified_base 22: mod_base = OTHER; note = 2'-O-methyluridine-3'-phosphorothioate
  modified_base 23: mod_base = OTHER; note = 2'-O-methyluridine
aagttcattgtcaggccagcatt

SEQ ID NO: 454 - RNA, 23 nt, synthetic construct
  source 1..23: mol_type = other RNA
  modified_base 1: mod_base = OTHER; note = 2'-O-methyladenosine-3'-phosphorothioate
  modified_base 2: mod_base = OTHER; note = 2'-deoxy-2'-fluorouridine-3'-phosphorothioate
  modified_base 3: mod_base = OTHER; note = 2'-O-methyluridine-3'-phosphate
  modified_base 4: mod_base = OTHER; note = 2'-O-methyluridine-3'-phosphate
  modified_base 5: mod_base = OTHER; note = 2'-O-methyladenosine-3'-phosphate
  modified_base 6: mod_base = OTHER; note = 2'-deoxy-2'-fluorouridine-3'-phosphate
  modified_base 7: mod_base = OTHER; note = 2'-O-methylcytidine-3'-phosphate
  modified_base 8: mod_base = OTHER; note = 2'-deoxy-2'-fluoroguanosine-3'-phosphate
  modified_base 9: mod_base = OTHER; note = 2'-deoxy-2'-fluoroguanosine-3'-phosphate
  modified_base 10: mod_base = OTHER; note = 2'-O-methylcytidine-3'-phosphate
  modified_base 11: mod_base = OTHER; note = 2'-O-methyladenosine-3'-phosphate
  modified_base 12: mod_base = OTHER; note = 2'-O-methyluridine-3'-phosphate
  modified_base 13: mod_base = OTHER; note = 2'-O-methylcytidine-3'-phosphate
  modified_base 14: mod_base = OTHER; note = 2'-deoxy-2'-fluorouridine-3'-phosphate
  modified_base 15: mod_base = OTHER; note = 2'-O-methylguanosine-3'-phosphate
  modified_base 16: mod_base = OTHER; note = 2'-deoxy-2'-fluoroguanosine-3'-phosphate
  modified_base 17: mod_base = OTHER; note = 2'-O-methyladenosine-3'-phosphate
  modified_base 18: mod_base = OTHER; note = 2'-O-methyluridine-3'-phosphate
  modified_base 19: mod_base = OTHER; note = 2'-O-methyluridine-3'-phosphate
  modified_base 20: mod_base = OTHER; note = 2'-O-methylcytidine-3'-phosphate
  modified_base 21: mod_base = OTHER; note = 2'-O-methylcytidine-3'-phosphorothioate
  modified_base 22: mod_base = OTHER; note = 2'-O-methyluridine-3'-phosphorothioate
  modified_base 23: mod_base = OTHER; note = 2'-O-methylguanosine
atttatcggcatctggattcctg

SEQ ID NO: 455 - RNA, 23 nt, synthetic construct
  source 1..23: mol_type = other RNA
  modified_base 1: mod_base = OTHER; note = 2'-O-methyladenosine-3'-phosphorothioate
  modified_base 2: mod_base = OTHER; note = 2'-deoxy-2'-fluoroguanosine-3'-phosphorothioate
  modified_base 3: mod_base = OTHER; note = 2'-O-methylguanosine-3'-phosphate
  modified_base 4: mod_base = OTHER; note = 2'-O-methyluridine-3'-phosphate
  modified_base 5: mod_base = OTHER; note = 2'-O-methylcytidine-3'-phosphate
  modified_base 6: mod_base = OTHER; note = 2'-deoxy-2'-fluorouridine-3'-phosphate
  modified_base 7: mod_base = OTHER; note = 2'-O-methylguanosine-3'-phosphate
  modified_base 8: mod_base = OTHER; note = 2'-deoxy-2'-fluorouridine-3'-phosphate
  modified_base 9: mod_base = OTHER; note = 2'-deoxy-2'-fluoroguanosine-3'-phosphate
  modified_base 10: mod_base = OTHER; note = 2'-O-methylguanosine-3'-phosphate
  modified_base 11: mod_base = OTHER; note = 2'-O-methyluridine-3'-phosphate
  modified_base 12: mod_base = OTHER; note = 2'-O-methyladenosine-3'-phosphate
  modified_base 13: mod_base = OTHER; note = 2'-O-methyladenosine-3'-phosphate
  modified_base 14: mod_base = OTHER; note = 2'-deoxy-2'-fluoroadenosine-3'-phosphate
  modified_base 15: mod_base = OTHER; note = 2'-O-methyladenosine-3'-phosphate
  modified_base 16: mod_base = OTHER; note = 2'-deoxy-2'-fluorocytidine-3'-phosphate
  modified_base 17: mod_base = OTHER; note = 2'-O-methyladenosine-3'-phosphate
  modified_base 18: mod_base = OTHER; note = 2'-O-methylcytidine-3'-phosphate
  modified_base 19: mod_base = OTHER; note = 2'-O-methylcytidine-3'-phosphate
  modified_base 20: mod_base = OTHER; note = 2'-O-methyladenosine-3'-phosphate
  modified_base 21: mod_base = OTHER; note = 2'-O-methylguanosine-3'-phosphorothioate
  modified_base 22: mod_base = OTHER; note = 2'-O-methylguanosine-3'-phosphorothioate
  modified_base 23: mod_base = OTHER; note = 2'-O-methylguanosine
aggtctgtggtaaaacaccaggg

SEQ ID NO: 456 - RNA, 23 nt, synthetic construct
  source 1..23: mol_type = other RNA
  modified_base 1: mod_base = OTHER; note = 2'-O-methyladenosine-3'-phosphorothioate
  modified_base 2: mod_base = OTHER; note = 2'-deoxy-2'-fluorouridine-3'-phosphorothioate
  modified_base 3: mod_base = OTHER; note = 2'-O-methyluridine-3'-phosphate
  modified_base 4: mod_base = OTHER; note = 2'-O-methyluridine-3'-phosphate
  modified_base 5: mod_base = OTHER; note = 2'-O-methylcytidine-3'-phosphate
  modified_base 6: mod_base = OTHER; note = 2'-deoxy-2'-fluoroadenosine-3'-phosphate
  modified_base 7: mod_base = OTHER; note = 2'-O-methylguanosine-3'-phosphate
  modified_base 8: mod_base = OTHER; note = 2'-deoxy-2'-fluoroguanosine-3'-phosphate
  modified_base 9: mod_base = OTHER; note = 2'-deoxy-2'-fluorouridine-3'-phosphate
  modified_base 10: mod_base = OTHER; note = 2'-O-methyluridine-3'-phosphate
  modified_base 11: mod_base = OTHER; note = 2'-O-methylguanosine-3'-phosphate
  modified_base 12: mod_base = OTHER; note = 2'-O-methylcytidine-3'-phosphate
  modified_base 13: mod_base = OTHER; note = 2'-O-methyladenosine-3'-phosphate
  modified_base 14: mod_base = OTHER; note = 2'-deoxy-2'-fluoroguanosine-3'-phosphate
  modified_base 15: mod_base = OTHER; note = 2'-O-methyluridine-3'-phosphate
  modified_base 16: mod_base = OTHER; note = 2'-deoxy-2'-fluoroadenosine-3'-phosphate
  modified_base 17: mod_base = OTHER; note = 2'-O-methylcytidine-3'-phosphate
  modified_base 18: mod_base = OTHER; note = 2'-O-methyluridine-3'-phosphate
  modified_base 19: mod_base = OTHER; note = 2'-O-methylcytidine-3'-phosphate
  modified_base 20: mod_base = OTHER; note = 2'-O-methylcytidine-3'-phosphate
  modified_base 21: mod_base = OTHER; note = 2'-O-methylcytidine-3'-phosphorothioate
  modified_base 22: mod_base = OTHER; note = 2'-O-methyladenosine-3'-phosphorothioate
  modified_base 23: mod_base = OTHER; note = 2'-O-methylcytidine
atttcaggttgcagtactcccac

SEQ ID NO: 457 - RNA, 23 nt, synthetic construct
  source 1..23: mol_type = other RNA
  modified_base 1: mod_base = OTHER; note = 2'-O-methyladenosine-3'-phosphorothioate
  modified_base 2: mod_base = OTHER; note = 2'-deoxy-2'-fluorouridine-3'-phosphorothioate
  modified_base 3: mod_base = OTHER; note = 2'-O-methyladenosine-3'-phosphate
  modified_base 4: mod_base = OTHER; note = 2'-O-methylcytidine-3'-phosphate
  modified_base 5: mod_base = OTHER; note = 2'-O-methyladenosine-3'-phosphate
  modified_base 6: mod_base = OTHER; note = 2'-deoxy-2'-fluoroadenosine-3'-phosphate
  modified_base 7: mod_base = OTHER; note = 2'-O-methylcytidine-3'-phosphate
  modified_base 8: mod_base = OTHER; note = 2'-deoxy-2'-fluoroadenosine-3'-phosphate
  modified_base 9: mod_base = OTHER; note = 2'-deoxy-2'-fluorocytidine-3'-phosphate
  modified_base 10: mod_base = OTHER; note = 2'-O-methyluridine-3'-phosphate
  modified_base 11: mod_base = OTHER; note = 2'-O-methylcytidine-3'-phosphate
  modified_base 12: mod_base = OTHER; note = 2'-O-methylguanosine-3'-phosphate
  modified_base 13: mod_base = OTHER; note = 2'-O-methylcytidine-3'-phosphate
  modified_base 14: mod_base = OTHER; note = 2'-deoxy-2'-fluorouridine-3'-phosphate
  modified_base 15: mod_base = OTHER; note = 2'-O-methyluridine-3'-phosphate
  modified_base 16: mod_base = OTHER; note = 2'-deoxy-2'-fluorocytidine-3'-phosphate
  modified_base 17: mod_base = OTHER; note = 2'-O-methyluridine-3'-phosphate
  modified_base 18: mod_base = OTHER; note = 2'-O-methylguanosine-3'-phosphate
  modified_base 19: mod_base = OTHER; note = 2'-O-methyluridine-3'-phosphate
  modified_base 20: mod_base = OTHER; note = 2'-O-methyluridine-3'-phosphate
  modified_base 21: mod_base = OTHER; note = 2'-O-methylcytidine-3'-phosphorothioate
  modified_base 22: mod_base = OTHER; note = 2'-O-methylcytidine-3'-phosphorothioate
  modified_base 23: mod_base = OTHER; note = 2'-O-methyluridine
atacaacactcgcttctgttcct

SEQ ID NO: 458 - RNA, 23 nt, synthetic construct
  source 1..23: mol_type = other RNA
  modified_base 1: mod_base = OTHER; note = 2'-O-methyladenosine-3'-phosphorothioate
  modified_base 2: mod_base = OTHER; note = 2'-deoxy-2'-fluoroguanosine-3'-phosphorothioate
  modified_base 3: mod_base = OTHER; note = 2'-O-methylguanosine-3'-phosphate
  modified_base 4: mod_base = OTHER; note = 2'-O-methyladenosine-3'-phosphate
  modified_base 5: mod_base = OTHER; note = 2'-O-methyladenosine-3'-phosphate
  modified_base 6: mod_base = OTHER; note = 2'-deoxy-2'-fluoroguanosine-3'-phosphate
  modified_base 7: mod_base = OTHER; note = 2'-O-methylcytidine-3'-phosphate
  modified_base 8: mod_base = OTHER; note = 2'-deoxy-2'-fluoroadenosine-3'-phosphate
  modified_base 9: mod_base = OTHER; note = 2'-deoxy-2'-fluoroguanosine-3'-phosphate
  modified_base 10: mod_base = OTHER; note = 2'-O-methylguanosine-3'-phosphate
  modified_base 11: mod_base = OTHER; note = 2'-O-methyladenosine-3'-phosphate
  modified_base 12: mod_base = OTHER; note = 2'-O-methylcytidine-3'-phosphate
  modified_base 13: mod_base = OTHER; note = 2'-O-methyladenosine-3'-phosphate
  modified_base 14: mod_base = OTHER; note = 2'-deoxy-2'-fluoroadenosine-3'-phosphate
  modified_base 15: mod_base = OTHER; note = 2'-O-methylcytidine-3'-phosphate
  modified_base 16: mod_base = OTHER; note = 2'-deoxy-2'-fluoroadenosine-3'-phosphate
  modified_base 17: mod_base = OTHER; note = 2'-O-methylguanosine-3'-phosphate
  modified_base 18: mod_base = OTHER; note = 2'-O-methylguanosine-3'-phosphate
  modified_base 19: mod_base = OTHER; note = 2'-O-methylcytidine-3'-phosphate
  modified_base 20: mod_base = OTHER; note = 2'-O-methylguanosine-3'-phosphate
  modified_base 21: mod_base = OTHER; note = 2'-O-methylguanosine-3'-phosphorothioate
  modified_base 22: mod_base = OTHER; note = 2'-O-methyladenosine-3'-phosphorothioate
  modified_base 23: mod_base = OTHER; note = 2'-O-methylguanosine
aggaagcaggacaacaggcggag

SEQ ID NO: 459 - RNA, 23 nt, synthetic construct
  source 1..23: mol_type = other RNA
  modified_base 1: mod_base = OTHER; note = 2'-O-methyladenosine-3'-phosphorothioate
  modified_base 2: mod_base = OTHER; note = 2'-deoxy-2'-fluoroadenosine-3'-phosphorothioate
  modified_base 3: mod_base = OTHER; note = 2'-O-methyladenosine-3'-phosphate
  modified_base 4: mod_base = OTHER; note = 2'-O-methylguanosine-3'-phosphate
  modified_base 5: mod_base = OTHER; note = 2'-O-methylguanosine-3'-phosphate
  modified_base 6: mod_base = OTHER; note = 2'-deoxy-2'-fluoroadenosine-3'-phosphate
  modified_base 7: mod_base = OTHER; note = 2'-O-methylguanosine-3'-phosphate
  modified_base 8: mod_base = OTHER; note = 2'-deoxy-2'-fluorouridine-3'-phosphate
  modified_base 9: mod_base = OTHER; note = 2'-deoxy-2'-fluorocytidine-3'-phosphate
  modified_base 10: mod_base = OTHER; note = 2'-O-methyluridine-3'-phosphate
  modified_base 11: mod_base = OTHER; note = 2'-O-methylcytidine-3'-phosphate
  modified_base 12: mod_base = OTHER; note = 2'-O-methyluridine-3'-phosphate
  modified_base 13: mod_base = OTHER; note = 2'-O-methyladenosine-3'-phosphate
  modified_base 14: mod_base = OTHER; note = 2'-deoxy-2'-fluorocytidine-3'-phosphate
  modified_base 15: mod_base = OTHER; note = 2'-O-methyladenosine-3'-phosphate
  modified_base 16: mod_base = OTHER; note = 2'-deoxy-2'-fluorouridine-3'-phosphate
  modified_base 17: mod_base = OTHER; note = 2'-O-methylcytidine-3'-phosphate
  modified_base 18: mod_base = OTHER; note = 2'-O-methyluridine-3'-phosphate
  modified_base 19: mod_base = OTHER; note = 2'-O-methylguanosine-3'-phosphate
  modified_base 20: mod_base = OTHER; note = 2'-O-methylguanosine-3'-phosphate
  modified_base 21: mod_base = OTHER; note = 2'-O-methyladenosine-3'-phosphorothioate
  modified_base 22: mod_base = OTHER; note = 2'-O-methyladenosine-3'-phosphorothioate
  modified_base 23: mod_base = OTHER; note = 2'-O-methylguanosine
aaaggagtctctacatctggaag

SEQ ID NO: 460 - RNA, 23 nt, synthetic construct
  source 1..23: mol_type = other RNA
  modified_base 1: mod_base = OTHER; note = 2'-O-methyladenosine-3'-phosphorothioate
  modified_base 2: mod_base = OTHER; note = 2'-deoxy-2'-fluoroadenosine-3'-phosphorothioate
  modified_base 3: mod_base = OTHER; note = 2'-O-methyladenosine-3'-phosphate
  modified_base 4: mod_base = OTHER; note = 2'-O-methyladenosine-3'-phosphate
  modified_base 5: mod_base = OTHER; note = 2'-O-methylcytidine-3'-phosphate
  modified_base 6: mod_base = OTHER; note = 2'-deoxy-2'-fluoroadenosine-3'-phosphate
  modified_base 7: mod_base = OTHER; note = 2'-O-methyluridine-3'-phosphate
  modified_base 8: mod_base = OTHER; note = 2'-deoxy-2'-fluoroadenosine-3'-phosphate
  modified_base 9: mod_base = OTHER; note = 2'-deoxy-2'-fluorocytidine-3'-phosphate
  modified_base 10: mod_base = OTHER; note = 2'-O-methyladenosine-3'-phosphate
  modified_base 11: mod_base = OTHER; note = 2'-O-methylguanosine-3'-phosphate
  modified_base 12: mod_base = OTHER; note = 2'-O-methyluridine-3'-phosphate
  modified_base 13: mod_base = OTHER; note = 2'-O-methylcytidine-3'-phosphate
  modified_base 14: mod_base = OTHER; note = 2'-deoxy-2'-fluorouridine-3'-phosphate
  modified_base 15: mod_base = OTHER; note = 2'-O-methyluridine-3'-phosphate
  modified_base 16: mod_base = OTHER; note = 2'-deoxy-2'-fluorocytidine-3'-phosphate
  modified_base 17: mod_base = OTHER; note = 2'-O-methyluridine-3'-phosphate
  modified_base 18: mod_base = OTHER; note = 2'-O-methyluridine-3'-phosphate
  modified_base 19: mod_base = OTHER; note = 2'-O-methylcytidine-3'-phosphate
  modified_base 20: mod_base = OTHER; note = 2'-O-methylguanosine-3'-phosphate
  modified_base 21: mod_base = OTHER; note = 2'-O-methylguanosine-3'-phosphorothioate
  modified_base 22: mod_base = OTHER; note = 2'-O-methyladenosine-3'-phosphorothioate
  modified_base 23: mod_base = OTHER; note = 2'-O-methyladenosine
aaaacatacagtcttcttcggaa

SEQ ID NO: 461 - RNA, 23 nt, synthetic construct
  source 1..23: mol_type = other RNA
  modified_base 1: mod_base = OTHER; note = 2'-O-methyladenosine-3'-phosphorothioate
  modified_base 2: mod_base = OTHER; note = 2'-deoxy-2'-fluoroguanosine-3'-phosphorothioate
  modified_base 3: mod_base = OTHER; note = 2'-O-methyladenosine-3'-phosphate
  modified_base 4: mod_base = OTHER; note = 2'-O-methylguanosine-3'-phosphate
  modified_base 5: mod_base = OTHER; note = 2'-O-methyluridine-3'-phosphate
  modified_base 6: mod_base = OTHER; note = 2'-deoxy-2'-fluoroguanosine-3'-phosphate
  modified_base 7: mod_base = OTHER; note = 2'-O-methyladenosine-3'-phosphate
  modified_base 8: mod_base = OTHER; note = 2'-deoxy-2'-fluoroadenosine-3'-phosphate
  modified_base 9: mod_base = OTHER; note = 2'-deoxy-2'-fluoroadenosine-3'-phosphate
  modified_base 10: mod_base = OTHER; note = 2'-O-methyladenosine-3'-phosphate
  modified_base 11: mod_base = OTHER; note = 2'-O-methyluridine-3'-phosphate
  modified_base 12: mod_base = OTHER; note = 2'-O-methylguanosine-3'-phosphate
  modified_base 13: mod_base = OTHER; note = 2'-O-methylcytidine-3'-phosphate
  modified_base 14: mod_base = OTHER; note = 2'-deoxy-2'-fluorouridine-3'-phosphate
  modified_base 15: mod_base = OTHER; note = 2'-O-methylguanosine-3'-phosphate
  modified_base 16: mod_base = OTHER; note = 2'-deoxy-2'-fluorouridine-3'-phosphate
  modified_base 17: mod_base = OTHER; note = 2'-O-methylguanosine-3'-phosphate
  modified_base 18: mod_base = OTHER; note = 2'-O-methyluridine-3'-phosphate
  modified_base 19: mod_base = OTHER; note = 2'-O-methylcytidine-3'-phosphate
  modified_base 20: mod_base = OTHER; note = 2'-O-methyluridine-3'-phosphate
  modified_base 21: mod_base = OTHER; note = 2'-O-methyladenosine-3'-phosphorothioate
  modified_base 22: mod_base = OTHER; note = 2'-O-methyluridine-3'-phosphorothioate
  modified_base 23: mod_base = OTHER; note = 2'-O-methylguanosine
agagtgaaaatgctgtgtctatg

SEQ ID NO: 462 - RNA, 23 nt, synthetic construct
  source 1..23: mol_type = other RNA
  modified_base 1: mod_base = OTHER; note = 2'-O-methyladenosine-3'-phosphorothioate
  modified_base 2: mod_base = OTHER; note = 2'-deoxy-2'-fluoroguanosine-3'-phosphorothioate
  modified_base 3: mod_base = OTHER; note = 2'-O-methyluridine-3'-phosphate
  modified_base 4: mod_base = OTHER; note = 2'-O-methylguanosine-3'-phosphate
  modified_base 5: mod_base = OTHER; note = 2'-O-methylguanosine-3'-phosphate
  modified_base 6: mod_base = OTHER; note = 2'-deoxy-2'-fluoroadenosine-3'-phosphate
  modified_base 7: mod_base = OTHER; note = 2'-O-methyluridine-3'-phosphate
  modified_base 8: mod_base = OTHER; note = 2'-deoxy-2'-fluorouridine-3'-phosphate
  modified_base 9: mod_base = OTHER; note = 2'-deoxy-2'-fluorouridine-3'-phosphate
  modified_base 10: mod_base = OTHER; note = 2'-O-methylguanosine-3'-phosphate
  modified_base 11: mod_base = OTHER; note = 2'-O-methyluridine-3'-phosphate
  modified_base 12: mod_base = OTHER; note = 2'-O-methylcytidine-3'-phosphate
  modified_base 13: mod_base = OTHER; note = 2'-O-methyluridine-3'-phosphate
  modified_base 14: mod_base = OTHER; note = 2'-deoxy-2'-fluorocytidine-3'-phosphate
  modified_base 15: mod_base = OTHER; note = 2'-O-methyluridine-3'-phosphate
  modified_base 16: mod_base = OTHER; note = 2'-deoxy-2'-fluoroguanosine-3'-phosphate
  modified_base 17: mod_base = OTHER; note = 2'-O-methylguanosine-3'-phosphate
  modified_base 18: mod_base = OTHER; note = 2'-O-methyladenosine-3'-phosphate
  modified_base 19: mod_base = OTHER; note = 2'-O-methylguanosine-3'-phosphate
  modified_base 20: mod_base = OTHER; note = 2'-O-methyluridine-3'-phosphate
  modified_base 21: mod_base = OTHER; note = 2'-O-methylguanosine-3'-phosphorothioate
  modified_base 22: mod_base = OTHER; note = 2'-O-methyladenosine-3'-phosphorothioate
  modified_base 23: mod_base = OTHER; note = 2'-O-methyladenosine
agtggatttgtctctggagtgaa

SEQ ID NO: 463 - RNA, 23 nt, synthetic construct
  source 1..23: mol_type = other RNA
  modified_base 1: mod_base = OTHER; note = 2'-O-methyladenosine-3'-phosphorothioate
  modified_base 2: mod_base = OTHER; note = 2'-deoxy-2'-fluoroadenosine-3'-phosphorothioate
  modified_base 3: mod_base = OTHER; note = 2'-O-methyluridine-3'-phosphate
  modified_base 4: mod_base = OTHER; note = 2'-O-methylcytidine-3'-phosphate
  modified_base 5: mod_base = OTHER; note = 2'-O-methyladenosine-3'-phosphate
  modified_base 6: mod_base = OTHER; note = 2'-deoxy-2'-fluorocytidine-3'-phosphate
  modified_base 7: mod_base = OTHER; note = 2'-O-methylcytidine-3'-phosphate
  modified_base 8: mod_base = OTHER; note = 2'-deoxy-2'-fluoroadenosine-3'-phosphate
  modified_base 9: mod_base = OTHER; note = 2'-deoxy-2'-fluorouridine-3'-phosphate
  modified_base 10: mod_base = OTHER; note = 2'-O-methylcytidine-3'-phosphate
  modified_base 11: mod_base = OTHER; note = 2'-O-methyladenosine-3'-phosphate
  modified_base 12: mod_base = OTHER; note = 2'-O-methylguanosine-3'-phosphate
  modified_base 13: mod_base = OTHER; note = 2'-O-methylguanosine-3'-phosphate
  modified_base 14: mod_base = OTHER; note = 2'-deoxy-2'-fluoroguanosine-3'-phosphate
  modified_base 15: mod_base = OTHER; note = 2'-O-methyluridine-3'-phosphate
  modified_base 16: mod_base = OTHER; note = 2'-deoxy-2'-fluorouridine-3'-phosphate
  modified_base 17: mod_base = OTHER; note = 2'-O-methyladenosine-3'-phosphate
  modified_base 18: mod_base = OTHER; note = 2'-O-methylcytidine-3'-phosphate
  modified_base 19: mod_base = OTHER; note = 2'-O-methylguanosine-3'-phosphate
  modified_base 20: mod_base = OTHER; note = 2'-O-methylguanosine-3'-phosphate
  modified_base 21: mod_base = OTHER; note = 2'-O-methylcytidine-3'-phosphorothioate
  modified_base 22: mod_base = OTHER; note = 2'-O-methyladenosine-3'-phosphorothioate
  modified_base 23: mod_base = OTHER; note = 2'-O-methylguanosine
aatcaccatcagggttacggcag

SEQ ID NO: 464 - RNA, 23 nt, synthetic construct
  source 1..23: mol_type = other RNA
  modified_base 1: mod_base = OTHER; note = 2'-O-methyladenosine-3'-phosphorothioate
  modified_base 2: mod_base = OTHER; note = 2'-deoxy-2'-fluorouridine-3'-phosphorothioate
  modified_base 3: mod_base = OTHER; note = 2'-O-methyluridine-3'-phosphate
  modified_base 4: mod_base = OTHER; note = 2'-O-methylguanosine-3'-phosphate
  modified_base 5: mod_base = OTHER; note = 2'-O-methylguanosine-3'-phosphate
  modified_base 6: mod_base = OTHER; note = 2'-deoxy-2'-fluoroadenosine-3'-phosphate
  modified_base 7: mod_base = OTHER; note = 2'-O-methyluridine-3'-phosphate
  modified_base 8: mod_base = OTHER; note = 2'-deoxy-2'-fluorouridine-3'-phosphate
  modified_base 9: mod_base = OTHER; note = 2'-deoxy-2'-fluorouridine-3'-phosphate
  modified_base 10: mod_base = OTHER; note = 2'-O-methylguanosine-3'-phosphate
  modified_base 11: mod_base = OTHER; note = 2'-O-methyluridine-3'-phosphate
  modified_base 12: mod_base = OTHER; note = 2'-O-methylcytidine-3'-phosphate
  modified_base 13: mod_base = OTHER; note = 2'-O-methylguanosine-3'-phosphate
  modified_base 14: mod_base = OTHER; note = 2'-deoxy-2'-fluorouridine-3'-phosphate
  modified_base 15: mod_base = OTHER; note = 2'-O-methylguanosine-3'-phosphate
  modified_base 16: mod_base = OTHER; note = 2'-deoxy-2'-fluorouridine-3'-phosphate
  modified_base 17: mod_base = OTHER; note = 2'-O-methyladenosine-3'-phosphate
  modified_base 18: mod_base = OTHER; note = 2'-O-methylguanosine-3'-phosphate
  modified_base 19: mod_base = OTHER; note = 2'-O-methylcytidine-3'-phosphate
  modified_base 20: mod_base = OTHER; note = 2'-O-methyladenosine-3'-phosphate
  modified_base 21: mod_base = OTHER; note = 2'-O-methylcytidine-3'-phosphorothioate
  modified_base 22: mod_base = OTHER; note = 2'-O-methylcytidine-3'-phosphorothioate
  modified_base 23: mod_base = OTHER; note = 2'-O-methyladenosine
attggatttgtcgtgtagcacca

SEQ ID NO: 465 - RNA, 23 nt, synthetic construct
  source 1..23: mol_type = other RNA
  modified_base 1: mod_base = OTHER; note = 2'-O-methyladenosine-3'-phosphorothioate
  modified_base 2: mod_base = OTHER; note = 2'-deoxy-2'-fluoroadenosine-3'-phosphorothioate
  modified_base 3: mod_base = OTHER; note = 2'-O-methylguanosine-3'-phosphate
  modified_base 4: mod_base = OTHER; note = 2'-O-methyluridine-3'-phosphate
  modified_base 5: mod_base = OTHER; note = 2'-O-methylcytidine-3'-phosphate
  modified_base 6: mod_base = OTHER; note = 2'-deoxy-2'-fluoroguanosine-3'-phosphate
  modified_base 7: mod_base = OTHER; note = 2'-O-methyluridine-3'-phosphate
  modified_base 8: mod_base = OTHER; note = 2'-deoxy-2'-fluoroadenosine-3'-phosphate
  modified_base 9: mod_base = OTHER; note = 2'-deoxy-2'-fluoroadenosine-3'-phosphate
  modified_base 10: mod_base = OTHER; note = 2'-O-methyladenosine-3'-phosphate
  modified_base 11: mod_base = OTHER; note = 2'-O-methylguanosine-3'-phosphate
  modified_base 12: mod_base = OTHER; note = 2'-O-methyluridine-3'-phosphate
  modified_base 13: mod_base = OTHER; note = 2'-O-methyluridine-3'-phosphate
  modified_base 14: mod_base = OTHER; note = 2'-deoxy-2'-fluorouridine-3'-phosphate
  modified_base 15: mod_base = OTHER; note = 2'-O-methyluridine-3'-phosphate
  modified_base 16: mod_base = OTHER; note = 2'-deoxy-2'-fluorocytidine-3'-phosphate
  modified_base 17: mod_base = OTHER; note = 2'-O-methyluridine-3'-phosphate
  modified_base 18: mod_base = OTHER; note = 2'-O-methyluridine-3'-phosphate
  modified_base 19: mod_base = OTHER; note = 2'-O-methylguanosine-3'-phosphate
  modified_base 20: mod_base = OTHER; note = 2'-O-methylguanosine-3'-phosphate
  modified_base 21: mod_base = OTHER; note = 2'-O-methyladenosine-3'-phosphorothioate
  modified_base 22: mod_base = OTHER; note = 2'-O-methyluridine-3'-phosphorothioate
  modified_base 23: mod_base = OTHER; note = 2'-O-methyluridine
aagtcgtaaagttttcttggatt

SEQ ID NO: 466 - RNA, 23 nt, synthetic construct
  source 1..23: mol_type = other RNA
  modified_base 1: mod_base = OTHER; note = 2'-O-methyladenosine-3'-phosphorothioate
  modified_base 2: mod_base = OTHER; note = 2'-deoxy-2'-fluorouridine-3'-phosphorothioate
  modified_base 3: mod_base = OTHER; note = 2'-O-methylguanosine-3'-phosphate
  modified_base 4: mod_base = OTHER; note = 2'-O-methyladenosine-3'-phosphate
  modified_base 5: mod_base = OTHER; note = 2'-O-methylguanosine-3'-phosphate
  modified_base 6: mod_base = OTHER; note = 2'-deoxy-2'-fluoroguanosine-3'-phosphate
  modified_base 7: mod_base = OTHER; note = 2'-O-methylguanosine-3'-phosphate
  modified_base 8: mod_base = OTHER; note = 2'-deoxy-2'-fluoroadenosine-3'-phosphate
  modified_base 9: mod_base = OTHER; note = 2'-deoxy-2'-fluorocytidine-3'-phosphate
  modified_base 10: mod_base = OTHER; note = 2'-O-methyladenosine-3'-phosphate
  modified_base 11: mod_base = OTHER; note = 2'-O-methyluridine-3'-phosphate
  modified_base 12: mod_base = OTHER; note = 2'-O-methylcytidine-3'-phosphate
  modified_base 13: mod_base = OTHER; note = 2'-O-methyladenosine-3'-phosphate
  modified_base 14: mod_base = OTHER; note = 2'-deoxy-2'-fluorocytidine-3'-phosphate
  modified_base 15: mod_base = OTHER; note = 2'-O-methyladenosine-3'-phosphate
  modified_base 16: mod_base = OTHER; note = 2'-deoxy-2'-fluoroguanosine-3'-phosphate
  modified_base 17: mod_base = OTHER; note = 2'-O-methyluridine-3'-phosphate
  modified_base 18: mod_base = OTHER; note = 2'-O-methyladenosine-3'-phosphate
  modified_base 19: mod_base = OTHER; note = 2'-O-methylguanosine-3'-phosphate
  modified_base 20: mod_base = OTHER; note = 2'-O-methyluridine-3'-phosphate
  modified_base 21: mod_base = OTHER; note = 2'-O-methylcytidine-3'-phosphorothioate
  modified_base 22: mod_base = OTHER; note = 2'-O-methylguanosine-3'-phosphorothioate
  modified_base 23: mod_base = OTHER; note = 2'-O-methyluridine
atgagggacatcacagtagtcgt

SEQ ID NO: 467 - RNA, 23 nt, synthetic construct
  source 1..23: mol_type = other RNA
  modified_base 1: mod_base = OTHER; note = 2'-O-methyladenosine-3'-phosphorothioate
  modified_base 2: mod_base = OTHER; note = 2'-deoxy-2'-fluorouridine-3'-phosphorothioate
  modified_base 3: mod_base = OTHER; note = 2'-O-methyluridine-3'-phosphate
  modified_base 4: mod_base = OTHER; note = 2'-O-methylguanosine-3'-phosphate
  modified_base 5: mod_base = OTHER; note = 2'-O-methyluridine-3'-phosphate
  modified_base 6: mod_base = OTHER; note = 2'-deoxy-2'-fluorouridine-3'-phosphate
  modified_base 7: mod_base = OTHER; note = 2'-O-methylcytidine-3'-phosphate
  modified_base 8: mod_base = OTHER; note = 2'-deoxy-2'-fluorouridine-3'-phosphate
  modified_base 9: mod_base = OTHER; note = 2'-deoxy-2'-fluoroadenosine-3'-phosphate
  modified_base 10: mod_base = OTHER; note = 2'-O-methyladenosine-3'-phosphate
  modified_base 11: mod_base = OTHER; note = 2'-O-methylguanosine-3'-phosphate
  modified_base 12: mod_base = OTHER; note = 2'-O-methyladenosine-3'-phosphate
  modified_base 13: mod_base = OTHER; note = 2'-O-methylcytidine-3'-phosphate
  modified_base 14: mod_base = OTHER; note = 2'-deoxy-2'-fluorouridine-3'-phosphate
  modified_base 15: mod_base = OTHER; note = 2'-O-methylguanosine-3'-phosphate
  modified_base 16: mod_base = OTHER; note = 2'-deoxy-2'-fluoroadenosine-3'-phosphate
  modified_base 17: mod_base = OTHER; note = 2'-O-methylcytidine-3'-phosphate
  modified_base 18: mod_base = OTHER; note = 2'-O-methyluridine-3'-phosphate
  modified_base 19: mod_base = OTHER; note = 2'-O-methyluridine-3'-phosphate
  modified_base 20: mod_base = OTHER; note = 2'-O-methylguanosine-3'-phosphate
  modified_base 21: mod_base = OTHER; note = 2'-O-methylcytidine-3'-phosphorothioate
  modified_base 22: mod_base = OTHER; note = 2'-O-methylcytidine-3'-phosphorothioate
  modified_base 23: mod_base = OTHER; note = 2'-O-methyladenosine
attgttctaagactgacttgcca

SEQ ID NO: 468 - RNA, 23 nt, synthetic construct
  source 1..23: mol_type = other RNA
  modified_base 1: mod_base = OTHER; note = 2'-O-methyladenosine-3'-phosphorothioate
  modified_base 2: mod_base = OTHER; note = 2'-deoxy-2'-fluoroadenosine-3'-phosphorothioate
  modified_base 3: mod_base = OTHER; note = 2'-O-methylguanosine-3'-phosphate
  modified_base 4: mod_base = OTHER; note = 2'-O-methyluridine-3'-phosphate
  modified_base 5: mod_base = OTHER; note = 2'-O-methylguanosine-3'-phosphate
  modified_base 6: mod_base = OTHER; note = 2'-deoxy-2'-fluorocytidine-3'-phosphate
  modified_base 7: mod_base = OTHER; note = 2'-O-methyladenosine-3'-phosphate
  modified_base 8: mod_base = OTHER; note = 2'-deoxy-2'-fluorouridine-3'-phosphate
  modified_base 9: mod_base = OTHER; note = 2'-deoxy-2'-fluorouridine-3'-phosphate
  modified_base 10: mod_base = OTHER; note = 2'-O-methylcytidine-3'-phosphate
  modified_base 11: mod_base = OTHER; note = 2'-O-methylcytidine-3'-phosphate
  modified_base 12: mod_base = OTHER; note = 2'-O-methyladenosine-3'-phosphate
  modified_base 13: mod_base = OTHER; note = 2'-O-methyladenosine-3'-phosphate
  modified_base 14: mod_base = OTHER; note = 2'-deoxy-2'-fluoroadenosine-3'-phosphate
  modified_base 15: mod_base = OTHER; note = 2'-O-methylcytidine-3'-phosphate
  modified_base 16: mod_base = OTHER; note = 2'-deoxy-2'-fluorocytidine-3'-phosphate
  modified_base 17: mod_base = OTHER; note = 2'-O-methyluridine-3'-phosphate
  modified_base 18: mod_base = OTHER; note = 2'-O-methyluridine-3'-phosphate
  modified_base 19: mod_base = OTHER; note = 2'-O-methylguanosine-3'-phosphate
  modified_base 20: mod_base = OTHER; note = 2'-O-methyluridine-3'-phosphate
  modified_base 21: mod_base = OTHER; note = 2'-O-methyluridine-3'-phosphorothioate
  modified_base 22: mod_base = OTHER; note = 2'-O-methylcytidine-3'-phosphorothioate
  modified_base 23: mod_base = OTHER; note = 2'-O-methyluridine
aagtgcattccaaaccttgttct

SEQ ID NO: 469 - RNA, 23 nt, synthetic construct
  source 1..23: mol_type = other RNA
  modified_base 1: mod_base = OTHER; note = 2'-O-methyladenosine-3'-phosphorothioate
  modified_base 2: mod_base = OTHER; note = 2'-deoxy-2'-fluoroadenosine-3'-phosphorothioate
  modified_base 3: mod_base = OTHER; note = 2'-O-methylcytidine-3'-phosphate
  modified_base 4: mod_base = OTHER; note = 2'-O-methyluridine-3'-phosphate
  modified_base 5: mod_base = OTHER; note = 2'-O-methyluridine-3'-phosphate
  modified_base 6: mod_base = OTHER; note = 2'-deoxy-2'-fluorocytidine-3'-phosphate
  modified_base 7: mod_base = OTHER; note = 2'-O-methyluridine-3'-phosphate
  modified_base 8: mod_base = OTHER; note = 2'-deoxy-2'-fluorocytidine-3'-phosphate
  modified_base 9: mod_base = OTHER; note = 2'-deoxy-2'-fluorocytidine-3'-phosphate
  modified_base 10: mod_base = OTHER; note = 2'-O-methyladenosine-3'-phosphate
  modified_base 11: mod_base = OTHER; note = 2'-O-methyladenosine-3'-phosphate
  modified_base 12: mod_base = OTHER; note = 2'-O-methylguanosine-3'-phosphate
  modified_base 13: mod_base = OTHER; note = 2'-O-methylcytidine-3'-phosphate
  modified_base 14: mod_base = OTHER; note = 2'-deoxy-2'-fluoroadenosine-3'-phosphate
  modified_base 15: mod_base = OTHER; note = 2'-O-methylguanosine-3'-phosphate
  modified_base 16: mod_base = OTHER; note = 2'-deoxy-2'-fluorouridine-3'-phosphate
  modified_base 17: mod_base = OTHER; note = 2'-O-methylguanosine-3'-phosphate
  modified_base 18: mod_base = OTHER; note = 2'-O-methylguanosine-3'-phosphate
  modified_base 19: mod_base = OTHER; note = 2'-O-methylguanosine-3'-phosphate
  modified_base 20: mod_base = OTHER; note = 2'-O-methylcytidine-3'-phosphate
  modified_base 21: mod_base = OTHER; note = 2'-O-methyladenosine-3'-phosphorothioate
  modified_base 22: mod_base = OTHER; note = 2'-O-methylguanosine-3'-phosphorothioate
  modified_base 23: mod_base = OTHER; note = 2'-O-methylcytidine
aacttctccaagcagtgggcagc

SEQ ID NO: 470 - RNA, 23 nt, synthetic construct
  source 1..23: mol_type = other RNA
  modified_base 1: mod_base = OTHER; note = 2'-O-methyladenosine-3'-phosphorothioate
  modified_base 2: mod_base = OTHER; note = 2'-deoxy-2'-fluorouridine-3'-phosphorothioate
  modified_base 3: mod_base = OTHER; note = 2'-O-methyluridine-3'-phosphate
  modified_base 4: mod_base = OTHER; note = 2'-O-methylcytidine-3'-phosphate
  modified_base 5: mod_base = OTHER; note = 2'-O-methylguanosine-3'-phosphate
  modified_base 6: mod_base = OTHER; note = 2'-deoxy-2'-fluoroadenosine-3'-phosphate
  modified_base 7: mod_base = OTHER; note = 2'-O-methylguanosine-3'-phosphate
  modified_base 8: mod_base = OTHER; note = 2'-deoxy-2'-fluoroadenosine-3'-phosphate
  modified_base 9: mod_base = OTHER; note = 2'-deoxy-2'-fluorouridine-3'-phosphate
  modified_base 10: mod_base = OTHER; note = 2'-O-methyluridine-3'-phosphate
  modified_base 11: mod_base = OTHER; note = 2'-O-methylcytidine-3'-phosphate
  modified_base 12: mod_base = OTHER; note = 2'-O-methyladenosine-3'-phosphate
  modified_base 13: mod_base = OTHER; note = 2'-O-methylcytidine-3'-phosphate
  modified_base 14: mod_base = OTHER; note = 2'-deoxy-2'-fluorouridine-3'-phosphate
  modified_base 15: mod_base = OTHER; note = 2'-O-methyluridine-3'-phosphate
  modified_base 16: mod_base = OTHER; note = 2'-deoxy-2'-fluorocytidine-3'-phosphate
  modified_base 17: mod_base = OTHER; note = 2'-O-methyluridine-3'-phosphate
  modified_base 18: mod_base = OTHER; note = 2'-O-methyluridine-3'-phosphate
  modified_base 19: mod_base = OTHER; note = 2'-O-methylguanosine-3'-phosphate
  modified_base 20: mod_base = OTHER; note = 2'-O-methylguanosine-3'-phosphate
  modified_base 21: mod_base = OTHER; note = 2'-O-methyluridine-3'-phosphorothioate
  modified_base 22: mod_base = OTHER; note = 2'-O-methylguanosine-3'-phosphorothioate
  modified_base 23: mod_base = OTHER; note = 2'-O-methyluridine
attcgagattcacttcttggtgt

SEQ ID NO: 471 - RNA, 23 nt, synthetic construct
  source 1..23: mol_type = other RNA
  modified_base 1: mod_base = OTHER; note = 2'-O-methyladenosine-3'-phosphorothioate
  modified_base 2: mod_base = OTHER; note = 2'-deoxy-2'-fluorouridine-3'-phosphorothioate
  modified_base 3: mod_base = OTHER; note = 2'-O-methylcytidine-3'-phosphate
  modified_base 4: mod_base = OTHER; note = 2'-O-methyluridine-3'-phosphate
  modified_base 5: mod_base = OTHER; note = 2'-O-methyladenosine-3'-phosphate
  modified_base 6: mod_base = OTHER; note = 2'-deoxy-2'-fluorouridine-3'-phosphate
  modified_base 7: mod_base = OTHER; note = 2'-O-methyluridine-3'-phosphate
  modified_base 8: mod_base = OTHER; note = 2'-deoxy-2'-fluorouridine-3'-phosphate
  modified_base 9: mod_base = OTHER; note = 2'-deoxy-2'-fluorocytidine-3'-phosphate
  modified_base 10: mod_base = OTHER; note = 2'-O-methylcytidine-3'-phosphate
  modified_base 11: mod_base = OTHER; note = 2'-O-methyluridine-3'-phosphate
  modified_base 12: mod_base = OTHER; note = 2'-O-methylguanosine-3'-phosphate
  modified_base 13: mod_base = OTHER; note = 2'-O-methyladenosine-3'-phosphate
  modified_base 14: mod_base = OTHER; note = 2'-deoxy-2'-fluoroadenosine-3'-phosphate
  modified_base 15: mod_base = OTHER; note = 2'-O-methylcytidine-3'-phosphate
  modified_base 16: mod_base = OTHER; note = 2'-deoxy-2'-fluoroadenosine-3'-phosphate
  modified_base 17: mod_base = OTHER; note = 2'-O-methyluridine-3'-phosphate
  modified_base 18: mod_base = OTHER; note = 2'-O-methylguanosine-3'-phosphate
  modified_base 19: mod_base = OTHER; note = 2'-O-methylcytidine-3'-phosphate
  modified_base 20: mod_base = OTHER; note = 2'-O-methylguanosine-3'-phosphate
  modified_base 21: mod_base = OTHER; note = 2'-O-methylguanosine-3'-phosphorothioate
  modified_base 22: mod_base = OTHER; note = 2'-O-methyluridine-3'-phosphorothioate
  modified_base 23: mod_base = OTHER; note = 2'-O-methyluridine
atctatttcctgaacatgcggtt

SEQ ID NO: 472 - RNA, 23 nt, synthetic construct
  source 1..23: mol_type = other RNA
  modified_base 1: mod_base = OTHER; note = 2'-O-methyladenosine-3'-phosphorothioate
  modified_base 2: mod_base = OTHER; note = 2'-deoxy-2'-fluorouridine-3'-phosphorothioate
  modified_base 3: mod_base = OTHER; note = 2'-O-methyladenosine-3'-phosphate
  modified_base 4: mod_base = OTHER; note = 2'-O-methylguanosine-3'-phosphate
  modified_base 5: mod_base = OTHER; note = 2'-O-methylcytidine-3'-phosphate
  modified_base 6: mod_base = OTHER; note = 2'-deoxy-2'-fluoroadenosine-3'-phosphate
  modified_base 7: mod_base = OTHER; note = 2'-O-methyladenosine-3'-phosphate
  modified_base 8: mod_base = OTHER; note = 2'-deoxy-2'-fluoroguanosine-3'-phosphate
  modified_base 9: mod_base = OTHER; note = 2'-deoxy-2'-fluoroguanosine-3'-phosphate
  modified_base 10: mod_base = OTHER; note = 2'-O-methylcytidine-3'-phosphate
  modified_base 11: mod_base = OTHER; note = 2'-O-methyladenosine-3'-phosphate
  modified_base 12: mod_base = OTHER; note = 2'-O-methyladenosine-3'-phosphate
  modified_base 13: mod_base = OTHER; note = 2'-O-methyluridine-3'-phosphate
  modified_base 14: mod_base = OTHER; note = 2'-deoxy-2'-fluoroadenosine-3'-phosphate
  modified_base 15: mod_base = OTHER; note = 2'-O-methyluridine-3'-phosphate
  modified_base 16: mod_base = OTHER; note = 2'-deoxy-2'-fluorocytidine-3'-phosphate
  modified_base 17: mod_base = OTHER; note = 2'-O-methyluridine-3'-phosphate
  modified_base 18: mod_base = OTHER; note = 2'-O-methyluridine-3'-phosphate
  modified_base 19: mod_base = OTHER; note = 2'-O-methyluridine-3'-phosphate
  modified_base 20: mod_base = OTHER; note = 2'-O-methyluridine-3'-phosphate
  modified_base 21: mod_base = OTHER; note = 2'-O-methylcytidine-3'-phosphorothioate
  modified_base 22: mod_base = OTHER; note = 2'-O-methylguanosine-3'-phosphorothioate
  modified_base 23: mod_base = OTHER; note = 2'-O-methyluridine
atagcaaggcaatatcttttcgt

SEQ ID NO: 473 - RNA, 23 nt, synthetic construct
  source 1..23: mol_type = other RNA
  modified_base 1: mod_base = OTHER; note = 2'-O-methyladenosine-3'-phosphorothioate
  modified_base 2: mod_base = OTHER; note = 2'-deoxy-2'-fluoroadenosine-3'-phosphorothioate
  modified_base 3: mod_base = OTHER; note = 2'-O-methylguanosine-3'-phosphate
  modified_base 4: mod_base = OTHER; note = 2'-O-methylguanosine-3'-phosphate
  modified_base 5: mod_base = OTHER; note = 2'-O-methyladenosine-3'-phosphate
  modified_base 6: mod_base = OTHER; note = 2'-deoxy-2'-fluorocytidine-3'-phosphate
  modified_base 7: mod_base = OTHER; note = 2'-O-methyluridine-3'-phosphate
  modified_base 8: mod_base = OTHER; note = 2'-deoxy-2'-fluoroguanosine-3'-phosphate
  modified_base 9: mod_base = OTHER; note = 2'-deoxy-2'-fluorocytidine-3'-phosphate
  modified_base 10: mod_base = OTHER; note = 2'-O-methyluridine-3'-phosphate
  modified_base 11: mod_base = OTHER; note = 2'-O-methyluridine-3'-phosphate
  modified_base 12: mod_base = OTHER; note = 2'-O-methyladenosine-3'-phosphate
  modified_base 13: mod_base = OTHER; note = 2'-O-methylguanosine-3'-phosphate
  modified_base 14: mod_base = OTHER; note = 2'-deoxy-2'-fluorocytidine-3'-phosphate
  modified_base 15: mod_base = OTHER; note = 2'-O-methyluridine-3'-phosphate
  modified_base 16: mod_base = OTHER; note = 2'-deoxy-2'-fluorouridine-3'-phosphate
  modified_base 17: mod_base = OTHER; note = 2'-O-methyluridine-3'-phosphate
  modified_base 18: mod_base = OTHER; note = 2'-O-methyladenosine-3'-phosphate
  modified_base 19: mod_base = OTHER; note = 2'-O-methylguanosine-3'-phosphate
  modified_base 20: mod_base = OTHER; note = 2'-O-methylcytidine-3'-phosphate
  modified_base 21: mod_base = OTHER; note = 2'-O-methyladenosine-3'-phosphorothioate
  modified_base 22: mod_base = OTHER; note = 2'-O-methyladenosine-3'-phosphorothioate
  modified_base 23: mod_base = OTHER; note = 2'-O-methylguanosine
aaggactgcttagctttagcaag

SEQ ID NO: 474 - RNA, 23 nt, synthetic construct
  source 1..23: mol_type = other RNA
  modified_base 1: mod_base = OTHER; note = 2'-O-methyladenosine-3'-phosphorothioate
  modified_base 2: mod_base = OTHER; note = 2'-deoxy-2'-fluoroguanosine-3'-phosphorothioate
  modified_base 3: mod_base = OTHER; note = 2'-O-methyladenosine-3'-phosphate
  modified_base 4: mod_base = OTHER; note = 2'-O-methyluridine-3'-phosphate
  modified_base 5: mod_base = OTHER; note = 2'-O-methyluridine-3'-phosphate
  modified_base 6: mod_base = OTHER; note = 2'-deoxy-2'-fluoroadenosine-3'-phosphate
  modified_base 7: mod_base = OTHER; note = 2'-O-methylcytidine-3'-phosphate
  modified_base 8: mod_base = OTHER; note = 2'-deoxy-2'-fluorouridine-3'-phosphate
  modified_base 9: mod_base = OTHER; note = 2'-deoxy-2'-fluorouridine-3'-phosphate
  modified_base 10: mod_base = OTHER; note = 2'-O-methyluridine-3'-phosphate
  modified_base 11: mod_base = OTHER; note = 2'-O-methylguanosine-3'-phosphate
  modified_base 12: mod_base = OTHER; note = 2'-O-methyluridine-3'-phosphate
  modified_base 13: mod_base = OTHER; note = 2'-O-methylcytidine-3'-phosphate
  modified_base 14: mod_base = OTHER; note = 2'-deoxy-2'-fluoroadenosine-3'-phosphate
  modified_base 15: mod_base = OTHER; note = 2'-O-methylguanosine-3'-phosphate
  modified_base 16: mod_base = OTHER; note = 2'-deoxy-2'-fluorouridine-3'-phosphate
  modified_base 17: mod_base = OTHER; note = 2'-O-methylguanosine-3'-phosphate
  modified_base 18: mod_base = OTHER; note = 2'-O-methyladenosine-3'-phosphate
  modified_base 19: mod_base = OTHER; note = 2'-O-methyluridine-3'-phosphate
  modified_base 20: mod_base = OTHER; note = 2'-O-methylguanosine-3'-phosphate
  modified_base 21: mod_base = OTHER; note = 2'-O-methyladenosine-3'-phosphorothioate
  modified_base 22: mod_base = OTHER; note = 2'-O-methylcytidine-3'-phosphorothioate
  modified_base 23: mod_base = OTHER; note = 2'-O-methylguanosine
agattactttgtcagtgatgacg

SEQ ID NO: 475 - RNA, 23 nt, synthetic construct
  source 1..23: mol_type = other RNA
  modified_base 1: mod_base = OTHER; note = 2'-O-methyladenosine-3'-phosphorothioate
  modified_base 2: mod_base = OTHER; note = 2'-deoxy-2'-fluoroadenosine-3'-phosphorothioate
  modified_base 3: mod_base = OTHER; note = 2'-O-methylguanosine-3'-phosphate
  modified_base 4: mod_base = OTHER; note = 2'-O-methylcytidine-3'-phosphate
  modified_base 5: mod_base = OTHER; note = 2'-O-methylcytidine-3'-phosphate
  modified_base 6: mod_base = OTHER; note = 2'-deoxy-2'-fluoroadenosine-3'-phosphate
  modified_base 7: mod_base = OTHER; note = 2'-O-methylguanosine-3'-phosphate
  modified_base 8: mod_base = OTHER; note = 2'-deoxy-2'-fluorouridine-3'-phosphate
  modified_base 9: mod_base = OTHER; note = 2'-deoxy-2'-fluoroguanosine-3'-phosphate
  modified_base 10: mod_base = OTHER; note = 2'-O-methyladenosine-3'-phosphate
  modified_base 11: mod_base = OTHER; note = 2'-O-methyluridine-3'-phosphate
  modified_base 12: mod_base = OTHER; note = 2'-O-methylguanosine-3'-phosphate
  modified_base 13: mod_base = OTHER; note = 2'-O-methyladenosine-3'-phosphate
  modified_base 14: mod_base = OTHER; note = 2'-deoxy-2'-fluoroadenosine-3'-phosphate
  modified_base 15: mod_base = OTHER; note = 2'-O-methyladenosine-3'-phosphate
  modified_base 16: mod_base = OTHER; note = 2'-deoxy-2'-fluorocytidine-3'-phosphate
  modified_base 17: mod_base = OTHER; note = 2'-O-methyladenosine-3'-phosphate
  modified_base 18: mod_base = OTHER; note = 2'-O-methyluridine-3'-phosphate
  modified_base 19: mod_base = OTHER; note = 2'-O-methyluridine-3'-phosphate
  modified_base 20: mod_base = OTHER; note = 2'-O-methylcytidine-3'-phosphate
  modified_base 21: mod_base = OTHER; note = 2'-O-methylguanosine-3'-phosphorothioate
  modified_base 22: mod_base = OTHER; note = 2'-O-methylguanosine-3'-phosphorothioate
  modified_base 23: mod_base = OTHER; note = 2'-O-methyluridine
aagccagtgatgaaacattcggt

SEQ ID NO: 476 - RNA, 23 nt, synthetic construct
  source 1..23: mol_type = other RNA
  modified_base 1: mod_base = OTHER; note = 2'-O-methyladenosine-3'-phosphorothioate
  modified_base 2: mod_base = OTHER; note = 2'-deoxy-2'-fluoroadenosine-3'-phosphorothioate
  modified_base 3: mod_base = OTHER; note = 2'-O-methyladenosine-3'-phosphate
  modified_base 4: mod_base = OTHER; note = 2'-O-methyladenosine-3'-phosphate
  modified_base 5: mod_base = OTHER; note = 2'-O-methyladenosine-3'-phosphate
  modified_base 6: mod_base = OTHER; note = 2'-deoxy-2'-fluoroguanosine-3'-phosphate
  modified_base 7: mod_base = OTHER; note = 2'-O-methyluridine-3'-phosphate
  modified_base 8: mod_base = OTHER; note = 2'-deoxy-2'-fluoroadenosine-3'-phosphate
  modified_base 9: mod_base = OTHER; note = 2'-deoxy-2'-fluorocytidine-3'-phosphate
  modified_base 10: mod_base = OTHER; note = 2'-O-methylcytidine-3'-phosphate
  modified_base 11: mod_base = OTHER; note = 2'-O-methyluridine-3'-phosphate
  modified_base 12: mod_base = OTHER; note = 2'-O-methyluridine-3'-phosphate
  modified_base 13: mod_base = OTHER; note = 2'-O-methylguanosine-3'-phosphate
  modified_base 14: mod_base = OTHER; note = 2'-deoxy-2'-fluoroguanosine-3'-phosphate
  modified_base 15: mod_base = OTHER; note = 2'-O-methylguanosine-3'-phosphate
  modified_base 16: mod_base = OTHER; note = 2'-deoxy-2'-fluorouridine-3'-phosphate
  modified_base 17: mod_base = OTHER; note = 2'-O-methyluridine-3'-phosphate
  modified_base 18: mod_base = OTHER; note = 2'-O-methyluridine-3'-phosphate
  modified_base 19: mod_base = OTHER; note = 2'-O-methylcytidine-3'-phosphate
  modified_base 20: mod_base = OTHER; note = 2'-O-methyluridine-3'-phosphate
  modified_base 21: mod_base = OTHER; note = 2'-O-methylcytidine-3'-phosphorothioate
  modified_base 22: mod_base = OTHER; note = 2'-O-methylcytidine-3'-phosphorothioate
  modified_base 23: mod_base = OTHER; note = 2'-O-methylcytidine
aaaaagtaccttgggtttctccc

SEQ ID NO: 477 - RNA, 23 nt, synthetic construct
  source 1..23: mol_type = other RNA
  modified_base 1: mod_base = OTHER; note = 2'-O-methyladenosine-3'-phosphorothioate
  modified_base 2: mod_base = OTHER; note = 2'-deoxy-2'-fluoroadenosine-3'-phosphorothioate
  modified_base 3: mod_base = OTHER; note = 2'-O-methylcytidine-3'-phosphate
  modified_base 4: mod_base = OTHER; note = 2'-O-methyluridine-3'-phosphate
  modified_base 5: mod_base = OTHER; note = 2'-O-methyluridine-3'-phosphate
  modified_base 6: mod_base = OTHER; note = 2'-deoxy-2'-fluorouridine-3'-phosphate
  modified_base 7: mod_base = OTHER; note = 2'-O-methyladenosine-3'-phosphate
  modified_base 8: mod_base = OTHER; note = 2'-deoxy-2'-fluorouridine-3'-phosphate
  modified_base 9: mod_base = OTHER; note = 2'-deoxy-2'-fluorouridine-3'-phosphate
  modified_base 10: mod_base = OTHER; note = 2'-O-methylcytidine-3'-phosphate
  modified_base 11: mod_base = OTHER; note = 2'-O-methyluridine-3'-phosphate
  modified_base 12: mod_base = OTHER; note = 2'-O-methylcytidine-3'-phosphate
  modified_base 13: mod_base = OTHER; note = 2'-O-methyladenosine-3'-phosphate
  modified_base 14: mod_base = OTHER; note = 2'-deoxy-2'-fluoroadenosine-3'-phosphate
  modified_base 15: mod_base = OTHER; note = 2'-O-methyluridine-3'-phosphate
  modified_base 16: mod_base = OTHER; note = 2'-deoxy-2'-fluorocytidine-3'-phosphate
  modified_base 17: mod_base = OTHER; note = 2'-O-methyladenosine-3'-phosphate
  modified_base 18: mod_base = OTHER; note = 2'-O-methylcytidine-3'-phosphate
  modified_base 19: mod_base = OTHER; note = 2'-O-methyladenosine-3'-phosphate
  modified_base 20: mod_base = OTHER; note = 2'-O-methylguanosine-3'-phosphate
  modified_base 21: mod_base = OTHER; note = 2'-O-methylguanosine-3'-phosphorothioate
  modified_base 22: mod_base = OTHER; note = 2'-O-methylguanosine-3'-phosphorothioate
  modified_base 23: mod_base = OTHER; note = 2'-O-methyladenosine
aactttattctcaatcacaggga

SEQ ID NO: 478 - RNA, 23 nt, synthetic construct
  source 1..23: mol_type = other RNA
  modified_base 1: mod_base = OTHER; note = 2'-O-methyladenosine-3'-phosphorothioate
  modified_base 2: mod_base = OTHER; note = 2'-deoxy-2'-fluoroadenosine-3'-phosphorothioate
  modified_base 3: mod_base = OTHER; note = 2'-O-methyluridine-3'-phosphate
  modified_base 4: mod_base = OTHER; note = 2'-O-methyluridine-3'-phosphate
  modified_base 5: mod_base = OTHER; note = 2'-O-methylcytidine-3'-phosphate
  modified_base 6: mod_base = OTHER; note = 2'-deoxy-2'-fluoroadenosine-3'-phosphate
  modified_base 7: mod_base = OTHER; note = 2'-O-methylguanosine-3'-phosphate
  modified_base 8: mod_base = OTHER; note = 2'-deoxy-2'-fluoroadenosine-3'-phosphate
  modified_base 9: mod_base = OTHER; note = 2'-deoxy-2'-fluoroadenosine-3'-phosphate
  modified_base 10: mod_base = OTHER; note = 2'-O-methyladenosine-3'-phosphate
  modified_base 11: mod_base = OTHER; note = 2'-O-methylcytidine-3'-phosphate
  modified_base 12: mod_base = OTHER; note = 2'-O-methyluridine-3'-phosphate
  modified_base 13: mod_base = OTHER; note = 2'-O-methylcytidine-3'-phosphate
  modified_base 14: mod_base = OTHER; note = 2'-deoxy-2'-fluoroadenosine-3'-phosphate
  modified_base 15: mod_base = OTHER; note = 2'-O-methyluridine-3'-phosphate
  modified_base 16: mod_base = OTHER; note = 2'-deoxy-2'-fluoroadenosine-3'-phosphate
  modified_base 17: mod_base = OTHER; note = 2'-O-methylguanosine-3'-phosphate
  modified_base 18: mod_base = OTHER; note = 2'-O-methylcytidine-3'-phosphate
  modified_base 19: mod_base = OTHER; note = 2'-O-methylguanosine-3'-phosphate
  modified_base 20: mod_base = OTHER; note = 2'-O-methyladenosine-3'-phosphate
  modified_base 21: mod_base = OTHER; note = 2'-O-methyluridine-3'-phosphorothioate
  modified_base 22: mod_base = OTHER; note = 2'-O-methyluridine-3'-phosphorothioate
  modified_base 23: mod_base = OTHER; note = 2'-O-methylguanosine
aattcagaaactcatagcgattg

SEQ ID NO: 479 - RNA, 23 nt, synthetic construct
  source 1..23: mol_type = other RNA
  modified_base 1: mod_base = OTHER; note = 2'-O-methyladenosine-3'-phosphorothioate
  modified_base 2: mod_base = OTHER; note = 2'-deoxy-2'-fluoroguanosine-3'-phosphorothioate
  modified_base 3: mod_base = OTHER; note = 2'-O-methylguanosine-3'-phosphate
  modified_base 4: mod_base = OTHER; note = 2'-O-methyladenosine-3'-phosphate
  modified_base 5: mod_base = OTHER; note = 2'-O-methyluridine-3'-phosphate
  modified_base 6: mod_base = OTHER; note = 2'-deoxy-2'-fluorouridine-3'-phosphate
  modified_base 7: mod_base = OTHER; note = 2'-O-methylguanosine-3'-phosphate
  modified_base 8: mod_base = OTHER; note = 2'-deoxy-2'-fluoroguanosine-3'-phosphate
  modified_base 9: mod_base = OTHER; note = 2'-deoxy-2'-fluoroadenosine-3'-phosphate
  modified_base 10: mod_base = OTHER; note = 2'-O-methylcytidine-3'-phosphate
  modified_base 11: mod_base = OTHER; note = 2'-O-methyluridine-3'-phosphate
  modified_base 12: mod_base = OTHER; note = 2'-O-methylcytidine-3'-phosphate
  modified_base 13: mod_base = OTHER; note = 2'-O-methyluridine-3'-phosphate
  modified_base 14: mod_base = OTHER; note = 2'-deoxy-2'-fluorouridine-3'-phosphate
  modified_base 15: mod_base = OTHER; note = 2'-O-methylcytidine-3'-phosphate
  modified_base 16: mod_base = OTHER; note = 2'-deoxy-2'-fluorocytidine-3'-phosphate
  modified_base 17: mod_base = OTHER; note = 2'-O-methyladenosine-3'-phosphate
  modified_base 18: mod_base = OTHER; note = 2'-O-methyluridine-3'-phosphate
  modified_base 19: mod_base = OTHER; note = 2'-O-methyluridine-3'-phosphate
  modified_base 20: mod_base = OTHER; note = 2'-O-methylcytidine-3'-phosphate
  modified_base 21: mod_base = OTHER; note = 2'-O-methyladenosine-3'-phosphorothioate
  modified_base 22: mod_base = OTHER; note = 2'-O-methylguanosine-3'-phosphorothioate
  modified_base 23: mod_base = OTHER; note = 2'-O-methyladenosine
aggattggactcttccattcaga

SEQ ID NO: 480 - RNA, 23 nt, synthetic construct
  source 1..23: mol_type = other RNA
  modified_base 1: mod_base = OTHER; note = 2'-O-methyladenosine-3'-phosphorothioate
  modified_base 2: mod_base = OTHER; note = 2'-deoxy-2'-fluorouridine-3'-phosphorothioate
  modified_base 3: mod_base = OTHER; note = 2'-O-methylcytidine-3'-phosphate
  modified_base 4: mod_base = OTHER; note = 2'-O-methylguanosine-3'-phosphate
  modified_base 5: mod_base = OTHER; note = 2'-O-methyladenosine-3'-phosphate
  modified_base 6: mod_base = OTHER; note = 2'-deoxy-2'-fluoroadenosine-3'-phosphate
  modified_base 7: mod_base = OTHER; note = 2'-O-methylguanosine-3'-phosphate
  modified_base 8: mod_base = OTHER; note = 2'-deoxy-2'-fluorocytidine-3'-phosphate
  modified_base 9: mod_base = OTHER; note = 2'-deoxy-2'-fluoroadenosine-3'-phosphate
  modified_base 10: mod_base = OTHER; note = 2'-O-methyladenosine-3'-phosphate
  modified_base 11: mod_base = OTHER; note = 2'-O-methyladenosine-3'-phosphate
  modified_base 12: mod_base = OTHER; note = 2'-O-methylcytidine-3'-phosphate
  modified_base 13: mod_base = OTHER; note = 2'-O-methylcytidine-3'-phosphate
  modified_base 14: mod_base = OTHER; note = 2'-deoxy-2'-fluoroadenosine-3'-phosphate
  modified_base 15: mod_base = OTHER; note = 2'-O-methylguanosine-3'-phosphate
  modified_base 16: mod_base = OTHER; note = 2'-deoxy-2'-fluoroadenosine-3'-phosphate
  modified_base 17: mod_base = OTHER; note = 2'-O-methylguanosine-3'-phosphate
  modified_base 18: mod_base = OTHER; note = 2'-O-methylguanosine-3'-phosphate
  modified_base 19: mod_base = OTHER; note = 2'-O-methyladenosine-3'-phosphate
  modified_base 20: mod_base = OTHER; note = 2'-O-methylcytidine-3'-phosphate
  modified_base 21: mod_base = OTHER; note = 2'-O-methylcytidine-3'-phosphorothioate
  modified_base 22: mod_base = OTHER; note = 2'-O-methyluridine-3'-phosphorothioate
  modified_base 23: mod_base = OTHER; note = 2'-O-methylcytidine
atcgaagcaaaccagaggacctc

SEQ ID NO: 481 - RNA, 23 nt, synthetic construct
  source 1..23: mol_type = other RNA
  modified_base 1: mod_base = OTHER; note = 2'-O-methyladenosine-3'-phosphorothioate
  modified_base 2: mod_base = OTHER; note = 2'-deoxy-2'-fluorocytidine-3'-phosphorothioate
  modified_base 3: mod_base = OTHER; note = 2'-O-methyluridine-3'-phosphate
  modified_base 4: mod_base = OTHER; note = 2'-O-methyluridine-3'-phosphate
  modified_base 5: mod_base = OTHER; note = 2'-O-methylguanosine-3'-phosphate
  modified_base 6: mod_base = OTHER; note = 2'-deoxy-2'-fluoroadenosine-3'-phosphate
  modified_base 7: mod_base = OTHER; note = 2'-O-methyladenosine-3'-phosphate
  modified_base 8: mod_base = OTHER; note = 2'-deoxy-2'-fluoroadenosine-3'-phosphate
  modified_base 9: mod_base = OTHER; note = 2'-deoxy-2'-fluorocytidine-3'-phosphate
  modified_base 10: mod_base = OTHER; note = 2'-O-methyladenosine-3'-phosphate
  modified_base 11: mod_base = OTHER; note = 2'-O-methylcytidine-3'-phosphate
  modified_base 12: mod_base = OTHER; note = 2'-O-methylguanosine-3'-phosphate
  modified_base 13: mod_base = OTHER; note = 2'-O-methyladenosine-3'-phosphate
  modified_base 14: mod_base = OTHER; note = 2'-deoxy-2'-fluoroadenosine-3'-phosphate
  modified_base 15: mod_base = OTHER; note = 2'-O-methylcytidine-3'-phosphate
  modified_base 16: mod_base = OTHER; note = 2'-deoxy-2'-fluoroadenosine-3'-phosphate
  modified_base 17: mod_base = OTHER; note = 2'-O-methyluridine-3'-phosphate
  modified_base 18: mod_base = OTHER; note = 2'-O-methyladenosine-3'-phosphate
  modified_base 19: mod_base = OTHER; note = 2'-O-methylguanosine-3'-phosphate
  modified_base 20: mod_base = OTHER; note = 2'-O-methyladenosine-3'-phosphate
  modified_base 21: mod_base = OTHER; note = 2'-O-methylcytidine-3'-phosphorothioate
  modified_base 22: mod_base = OTHER; note = 2'-O-methyladenosine-3'-phosphorothioate
  modified_base 23: mod_base = OTHER; note = 2'-O-methylcytidine
acttgaaacacgaacatagacac

SEQ ID NO: 482 - RNA, 23 nt, synthetic construct
  source 1..23: mol_type = other RNA
  modified_base 1: mod_base = OTHER; note = 2'-O-methyladenosine-3'-phosphorothioate
  modified_base 2: mod_base = OTHER; note = 2'-deoxy-2'-fluorouridine-3'-phosphorothioate
  modified_base 3: mod_base = OTHER; note = 2'-O-methyluridine-3'-phosphate
  modified_base 4: mod_base = OTHER; note = 2'-O-methyladenosine-3'-phosphate
  modified_base 5: mod_base = OTHER; note = 2'-O-methyladenosine-3'-phosphate
  modified_base 6: mod_base = OTHER; note = 2'-deoxy-2'-fluorouridine-3'-phosphate
  modified_base 7: mod_base = OTHER; note = 2'-O-methyluridine-3'-phosphate
  modified_base 8: mod_base = OTHER; note = 2'-deoxy-2'-fluoroadenosine-3'-phosphate
  modified_base 9: mod_base = OTHER; note = 2'-deoxy-2'-fluorouridine-3'-phosphate
  modified_base 10: mod_base = OTHER; note = 2'-O-methyluridine-3'-phosphate
  modified_base 11: mod_base = OTHER; note = 2'-O-methyluridine-3'-phosphate
  modified_base 12: mod_base = OTHER; note = 2'-O-methylcytidine-3'-phosphate
  modified_base 13: mod_base = OTHER; note = 2'-O-methyluridine-3'-phosphate
  modified_base 14: mod_base = OTHER; note = 2'-deoxy-2'-fluorocytidine-3'-phosphate
  modified_base 15: mod_base = OTHER; note = 2'-O-methyladenosine-3'-phosphate
  modified_base 16: mod_base = OTHER; note = 2'-deoxy-2'-fluorouridine-3'-phosphate
  modified_base 17: mod_base = OTHER; note = 2'-O-methylcytidine-3'-phosphate
  modified_base 18: mod_base = OTHER; note = 2'-O-methyladenosine-3'-phosphate
  modified_base 19: mod_base = OTHER; note = 2'-O-methylcytidine-3'-phosphate
  modified_base 20: mod_base = OTHER; note = 2'-O-methyluridine-3'-phosphate
  modified_base 21: mod_base = OTHER; note = 2'-O-methylcytidine-3'-phosphorothioate
  modified_base 22: mod_base = OTHER; note = 2'-O-methylcytidine-3'-phosphorothioate
  modified_base 23: mod_base = OTHER; note = 2'-O-methylcytidine
attaattatttctcatcactccc

SEQ ID NO: 483 - RNA, 23 nt, synthetic construct
  source 1..23: mol_type = other RNA
  modified_base 1: mod_base = OTHER; note = 2'-O-methyladenosine-3'-phosphorothioate
  modified_base 2: mod_base = OTHER; note = 2'-deoxy-2'-fluorouridine-3'-phosphorothioate
  modified_base 3: mod_base = OTHER; note = 2'-O-methylcytidine-3'-phosphate
  modified_base 4: mod_base = OTHER; note = 2'-O-methyluridine-3'-phosphate
  modified_base 5: mod_base = OTHER; note = 2'-O-methyladenosine-3'-phosphate
  modified_base 6: mod_base = OTHER; note = 2'-deoxy-2'-fluoroguanosine-3'-phosphate
  modified_base 7: mod_base = OTHER; note = 2'-O-methylguanosine-3'-phosphate
  modified_base 8: mod_base = OTHER; note = 2'-deoxy-2'-fluorouridine-3'-phosphate
  modified_base 9: mod_base = OTHER; note = 2'-deoxy-2'-fluoroguanosine-3'-phosphate
  modified_base 10: mod_base = OTHER; note = 2'-O-methyladenosine-3'-phosphate
  modified_base 11: mod_base = OTHER; note = 2'-O-methylguanosine-3'-phosphate
  modified_base 12: mod_base = OTHER; note = 2'-O-methyluridine-3'-phosphate
  modified_base 13: mod_base = OTHER; note = 2'-O-methylcytidine-3'-phosphate
  modified_base 14: mod_base = OTHER; note = 2'-deoxy-2'-fluoroadenosine-3'-phosphate
  modified_base 15: mod_base = OTHER; note = 2'-O-methylguanosine-3'-phosphate
  modified_base 16: mod_base = OTHER; note = 2'-deoxy-2'-fluorouridine-3'-phosphate
  modified_base 17: mod_base = OTHER; note = 2'-O-methylguanosine-3'-phosphate
  modified_base 18: mod_base = OTHER; note = 2'-O-methylcytidine-3'-phosphate
  modified_base 19: mod_base = OTHER; note = 2'-O-methylguanosine-3'-phosphate
  modified_base 20: mod_base = OTHER; note = 2'-O-methyluridine-3'-phosphate
  modified_base 21: mod_base = OTHER; note = 2'-O-methylcytidine-3'-phosphorothioate
  modified_base 22: mod_base = OTHER; note = 2'-O-methyladenosine-3'-phosphorothioate
  modified_base 23: mod_base = OTHER; note = 2'-O-methylcytidine
atctaggtgagtcagtgcgtcac

SEQ ID NO: 484 - RNA, 23 nt, synthetic construct
  source 1..23: mol_type = other RNA
  modified_base 1: mod_base = OTHER; note = 2'-O-methyladenosine-3'-phosphorothioate
  modified_base 2: mod_base = OTHER; note = 2'-deoxy-2'-fluorocytidine-3'-phosphorothioate
  modified_base 3: mod_base = OTHER; note = 2'-O-methyladenosine-3'-phosphate
  modified_base 4: mod_base = OTHER; note = 2'-O-methylguanosine-3'-phosphate
  modified_base 5: mod_base = OTHER; note = 2'-O-methyluridine-3'-phosphate
  modified_base 6: mod_base = OTHER; note = 2'-deoxy-2'-fluorouridine-3'-phosphate
  modified_base 7: mod_base = OTHER; note = 2'-O-methyladenosine-3'-phosphate
  modified_base 8: mod_base = OTHER; note = 2'-deoxy-2'-fluorouridine-3'-phosphate
  modified_base 9: mod_base = OTHER; note = 2'-deoxy-2'-fluorouridine-3'-phosphate
  modified_base 10: mod_base = OTHER; note = 2'-O-methyluridine-3'-phosphate
  modified_base 11: mod_base = OTHER; note = 2'-O-methylcytidine-3'-phosphate
  modified_base 12: mod_base = OTHER; note = 2'-O-methylcytidine-3'-phosphate
  modified_base 13: mod_base = OTHER; note = 2'-O-methyladenosine-3'-phosphate
  modified_base 14: mod_base = OTHER; note = 2'-deoxy-2'-fluoroguanosine-3'-phosphate
  modified_base 15: mod_base = OTHER; note = 2'-O-methylcytidine-3'-phosphate
  modified_base 16: mod_base = OTHER; note = 2'-deoxy-2'-fluoroadenosine-3'-phosphate
  modified_base 17: mod_base = OTHER; note = 2'-O-methyluridine-3'-phosphate
  modified_base 18: mod_base = OTHER; note = 2'-O-methylguanosine-3'-phosphate
  modified_base 19: mod_base = OTHER; note = 2'-O-methylcytidine-3'-phosphate
  modified_base 20: mod_base = OTHER; note = 2'-O-methyluridine-3'-phosphate
  modified_base 21: mod_base = OTHER; note = 2'-O-methyladenosine-3'-phosphorothioate
  modified_base 22: mod_base = OTHER; note = 2'-O-methyladenosine-3'-phosphorothioate
  modified_base 23: mod_base = OTHER; note = 2'-O-methyladenosine
acagttatttccagcatgctaaa

SEQ ID NO: 485 - RNA, 23 nt, synthetic construct
  source 1..23: mol_type = other RNA
  modified_base 1: mod_base = OTHER; note = 2'-O-methyladenosine-3'-phosphorothioate
  modified_base 2: mod_base = OTHER; note = 2'-deoxy-2'-fluoroguanosine-3'-phosphorothioate
  modified_base 3: mod_base = OTHER; note = 2'-O-methyladenosine-3'-phosphate
  modified_base 4: mod_base = OTHER; note = 2'-O-methylcytidine-3'-phosphate
  modified_base 5: mod_base = OTHER; note = 2'-O-methyladenosine-3'-phosphate
  modified_base 6: mod_base = OTHER; note = 2'-deoxy-2'-fluoroguanosine-3'-phosphate
  modified_base 7: mod_base = OTHER; note = 2'-O-methyluridine-3'-phosphate
  modified_base 8: mod_base = OTHER; note = 2'-deoxy-2'-fluoroguanosine-3'-phosphate
  modified_base 9: mod_base = OTHER; note = 2'-deoxy-2'-fluorouridine-3'-phosphate
  modified_base 10: mod_base = OTHER; note = 2'-O-methylcytidine-3'-phosphate
  modified_base 11: mod_base = OTHER; note = 2'-O-methyluridine-3'-phosphate
  modified_base 12: mod_base = OTHER; note = 2'-O-methyluridine-3'-phosphate
  modified_base 13: mod_base = OTHER; note = 2'-O-methylcytidine-3'-phosphate
  modified_base 14: mod_base = OTHER; note = 2'-deoxy-2'-fluoroguanosine-3'-phosphate
  modified_base 15: mod_base = OTHER; note = 2'-O-methyluridine-3'-phosphate
  modified_base 16: mod_base = OTHER; note = 2'-deoxy-2'-fluorouridine-3'-phosphate
  modified_base 17: mod_base = OTHER; note = 2'-O-methyluridine-3'-phosphate
  modified_base 18: mod_base = OTHER; note = 2'-O-methylguanosine-3'-phosphate
  modified_base 19: mod_base = OTHER; note = 2'-O-methyladenosine-3'-phosphate
  modified_base 20: mod_base = OTHER; note = 2'-O-methyluridine-3'-phosphate
  modified_base 21: mod_base = OTHER; note = 2'-O-methyluridine-3'-phosphorothioate
  modified_base 22: mod_base = OTHER; note = 2'-O-methyladenosine-3'-phosphorothioate
  modified_base 23: mod_base = OTHER; note = 2'-O-methylcytidine
agacagtgtcttcgtttgattac

SEQ ID NO: 486 - RNA, 23 nt, synthetic construct
  source 1..23: mol_type = other RNA
  modified_base 1: mod_base = OTHER; note = 2'-O-methyladenosine-3'-phosphorothioate
  modified_base 2: mod_base = OTHER; note = 2'-deoxy-2'-fluorocytidine-3'-phosphorothioate
  modified_base 3: mod_base = OTHER; note = 2'-O-methylguanosine-3'-phosphate
  modified_base 4: mod_base = OTHER; note = 2'-O-methyladenosine-3'-phosphate
  modified_base 5: mod_base = OTHER; note = 2'-O-methylguanosine-3'-phosphate
  modified_base 6: mod_base = OTHER; note = 2'-deoxy-2'-fluoroguanosine-3'-phosphate
  modified_base 7: mod_base = OTHER; note = 2'-O-methyluridine-3'-phosphate
  modified_base 8: mod_base = OTHER; note = 2'-deoxy-2'-fluorouridine-3'-phosphate
  modified_base 9: mod_base = OTHER; note = 2'-deoxy-2'-fluorouridine-3'-phosphate
  modified_base 10: mod_base = OTHER; note = 2'-O-methylguanosine-3'-phosphate
  modified_base 11: mod_base = OTHER; note = 2'-O-methylguanosine-3'-phosphate
  modified_base 12: mod_base = OTHER; note = 2'-O-methylcytidine-3'-phosphate
  modified_base 13: mod_base = OTHER; note = 2'-O-methylguanosine-3'-phosphate
  modified_base 14: mod_base = OTHER; note = 2'-deoxy-2'-fluorouridine-3'-phosphate
  modified_base 15: mod_base = OTHER; note = 2'-O-methyladenosine-3'-phosphate
  modified_base 16: mod_base = OTHER; note = 2'-deoxy-2'-fluoroguanosine-3'-phosphate
  modified_base 17: mod_base = OTHER; note = 2'-O-methylcytidine-3'-phosphate
  modified_base 18: mod_base = OTHER; note = 2'-O-methyluridine-3'-phosphate
  modified_base 19: mod_base = OTHER; note = 2'-O-methylguanosine-3'-phosphate
  modified_base 20: mod_base = OTHER; note = 2'-O-methylguanosine-3'-phosphate
  modified_base 21: mod_base = OTHER; note = 2'-O-methyluridine-3'-phosphorothioate
  modified_base 22: mod_base = OTHER; note = 2'-O-methyladenosine-3'-phosphorothioate
  modified_base 23: mod_base = OTHER; note = 2'-O-methylguanosine
acgaggtttggcgtagctggtag

SEQ ID NO: 487 - RNA, 23 nt, synthetic construct
  source 1..23: mol_type = other RNA
  modified_base 1: mod_base = OTHER; note = 2'-O-methyladenosine-3'-phosphorothioate
  modified_base 2: mod_base = OTHER; note = 2'-deoxy-2'-fluoroadenosine-3'-phosphorothioate
  modified_base 3: mod_base = OTHER; note = 2'-O-methyluridine-3'-phosphate
  modified_base 4: mod_base = OTHER; note = 2'-O-methyladenosine-3'-phosphate
  modified_base 5: mod_base = OTHER; note = 2'-O-methyladenosine-3'-phosphate
  modified_base 6: mod_base = OTHER; note = 2'-deoxy-2'-fluorocytidine-3'-phosphate
  modified_base 7: mod_base = OTHER; note = 2'-O-methyladenosine-3'-phosphate
  modified_base 8: mod_base = OTHER; note = 2'-deoxy-2'-fluorocytidine-3'-phosphate
  modified_base 9: mod_base = OTHER; note = 2'-deoxy-2'-fluoroadenosine-3'-phosphate
  modified_base 10: mod_base = OTHER; note = 2'-O-methyladenosine-3'-phosphate
  modified_base 11: mod_base = OTHER; note = 2'-O-methyladenosine-3'-phosphate
  modified_base 12: mod_base = OTHER; note = 2'-O-methyladenosine-3'-phosphate
  modified_base 13: mod_base = OTHER; note = 2'-O-methyladenosine-3'-phosphate
  modified_base 14: mod_base = OTHER; note = 2'-deoxy-2'-fluoroadenosine-3'-phosphate
  modified_base 15: mod_base = OTHER; note = 2'-O-methyluridine-3'-phosphate
  modified_base 16: mod_base = OTHER; note = 2'-deoxy-2'-fluoroguanosine-3'-phosphate
  modified_base 17: mod_base = OTHER; note = 2'-O-methylcytidine-3'-phosphate
  modified_base 18: mod_base = OTHER; note = 2'-O-methylcytidine-3'-phosphate
  modified_base 19: mod_base = OTHER; note = 2'-O-methylguanosine-3'-phosphate
  modified_base 20: mod_base = OTHER; note = 2'-O-methyladenosine-3'-phosphate
  modified_base 21: mod_base = OTHER; note = 2'-O-methylguanosine-3'-phosphorothioate
  modified_base 22: mod_base = OTHER; note = 2'-O-methylguanosine-3'-phosphorothioate
  modified_base 23: mod_base = OTHER; note = 2'-O-methyluridine
aataacacaaaaaatgccgaggt

SEQ ID NO: 488 - RNA, 23 nt, synthetic construct
  source 1..23: mol_type = other RNA
  modified_base 1: mod_base = OTHER; note = 2'-O-methyladenosine-3'-phosphorothioate
  modified_base 2: mod_base = OTHER; note = 2'-deoxy-2'-fluorouridine-3'-phosphorothioate
  modified_base 3: mod_base = OTHER; note = 2'-O-methyladenosine-3'-phosphate
  modified_base 4: mod_base = OTHER; note = 2'-O-methylcytidine-3'-phosphate
  modified_base 5: mod_base = OTHER; note = 2'-O-methyluridine-3'-phosphate
  modified_base 6: mod_base = OTHER; note = 2'-deoxy-2'-fluoroadenosine-3'-phosphate
  modified_base 7: mod_base = OTHER; note = 2'-O-methylcytidine-3'-phosphate
  modified_base 8: mod_base = OTHER; note = 2'-deoxy-2'-fluoroadenosine-3'-phosphate
  modified_base 9: mod_base = OTHER; note = 2'-deoxy-2'-fluoroguanosine-3'-phosphate
  modified_base 10: mod_base = OTHER; note = 2'-O-methyladenosine-3'-phosphate
  modified_base 11: mod_base = OTHER; note = 2'-O-methyladenosine-3'-phosphate
  modified_base 12: mod_base = OTHER; note = 2'-O-methyluridine-3'-phosphate
  modified_base 13: mod_base = OTHER; note = 2'-O-methylcytidine-3'-phosphate
  modified_base 14: mod_base = OTHER; note = 2'-deoxy-2'-fluorocytidine-3'-phosphate
  modified_base 15: mod_base = OTHER; note = 2'-O-methyladenosine-3'-phosphate
  modified_base 16: mod_base = OTHER; note = 2'-deoxy-2'-fluoroguanosine-3'-phosphate
  modified_base 17: mod_base = OTHER; note = 2'-O-methylcytidine-3'-phosphate
  modified_base 18: mod_base = OTHER; note = 2'-O-methyladenosine-3'-phosphate
  modified_base 19: mod_base = OTHER; note = 2'-O-methylguanosine-3'-phosphate
  modified_base 20: mod_base = OTHER; note = 2'-O-methyluridine-3'-phosphate
  modified_base 21: mod_base = OTHER; note = 2'-O-methylcytidine-3'-phosphorothioate
  modified_base 22: mod_base = OTHER; note = 2'-O-methyladenosine-3'-phosphorothioate
  modified_base 23: mod_base = OTHER; note = 2'-O-methylguanosine
atactacagaatccagcagtcag

SEQ ID NO: 489 - RNA, 23 nt, synthetic construct
  source 1..23: mol_type = other RNA
  modified_base 1: mod_base = OTHER; note = 2'-O-methyladenosine-3'-phosphorothioate
  modified_base 2: mod_base = OTHER; note = 2'-deoxy-2'-fluoroadenosine-3'-phosphorothioate
  modified_base 3: mod_base = OTHER; note = 2'-O-methyluridine-3'-phosphate
  modified_base 4: mod_base = OTHER; note = 2'-O-methyladenosine-3'-phosphate
  modified_base 5: mod_base = OTHER; note = 2'-O-methylguanosine-3'-phosphate
  modified_base 6: mod_base = OTHER; note = 2'-deoxy-2'-fluorocytidine-3'-phosphate
  modified_base 7: mod_base = OTHER; note = 2'-O-methyluridine-3'-phosphate
  modified_base 8: mod_base = OTHER; note = 2'-deoxy-2'-fluoroadenosine-3'-phosphate
  modified_base 9: mod_base = OTHER; note = 2'-deoxy-2'-fluorouridine-3'-phosphate
  modified_base 10: mod_base = OTHER; note = 2'-O-methylguanosine-3'-phosphate
  modified_base 11: mod_base = OTHER; note = 2'-O-methyluridine-3'-phosphate
  modified_base 12: mod_base = OTHER; note = 2'-O-methylcytidine-3'-phosphate
  modified_base 13: mod_base = OTHER; note = 2'-O-methyladenosine-3'-phosphate
  modified_base 14: mod_base = OTHER; note = 2'-deoxy-2'-fluorocytidine-3'-phosphate
  modified_base 15: mod_base = OTHER; note = 2'-O-methylcytidine-3'-phosphate
  modified_base 16: mod_base = OTHER; note = 2'-deoxy-2'-fluorouridine-3'-phosphate
  modified_base 17: mod_base = OTHER; note = 2'-O-methyluridine-3'-phosphate
  modified_base 18: mod_base = OTHER; note = 2'-O-methyladenosine-3'-phosphate
  modified_base 19: mod_base = OTHER; note = 2'-O-methylcytidine-3'-phosphate
  modified_base 20: mod_base = OTHER; note = 2'-O-methyluridine-3'-phosphate
  modified_base 21: mod_base = OTHER; note = 2'-O-methyladenosine-3'-phosphorothioate
  modified_base 22: mod_base = OTHER; note = 2'-O-methylcytidine-3'-phosphorothioate
  modified_base 23: mod_base = OTHER; note = 2'-O-methyladenosine
aatagctatgtcaccttactaca

SEQ ID NO: 490 - RNA, 23 nt, synthetic construct
  source 1..23: mol_type = other RNA
  modified_base 1: mod_base = OTHER; note = 2'-O-methyladenosine-3'-phosphorothioate
  modified_base 2: mod_base = OTHER; note = 2'-deoxy-2'-fluoroadenosine-3'-phosphorothioate
  modified_base 3: mod_base = OTHER; note = 2'-O-methyladenosine-3'-phosphate
  modified_base 4: mod_base = OTHER; note = 2'-O-methyladenosine-3'-phosphate
  modified_base 5: mod_base = OTHER; note = 2'-O-methyluridine-3'-phosphate
  modified_base 6: mod_base = OTHER; note = 2'-deoxy-2'-fluorocytidine-3'-phosphate
  modified_base 7: mod_base = OTHER; note = 2'-O-methyladenosine-3'-phosphate
  modified_base 8: mod_base = OTHER; note = 2'-deoxy-2'-fluoroadenosine-3'-phosphate
  modified_base 9: mod_base = OTHER; note = 2'-deoxy-2'-fluoroadenosine-3'-phosphate
  modified_base 10: mod_base = OTHER; note = 2'-O-methylguanosine-3'-phosphate
  modified_base 11: mod_base = OTHER; note = 2'-O-methyluridine-3'-phosphate
  modified_base 12: mod_base = OTHER; note = 2'-O-methyluridine-3'-phosphate
  modified_base 13: mod_base = OTHER; note = 2'-O-methyladenosine-3'-phosphate
  modified_base 14: mod_base = OTHER; note = 2'-deoxy-2'-fluoroadenosine-3'-phosphate
  modified_base 15: mod_base = OTHER; note = 2'-O-methylguanosine-3'-phosphate
  modified_base 16: mod_base = OTHER; note = 2'-deoxy-2'-fluorouridine-3'-phosphate
  modified_base 17: mod_base = OTHER; note = 2'-O-methyladenosine-3'-phosphate
  modified_base 18: mod_base = OTHER; note = 2'-O-methylcytidine-3'-phosphate
  modified_base 19: mod_base = OTHER; note = 2'-O-methyladenosine-3'-phosphate
  modified_base 20: mod_base = OTHER; note = 2'-O-methylguanosine-3'-phosphate
  modified_base 21: mod_base = OTHER; note = 2'-O-methyladenosine-3'-phosphorothioate
  modified_base 22: mod_base = OTHER; note = 2'-O-methylguanosine-3'-phosphorothioate
  modified_base 23: mod_base = OTHER; note = 2'-O-methyluridine
aaaatcaaagttaagtacagagt

SEQ ID NO: 491 - RNA, 23 nt, synthetic construct
  source 1..23: mol_type = other RNA
  modified_base 1: mod_base = OTHER; note = 2'-O-methyladenosine-3'-phosphorothioate
  modified_base 2: mod_base = OTHER; note = 2'-deoxy-2'-fluorouridine-3'-phosphorothioate
  modified_base 3: mod_base = OTHER; note = 2'-O-methyluridine-3'-phosphate
  modified_base 4: mod_base = OTHER; note = 2'-O-methylguanosine-3'-phosphate
  modified_base 5: mod_base = OTHER; note = 2'-O-methyladenosine-3'-phosphate
  modified_base 6: mod_base = OTHER; note = 2'-deoxy-2'-fluoroadenosine-3'-phosphate
  modified_base 7: mod_base = OTHER; note = 2'-O-methylguanosine-3'-phosphate
  modified_base 8: mod_base = OTHER; note = 2'-deoxy-2'-fluoroadenosine-3'-phosphate
  modified_base 9: mod_base = OTHER; note = 2'-deoxy-2'-fluorocytidine-3'-phosphate
  modified_base 10: mod_base = OTHER; note = 2'-O-methylcytidine-3'-phosphate
  modified_base 11: mod_base = OTHER; note = 2'-O-methyladenosine-3'-phosphate
  modified_base 12: mod_base = OTHER; note = 2'-O-methyladenosine-3'-phosphate
  modified_base 13: mod_base = OTHER; note = 2'-O-methyladenosine-3'-phosphate
  modified_base 14: mod_base = OTHER; note = 2'-deoxy-2'-fluoroadenosine-3'-phosphate
  modified_base 15: mod_base = OTHER; note = 2'-O-methylcytidine-3'-phosphate
  modified_base 16: mod_base = OTHER; note = 2'-deoxy-2'-fluorocytidine-3'-phosphate
  modified_base 17: mod_base = OTHER; note = 2'-O-methyladenosine-3'-phosphate
  modified_base 18: mod_base = OTHER; note = 2'-O-methyladenosine-3'-phosphate
  modified_base 19: mod_base = OTHER; note = 2'-O-methyladenosine-3'-phosphate
  modified_base 20: mod_base = OTHER; note = 2'-O-methyladenosine-3'-phosphate
  modified_base 21: mod_base = OTHER; note = 2'-O-methyluridine-3'-phosphorothioate
  modified_base 22: mod_base = OTHER; note = 2'-O-methyluridine-3'-phosphorothioate
  modified_base 23: mod_base = OTHER; note = 2'-O-methyluridine
attgaagaccaaaaccaaaattt

SEQ ID NO: 492 - RNA, 23 nt, synthetic construct
  source 1..23: mol_type = other RNA
  modified_base 1: mod_base = OTHER; note = 2'-O-methyladenosine-3'-phosphorothioate
  modified_base 2: mod_base = OTHER; note = 2'-deoxy-2'-fluoroadenosine-3'-phosphorothioate
  modified_base 3: mod_base = OTHER; note = 2'-O-methyladenosine-3'-phosphate
  modified_base 4: mod_base = OTHER; note = 2'-O-methylguanosine-3'-phosphate
  modified_base 5: mod_base = OTHER; note = 2'-O-methyladenosine-3'-phosphate
  modified_base 6: mod_base = OTHER; note = 2'-deoxy-2'-fluoroguanosine-3'-phosphate
  modified_base 7: mod_base = OTHER; note = 2'-O-methylcytidine-3'-phosphate
  modified_base 8: mod_base = OTHER; note = 2'-deoxy-2'-fluoroadenosine-3'-phosphate
  modified_base 9: mod_base = OTHER; note = 2'-deoxy-2'-fluorouridine-3'-phosphate
  modified_base 10: mod_base = OTHER; note = 2'-O-methylguanosine-3'-phosphate
  modified_base 11: mod_base = OTHER; note = 2'-O-methyladenosine-3'-phosphate
  modified_base 12: mod_base = OTHER; note = 2'-O-methyladenosine-3'-phosphate
  modified_base 13: mod_base = OTHER; note = 2'-O-methyladenosine-3'-phosphate
  modified_base 14: mod_base = OTHER; note = 2'-deoxy-2'-fluoroadenosine-3'-phosphate
  modified_base 15: mod_base = OTHER; note = 2'-O-methyluridine-3'-phosphate
  modified_base 16: mod_base = OTHER; note = 2'-deoxy-2'-fluoroguanosine-3'-phosphate
  modified_base 17: mod_base = OTHER; note = 2'-O-methyluridine-3'-phosphate
  modified_base 18: mod_base = OTHER; note = 2'-O-methyluridine-3'-phosphate
  modified_base 19: mod_base = OTHER; note = 2'-O-methylguanosine-3'-phosphate
  modified_base 20: mod_base = OTHER; note = 2'-O-methyladenosine-3'-phosphate
  modified_base 21: mod_base = OTHER; note = 2'-O-methyladenosine-3'-phosphorothioate
  modified_base 22: mod_base = OTHER; note = 2'-O-methylguanosine-3'-phosphorothioate
  modified_base 23: mod_base = OTHER; note = 2'-O-methyladenosine
aaagagcatgaaaatgttgaaga

SEQ ID NO: 493 - RNA, 23 nt, synthetic construct
  source 1..23: mol_type = other RNA
  modified_base 1: mod_base = OTHER; note = 2'-O-methyladenosine-3'-phosphorothioate
  modified_base 2: mod_base = OTHER; note = 2'-deoxy-2'-fluorouridine-3'-phosphorothioate
  modified_base 3: mod_base = OTHER; note = 2'-O-methylguanosine-3'-phosphate
  modified_base 4: mod_base = OTHER; note = 2'-O-methylcytidine-3'-phosphate
  modified_base 5: mod_base = OTHER; note = 2'-O-methylcytidine-3'-phosphate
  modified_base 6: mod_base = OTHER; note = 2'-deoxy-2'-fluorocytidine-3'-phosphate
  modified_base 7: mod_base = OTHER; note = 2'-O-methyladenosine-3'-phosphate
  modified_base 8: mod_base = OTHER; note = 2'-deoxy-2'-fluorouridine-3'-phosphate
  modified_base 9: mod_base = OTHER; note = 2'-deoxy-2'-fluorouridine-3'-phosphate
  modified_base 10: mod_base = OTHER; note = 2'-O-methyluridine-3'-phosphate
  modified_base 11: mod_base = OTHER; note = 2'-O-methyladenosine-3'-phosphate
  modified_base 12: mod_base = OTHER; note = 2'-O-methyladenosine-3'-phosphate
  modified_base 13: mod_base = OTHER; note = 2'-O-methyladenosine-3'-phosphate
  modified_base 14: mod_base = OTHER; note = 2'-deoxy-2'-fluoroadenosine-3'-phosphate
  modified_base 15: mod_base = OTHER; note = 2'-O-methyladenosine-3'-phosphate
  modified_base 16: mod_base = OTHER; note = 2'-deoxy-2'-fluorouridine-3'-phosphate
  modified_base 17: mod_base = OTHER; note = 2'-O-methyluridine-3'-phosphate
  modified_base 18: mod_base = OTHER; note = 2'-O-methylguanosine-3'-phosphate
  modified_base 19: mod_base = OTHER; note = 2'-O-methylguanosine-3'-phosphate
  modified_base 20: mod_base = OTHER; note = 2'-O-methyluridine-3'-phosphate
  modified_base 21: mod_base = OTHER; note = 2'-O-methylguanosine-3'-phosphorothioate
  modified_base 22: mod_base = OTHER; note = 2'-O-methylguanosine-3'-phosphorothioate
  modified_base 23: mod_base = OTHER; note = 2'-O-methylguanosine
atgcccatttaaaaattggtggg

SEQ ID NO: 494 - RNA, 23 nt, synthetic construct
  source 1..23: mol_type = other RNA
  modified_base 1: mod_base = OTHER; note = 2'-O-methyladenosine-3'-phosphorothioate
  modified_base 2: mod_base = OTHER; note = 2'-deoxy-2'-fluoroguanosine-3'-phosphorothioate
  modified_base 3: mod_base = OTHER; note = 2'-O-methyluridine-3'-phosphate
  modified_base 4: mod_base = OTHER; note = 2'-O-methyluridine-3'-phosphate
  modified_base 5: mod_base = OTHER; note = 2'-O-methylcytidine-3'-phosphate
  modified_base 6: mod_base = OTHER; note = 2'-deoxy-2'-fluorocytidine-3'-phosphate
  modified_base 7: mod_base = OTHER; note = 2'-O-methyluridine-3'-phosphate
  modified_base 8: mod_base = OTHER; note = 2'-deoxy-2'-fluorouridine-3'-phosphate
  modified_base 9: mod_base = OTHER; note = 2'-deoxy-2'-fluoroadenosine-3'-phosphate
  modified_base 10: mod_base = OTHER; note = 2'-O-methyluridine-3'-phosphate
  modified_base 11: mod_base = OTHER; note = 2'-O-methylcytidine-3'-phosphate
  modified_base 12: mod_base = OTHER; note = 2'-O-methyladenosine-3'-phosphate
  modified_base 13: mod_base = OTHER; note = 2'-O-methyladenosine-3'-phosphate
  modified_base 14: mod_base = OTHER; note = 2'-deoxy-2'-fluoroadenosine-3'-phosphate
  modified_base 15: mod_base = OTHER; note = 2'-O-methyladenosine-3'-phosphate
  modified_base 16: mod_base = OTHER; note = 2'-deoxy-2'-fluoroguanosine-3'-phosphate
  modified_base 17: mod_base = OTHER; note = 2'-O-methylcytidine-3'-phosphate
  modified_base 18: mod_base = OTHER; note = 2'-O-methyladenosine-3'-phosphate
  modified_base 19: mod_base = OTHER; note = 2'-O-methylguanosine-3'-phosphate
  modified_base 20: mod_base = OTHER; note = 2'-O-methylcytidine-3'-phosphate
  modified_base 21: mod_base = OTHER; note = 2'-O-methyluridine-3'-phosphorothioate
  modified_base 22: mod_base = OTHER; note = 2'-O-methyladenosine-3'-phosphorothioate
  modified_base 23: mod_base = OTHER; note = 2'-O-methyladenosine
agttccttatcaaaagcagctaa

SEQ ID NO: 495 - RNA, 23 nt, synthetic construct
  source 1..23: mol_type = other RNA
  modified_base 1: mod_base = OTHER; note = 2'-O-methyladenosine-3'-phosphorothioate
  modified_base 2: mod_base = OTHER; note = 2'-deoxy-2'-fluorocytidine-3'-phosphorothioate
  modified_base 3: mod_base = OTHER; note = 2'-O-methyluridine-3'-phosphate
  modified_base 4: mod_base = OTHER; note = 2'-O-methylguanosine-3'-phosphate
  modified_base 5: mod_base = OTHER; note = 2'-O-methylcytidine-3'-phosphate
  modified_base 6: mod_base = OTHER; note = 2'-deoxy-2'-fluorouridine-3'-phosphate
  modified_base 7: mod_base = OTHER; note = 2'-O-methylcytidine-3'-phosphate
  modified_base 8: mod_base = OTHER; note = 2'-deoxy-2'-fluoroadenosine-3'-phosphate
  modified_base 9: mod_base = OTHER; note = 2'-deoxy-2'-fluoroguanosine-3'-phosphate
  modified_base 10: mod_base = OTHER; note = 2'-O-methyluridine-3'-phosphate
  modified_base 11: mod_base = OTHER; note = 2'-O-methylcytidine-3'-phosphate
  modified_base 12: mod_base = OTHER; note = 2'-O-methylcytidine-3'-phosphate
  modified_base 13: mod_base = OTHER; note = 2'-O-methyluridine-3'-phosphate
  modified_base 14: mod_base = OTHER; note = 2'-deoxy-2'-fluorouridine-3'-phosphate
  modified_base 15: mod_base = OTHER; note = 2'-O-methyluridine-3'-phosphate
  modified_base 16: mod_base = OTHER; note = 2'-deoxy-2'-fluoroguanosine-3'-phosphate
  modified_base 17: mod_base = OTHER; note = 2'-O-methyluridine-3'-phosphate
  modified_base 18: mod_base = OTHER; note = 2'-O-methylguanosine-3'-phosphate
  modified_base 19: mod_base = OTHER; note = 2'-O-methylcytidine-3'-phosphate
  modified_base 20: mod_base = OTHER; note = 2'-O-methyladenosine-3'-phosphate
  modified_base 21: mod_base = OTHER; note = 2'-O-methylguanosine-3'-phosphorothioate
  modified_base 22: mod_base = OTHER; note = 2'-O-methylcytidine-3'-phosphorothioate
  modified_base 23: mod_base = OTHER; note = 2'-O-methyluridine
actgctcagtcctttgtgcagct

SEQ ID NO: 496 - RNA, 23 nt, synthetic construct
  source 1..23: mol_type = other RNA
  modified_base 1: mod_base = OTHER; note = 2'-O-methyladenosine-3'-phosphorothioate
  modified_base 2: mod_base = OTHER; note = 2'-deoxy-2'-fluoroguanosine-3'-phosphorothioate
  modified_base 3: mod_base = OTHER; note = 2'-O-methyluridine-3'-phosphate
  modified_base 4: mod_base = OTHER; note = 2'-O-methyladenosine-3'-phosphate
  modified_base 5: mod_base = OTHER; note = 2'-O-methyladenosine-3'-phosphate
  modified_base 6: mod_base = OTHER; note = 2'-deoxy-2'-fluoroadenosine-3'-phosphate
  modified_base 7: mod_base = OTHER; note = 2'-O-methyluridine-3'-phosphate
  modified_base 8: mod_base = OTHER; note = 2'-deoxy-2'-fluoroguanosine-3'-phosphate
  modified_base 9: mod_base = OTHER; note = 2'-deoxy-2'-fluorocytidine-3'-phosphate
  modified_base 10: mod_base = OTHER; note = 2'-O-methylguanosine-3'-phosphate
  modified_base 11: mod_base = OTHER; note = 2'-O-methyluridine-3'-phosphate
  modified_base 12: mod_base = OTHER; note = 2'-O-methylguanosine-3'-phosphate
  modified_base 13: mod_base = OTHER; note = 2'-O-methylguanosine-3'-phosphate
  modified_base 14: mod_base = OTHER; note = 2'-deoxy-2'-fluoroadenosine-3'-phosphate
  modified_base 15: mod_base = OTHER; note = 2'-O-methylcytidine-3'-phosphate
  modified_base 16: mod_base = OTHER; note = 2'-deoxy-2'-fluoroadenosine-3'-phosphate
  modified_base 17: mod_base = OTHER; note = 2'-O-methyladenosine-3'-phosphate
  modified_base 18: mod_base = OTHER; note = 2'-O-methylcytidine-3'-phosphate
  modified_base 19: mod_base = OTHER; note = 2'-O-methyluridine-3'-phosphate
  modified_base 20: mod_base = OTHER; note = 2'-O-methyluridine-3'-phosphate
  modified_base 21: mod_base = OTHER; note = 2'-O-methylcytidine-3'-phosphorothioate
  modified_base 22: mod_base = OTHER; note = 2'-O-methyluridine-3'-phosphorothioate
  modified_base 23: mod_base = OTHER; note = 2'-O-methyluridine
agtaaatgcgtggacaacttctt

SEQ ID NO: 497 - RNA, 23 nt, synthetic construct
  source 1..23: mol_type = other RNA
  modified_base 1: mod_base = OTHER; note = 2'-O-methyladenosine-3'-phosphorothioate
  modified_base 2: mod_base = OTHER; note = 2'-deoxy-2'-fluorocytidine-3'-phosphorothioate
  modified_base 3: mod_base = OTHER; note = 2'-O-methyluridine-3'-phosphate
  modified_base 4: mod_base = OTHER; note = 2'-O-methylcytidine-3'-phosphate
  modified_base 5: mod_base = OTHER; note = 2'-O-methylguanosine-3'-phosphate
  modified_base 6: mod_base = OTHER; note = 2'-deoxy-2'-fluorouridine-3'-phosphate
  modified_base 7: mod_base = OTHER; note = 2'-O-methyluridine-3'-phosphate
  modified_base 8: mod_base = OTHER; note = 2'-deoxy-2'-fluoroadenosine-3'-phosphate
  modified_base 9: mod_base = OTHER; note = 2'-deoxy-2'-fluoroguanosine-3'-phosphate
  modified_base 10: mod_base = OTHER; note = 2'-O-methylcytidine-3'-phosphate
  modified_base 11: mod_base = OTHER; note = 2'-O-methyluridine-3'-phosphate
  modified_base 12: mod_base = OTHER; note = 2'-O-methylguanosine-3'-phosphate
  modified_base 13: mod_base = OTHER; note = 2'-O-methyladenosine-3'-phosphate
  modified_base 14: mod_base = OTHER; note = 2'-deoxy-2'-fluorouridine-3'-phosphate
  modified_base 15: mod_base = OTHER; note = 2'-O-methylguanosine-3'-phosphate
  modified_base 16: mod_base = OTHER; note = 2'-deoxy-2'-fluoroadenosine-3'-phosphate
  modified_base 17: mod_base = OTHER; note = 2'-O-methylguanosine-3'-phosphate
  modified_base 18: mod_base = OTHER; note = 2'-O-methylguanosine-3'-phosphate
  modified_base 19: mod_base = OTHER; note = 2'-O-methyluridine-3'-phosphate
  modified_base 20: mod_base = OTHER; note = 2'-O-methyladenosine-3'-phosphate
  modified_base 21: mod_base = OTHER; note = 2'-O-methyladenosine-3'-phosphorothioate
  modified_base 22: mod_base = OTHER; note = 2'-O-methyladenosine-3'-phosphorothioate
  modified_base 23: mod_base = OTHER; note = 2'-O-methyluridine
actcgttagctgatgaggtaaat

SEQ ID NO: 498 - RNA, 23 nt, synthetic construct
  source 1..23: mol_type = other RNA
  modified_base 1: mod_base = OTHER; note = 2'-O-methyladenosine-3'-phosphorothioate
  modified_base 2: mod_base = OTHER; note = 2'-deoxy-2'-fluoroguanosine-3'-phosphorothioate
  modified_base 3: mod_base = OTHER; note = 2'-O-methyladenosine-3'-phosphate
  modified_base 4: mod_base = OTHER; note = 2'-O-methylcytidine-3'-phosphate
  modified_base 5: mod_base = OTHER; note = 2'-O-methyladenosine-3'-phosphate
  modified_base 6: mod_base = OTHER; note = 2'-deoxy-2'-fluoroguanosine-3'-phosphate
  modified_base 7: mod_base = OTHER; note = 2'-O-methyluridine-3'-phosphate
  modified_base 8: mod_base = OTHER; note = 2'-deoxy-2'-fluoroadenosine-3'-phosphate
  modified_base 9: mod_base = OTHER; note = 2'-deoxy-2'-fluoroadenosine-3'-phosphate
  modified_base 10: mod_base = OTHER; note = 2'-O-methyladenosine-3'-phosphate
  modified_base 11: mod_base = OTHER; note = 2'-O-methyladenosine-3'-phosphate
  modified_base 12: mod_base = OTHER; note = 2'-O-methyladenosine-3'-phosphate
  modified_base 13: mod_base = OTHER; note = 2'-O-methyluridine-3'-phosphate
  modified_base 14: mod_base = OTHER; note = 2'-deoxy-2'-fluoroguanosine-3'-phosphate
  modified_base 15: mod_base = OTHER; note = 2'-O-methylcytidine-3'-phosphate
  modified_base 16: mod_base = OTHER; note = 2'-deoxy-2'-fluoroadenosine-3'-phosphate
  modified_base 17: mod_base = OTHER; note = 2'-O-methyluridine-3'-phosphate
  modified_base 18: mod_base = OTHER; note = 2'-O-methylguanosine-3'-phosphate
  modified_base 19: mod_base = OTHER; note = 2'-O-methyluridine-3'-phosphate
  modified_base 20: mod_base = OTHER; note = 2'-O-methylcytidine-3'-phosphate
  modified_base 21: mod_base = OTHER; note = 2'-O-methyladenosine-3'-phosphorothioate
  modified_base 22: mod_base = OTHER; note = 2'-O-methyladenosine-3'-phosphorothioate
  modified_base 23: mod_base = OTHER; note = 2'-O-methylguanosine
agacagtaaaaatgcatgtcaag

SEQ ID NO: 499 - RNA, 23 nt, synthetic construct
  source 1..23: mol_type = other RNA
  modified_base 1: mod_base = OTHER; note = 2'-O-methyladenosine-3'-phosphorothioate
  modified_base 2: mod_base = OTHER; note = 2'-deoxy-2'-fluoroadenosine-3'-phosphorothioate
  modified_base 3: mod_base = OTHER; note = 2'-O-methylguanosine-3'-phosphate
  modified_base 4: mod_base = OTHER; note = 2'-O-methyluridine-3'-phosphate
  modified_base 5: mod_base = OTHER; note = 2'-O-methylguanosine-3'-phosphate
  modified_base 6: mod_base = OTHER; note = 2'-deoxy-2'-fluorouridine-3'-phosphate
  modified_base 7: mod_base = OTHER; note = 2'-O-methylcytidine-3'-phosphate
  modified_base 8: mod_base = OTHER; note = 2'-deoxy-2'-fluoroadenosine-3'-phosphate
  modified_base 9: mod_base = OTHER; note = 2'-deoxy-2'-fluoroguanosine-3'-phosphate
  modified_base 10: mod_base = OTHER; note = 2'-O-methylguanosine-3'-phosphate
  modified_base 11: mod_base = OTHER; note = 2'-O-methyladenosine-3'-phosphate
  modified_base 12: mod_base = OTHER; note = 2'-O-methyladenosine-3'-phosphate
  modified_base 13: mod_base = OTHER; note = 2'-O-methyluridine-3'-phosphate
  modified_base 14: mod_base = OTHER; note = 2'-deoxy-2'-fluoroadenosine-3'-phosphate
  modified_base 15: mod_base = OTHER; note = 2'-O-methyladenosine-3'-phosphate
  modified_base 16: mod_base = OTHER; note = 2'-deoxy-2'-fluoroadenosine-3'-phosphate
  modified_base 17: mod_base = OTHER; note = 2'-O-methylguanosine-3'-phosphate
  modified_base 18: mod_base = OTHER; note = 2'-O-methyladenosine-3'-phosphate
  modified_base 19: mod_base = OTHER; note = 2'-O-methylcytidine-3'-phosphate
  modified_base 20: mod_base = OTHER; note = 2'-O-methyladenosine-3'-phosphate
  modified_base 21: mod_base = OTHER; note = 2'-O-methylguanosine-3'-phosphorothioate
  modified_base 22: mod_base = OTHER; note = 2'-O-methyluridine-3'-phosphorothioate
  modified_base 23: mod_base = OTHER; note = 2'-O-methyladenosine
aagtgtcaggaataaagacagta

SEQ ID NO: 500 - RNA, 23 nt, synthetic construct
  source 1..23: mol_type = other RNA
  modified_base 1: mod_base = OTHER; note = 2'-O-methyladenosine-3'-phosphorothioate
  modified_base 2: mod_base = OTHER; note = 2'-deoxy-2'-fluorouridine-3'-phosphorothioate
  modified_base 3: mod_base = OTHER; note = 2'-O-methyluridine-3'-phosphate
  modified_base 4: mod_base = OTHER; note = 2'-O-methyluridine-3'-phosphate
  modified_base 5: mod_base = OTHER; note = 2'-O-methylguanosine-3'-phosphate
  modified_base 6: mod_base = OTHER; note = 2'-deoxy-2'-fluoroadenosine-3'-phosphate
  modified_base 7: mod_base = OTHER; note = 2'-O-methyladenosine-3'-phosphate
  modified_base 8: mod_base = OTHER; note = 2'-deoxy-2'-fluoroadenosine-3'-phosphate
  modified_base 9: mod_base = OTHER; note = 2'-deoxy-2'-fluoroadenosine-3'-phosphate
  modified_base 10: mod_base = OTHER; note = 2'-O-methylcytidine-3'-phosphate
  modified_base 11: mod_base = OTHER; note = 2'-O-methyladenosine-3'-phosphate
  modified_base 12: mod_base = OTHER; note = 2'-O-methyluridine-3'-phosphate
  modified_base 13: mod_base = OTHER; note = 2'-O-methyluridine-3'-phosphate
  modified_base 14: mod_base = OTHER; note = 2'-deoxy-2'-fluorocytidine-3'-phosphate
  modified_base 15: mod_base = OTHER; note = 2'-O-methyladenosine-3'-phosphate
  modified_base 16: mod_base = OTHER; note = 2'-deoxy-2'-fluorouridine-3'-phosphate
  modified_base 17: mod_base = OTHER; note = 2'-O-methylcytidine-3'-phosphate
  modified_base 18: mod_base = OTHER; note = 2'-O-methyluridine-3'-phosphate
  modified_base 19: mod_base = OTHER; note = 2'-O-methylcytidine-3'-phosphate
  modified_base 20: mod_base = OTHER; note = 2'-O-methyladenosine-3'-phosphate
  modified_base 21: mod_base = OTHER; note = 2'-O-methylguanosine-3'-phosphorothioate
  modified_base 22: mod_base = OTHER; note = 2'-O-methyluridine-3'-phosphorothioate
  modified_base 23: mod_base = OTHER; note = 2'-O-methylguanosine
atttgaaaacattcatctcagtg

SEQ ID NO: 501 - RNA, 23 nt, synthetic construct
  source 1..23: mol_type = other RNA
  modified_base 1: mod_base = OTHER; note = 2'-O-methyladenosine-3'-phosphorothioate
  modified_base 2: mod_base = OTHER; note = 2'-deoxy-2'-fluorocytidine-3'-phosphorothioate
  modified_base 3: mod_base = OTHER; note = 2'-O-methyladenosine-3'-phosphate
  modified_base 4: mod_base = OTHER; note = 2'-O-methyluridine-3'-phosphate
  modified_base 5: mod_base = OTHER; note = 2'-O-methyladenosine-3'-phosphate
  modified_base 6: mod_base = OTHER; note = 2'-deoxy-2'-fluorocytidine-3'-phosphate
  modified_base 7: mod_base = OTHER; note = 2'-O-methyladenosine-3'-phosphate
  modified_base 8: mod_base = OTHER; note = 2'-deoxy-2'-fluorouridine-3'-phosphate
  modified_base 9: mod_base = OTHER; note = 2'-deoxy-2'-fluoroguanosine-3'-phosphate
  modified_base 10: mod_base = OTHER; note = 2'-O-methyluridine-3'-phosphate
  modified_base 11: mod_base = OTHER; note = 2'-O-methyluridine-3'-phosphate
  modified_base 12: mod_base = OTHER; note = 2'-O-methylguanosine-3'-phosphate
  modified_base 13: mod_base = OTHER; note = 2'-O-methylcytidine-3'-phosphate
  modified_base 14: mod_base = OTHER; note = 2'-deoxy-2'-fluoroadenosine-3'-phosphate
  modified_base 15: mod_base = OTHER; note = 2'-O-methylguanosine-3'-phosphate
  modified_base 16: mod_base = OTHER; note = 2'-deoxy-2'-fluorocytidine-3'-phosphate
  modified_base 17: mod_base = OTHER; note = 2'-O-methyluridine-3'-phosphate
  modified_base 18: mod_base = OTHER; note = 2'-O-methyluridine-3'-phosphate
  modified_base 19: mod_base = OTHER; note = 2'-O-methyluridine-3'-phosphate
  modified_base 20: mod_base = OTHER; note = 2'-O-methylguanosine-3'-phosphate
  modified_base 21: mod_base = OTHER; note = 2'-O-methyladenosine-3'-phosphorothioate
  modified_base 22: mod_base = OTHER; note = 2'-O-methyladenosine-3'-phosphorothioate
  modified_base 23: mod_base = OTHER; note = 2'-O-methyladenosine
acatacatgttgcagctttgaaa

SEQ ID NO: 502 - RNA, 23 nt, synthetic construct
  source 1..23: mol_type = other RNA
  modified_base 1: mod_base = OTHER; note = 2'-O-methyladenosine-3'-phosphorothioate
  modified_base 2: mod_base = OTHER; note = 2'-deoxy-2'-fluoroadenosine-3'-phosphorothioate
  modified_base 3: mod_base = OTHER; note = 2'-O-methyladenosine-3'-phosphate
  modified_base 4: mod_base = OTHER; note = 2'-O-methylcytidine-3'-phosphate
  modified_base 5: mod_base = OTHER; note = 2'-O-methyladenosine-3'-phosphate
  modified_base 6: mod_base = OTHER; note = 2'-deoxy-2'-fluoroguanosine-3'-phosphate
  modified_base 7: mod_base = OTHER; note = 2'-O-methyladenosine-3'-phosphate
  modified_base 8: mod_base = OTHER; note = 2'-deoxy-2'-fluoroadenosine-3'-phosphate
  modified_base 9: mod_base = OTHER; note = 2'-deoxy-2'-fluorouridine-3'-phosphate
  modified_base 10: mod_base = OTHER; note = 2'-O-methylcytidine-3'-phosphate
  modified_base 11: mod_base = OTHER; note = 2'-O-methylguanosine-3'-phosphate
  modified_base 12: mod_base = OTHER; note = 2'-O-methylguanosine-3'-phosphate
  modified_base 13: mod_base = OTHER; note = 2'-O-methyluridine-3'-phosphate
  modified_base 14: mod_base = OTHER; note = 2'-deoxy-2'-fluorouridine-3'-phosphate
  modified_base 15: mod_base = OTHER; note = 2'-O-methyluridine-3'-phosphate
  modified_base 16: mod_base = OTHER; note = 2'-deoxy-2'-fluoroguanosine-3'-phosphate
  modified_base 17: mod_base = OTHER; note = 2'-O-methylcytidine-3'-phosphate
  modified_base 18: mod_base = OTHER; note = 2'-O-methyladenosine-3'-phosphate
  modified_base 19: mod_base = OTHER; note = 2'-O-methyluridine-3'-phosphate
  modified_base 20: mod_base = OTHER; note = 2'-O-methylguanosine-3'-phosphate
  modified_base 21: mod_base = OTHER; note = 2'-O-methyladenosine-3'-phosphorothioate
  modified_base 22: mod_base = OTHER; note = 2'-O-methylcytidine-3'-phosphorothioate
  modified_base 23: mod_base = OTHER; note = 2'-O-methyluridine
aaacagaatcggtttgcatgact

SEQ ID NO: 503 - RNA, 23 nt, synthetic construct
  source 1..23: mol_type = other RNA
  modified_base 1: mod_base = OTHER; note = 2'-O-methyladenosine-3'-phosphorothioate
  modified_base 2: mod_base = OTHER; note = 2'-deoxy-2'-fluoroguanosine-3'-phosphorothioate
  modified_base 3: mod_base = OTHER; note = 2'-O-methyladenosine-3'-phosphate
  modified_base 4: mod_base = OTHER; note = 2'-O-methylcytidine-3'-phosphate
  modified_base 5: mod_base = OTHER; note = 2'-O-methyladenosine-3'-phosphate
  modified_base 6: mod_base = OTHER; note = 2'-deoxy-2'-fluoroguanosine-3'-phosphate
  modified_base 7: mod_base = OTHER; note = 2'-O-methyladenosine-3'-phosphate
  modified_base 8: mod_base = OTHER; note = 2'-deoxy-2'-fluorouridine-3'-phosphate
  modified_base 9: mod_base = OTHER; note = 2'-deoxy-2'-fluorouridine-3'-phosphate
  modified_base 10: mod_base = OTHER; note = 2'-O-methyluridine-3'-phosphate
  modified_base 11: mod_base = OTHER; note = 2'-O-methylcytidine-3'-phosphate
  modified_base 12: mod_base = OTHER; note = 2'-O-methyladenosine-3'-phosphate
  modified_base 13: mod_base = OTHER; note = 2'-O-methyluridine-3'-phosphate
  modified_base 14: mod_base = OTHER; note = 2'-deoxy-2'-fluorouridine-3'-phosphate
  modified_base 15: mod_base = OTHER; note = 2'-O-methylcytidine-3'-phosphate
  modified_base 16: mod_base = OTHER; note = 2'-deoxy-2'-fluorocytidine-3'-phosphate
  modified_base 17: mod_base = OTHER; note = 2'-O-methylcytidine-3'-phosphate
  modified_base 18: mod_base = OTHER; note = 2'-O-methyladenosine-3'-phosphate
  modified_base 19: mod_base = OTHER; note = 2'-O-methyladenosine-3'-phosphate
  modified_base 20: mod_base = OTHER; note = 2'-O-methyluridine-3'-phosphate
  modified_base 21: mod_base = OTHER; note = 2'-O-methyladenosine-3'-phosphorothioate
  modified_base 22: mod_base = OTHER; note = 2'-O-methyladenosine-3'-phosphorothioate
  modified_base 23: mod_base = OTHER; note = 2'-O-methylcytidine
agacagatttcattcccaataac

SEQ ID NO: 504 - RNA, 23 nt, synthetic construct
  source 1..23: mol_type = other RNA
  modified_base 1: mod_base = OTHER; note = 2'-O-methyladenosine-3'-phosphorothioate
  modified_base 2: mod_base = OTHER; note = 2'-deoxy-2'-fluorocytidine-3'-phosphorothioate
  modified_base 3: mod_base = OTHER; note = 2'-O-methyluridine-3'-phosphate
  modified_base 4: mod_base = OTHER; note = 2'-O-methylcytidine-3'-phosphate
  modified_base 5: mod_base = OTHER; note = 2'-O-methyladenosine-3'-phosphate
  modified_base 6: mod_base = OTHER; note = 2'-deoxy-2'-fluoroadenosine-3'-phosphate
  modified_base 7: mod_base = OTHER; note = 2'-O-methylguanosine-3'-phosphate
  modified_base 8: mod_base = OTHER; note = 2'-deoxy-2'-fluorouridine-3'-phosphate
  modified_base 9: mod_base = OTHER; note = 2'-deoxy-2'-fluorocytidine-3'-phosphate
  modified_base 10: mod_base = OTHER; note = 2'-O-methyladenosine-3'-phosphate
  modified_base 11: mod_base = OTHER; note = 2'-O-methyladenosine-3'-phosphate
  modified_base 12: mod_base = OTHER; note = 2'-O-methylguanosine-3'-phosphate
  modified_base 13: mod_base = OTHER; note = 2'-O-methylcytidine-3'-phosphate
  modified_base 14: mod_base = OTHER; note = 2'-deoxy-2'-fluoroadenosine-3'-phosphate
  modified_base 15: mod_base = OTHER; note = 2'-O-methylguanosine-3'-phosphate
  modified_base 16: mod_base = OTHER; note = 2'-deoxy-2'-fluorouridine-3'-phosphate
  modified_base 17: mod_base = OTHER; note = 2'-O-methylcytidine-3'-phosphate
  modified_base 18: mod_base = OTHER; note = 2'-O-methylguanosine-3'-phosphate
  modified_base 19: mod_base = OTHER; note = 2'-O-methylguanosine-3'-phosphate
  modified_base 20: mod_base = OTHER; note = 2'-O-methyluridine-3'-phosphate
  modified_base 21: mod_base = OTHER; note = 2'-O-methylguanosine-3'-phosphorothioate
  modified_base 22: mod_base = OTHER; note = 2'-O-methyladenosine-3'-phosphorothioate
  modified_base 23: mod_base = OTHER; note = 2'-O-methylcytidine
actcaagtcaagcagtcggtgac

SEQ ID NO: 505 - RNA, 23 nt, synthetic construct
  source 1..23: mol_type = other RNA
  modified_base 1: mod_base = OTHER; note = 2'-O-methyladenosine-3'-phosphorothioate
  modified_base 2: mod_base = OTHER; note = 2'-deoxy-2'-fluoroguanosine-3'-phosphorothioate
  modified_base 3: mod_base = OTHER; note = 2'-O-methyluridine-3'-phosphate
  modified_base 4: mod_base = OTHER; note = 2'-O-methyluridine-3'-phosphate
  modified_base 5: mod_base = OTHER; note = 2'-O-methylcytidine-3'-phosphate
  modified_base 6: mod_base = OTHER; note = 2'-deoxy-2'-fluoroadenosine-3'-phosphate
  modified_base 7: mod_base = OTHER; note = 2'-O-methylcytidine-3'-phosphate
  modified_base 8: mod_base = OTHER; note = 2'-deoxy-2'-fluorouridine-3'-phosphate
  modified_base 9: mod_base = OTHER; note = 2'-deoxy-2'-fluorocytidine-3'-phosphate
  modified_base 10: mod_base = OTHER; note = 2'-O-methylcytidine-3'-phosphate
  modified_base 11: mod_base = OTHER; note = 2'-O-methyladenosine-3'-phosphate
  modified_base 12: mod_base = OTHER; note = 2'-O-methyluridine-3'-phosphate
  modified_base 13: mod_base = OTHER; note = 2'-O-methylcytidine-3'-phosphate
  modified_base 14: mod_base = OTHER; note = 2'-deoxy-2'-fluoroadenosine-3'-phosphate
  modified_base 15: mod_base = OTHER; note = 2'-O-methyluridine-3'-phosphate
  modified_base 16: mod_base = OTHER; note = 2'-deoxy-2'-fluoroadenosine-3'-phosphate
  modified_base 17: mod_base = OTHER; note = 2'-O-methyluridine-3'-phosphate
  modified_base 18: mod_base = OTHER; note = 2'-O-methyladenosine-3'-phosphate
  modified_base 19: mod_base = OTHER; note = 2'-O-methylcytidine-3'-phosphate
  modified_base 20: mod_base = OTHER; note = 2'-O-methyladenosine-3'-phosphate
  modified_base 21: mod_base = OTHER; note = 2'-O-methylguanosine-3'-phosphorothioate
  modified_base 22: mod_base = OTHER; note = 2'-O-methylcytidine-3'-phosphorothioate
  modified_base 23: mod_base = OTHER; note = 2'-O-methyluridine
agttcactccatcatatacagct

SEQ ID NO: 506 - RNA, 23 nt, synthetic construct
  source 1..23: mol_type = other RNA
  modified_base 1: mod_base = OTHER; note = 2'-O-methyladenosine-3'-phosphorothioate
  modified_base 2: mod_base = OTHER; note = 2'-deoxy-2'-fluorouridine-3'-phosphorothioate
  modified_base 3: mod_base = OTHER; note = 2'-O-methyluridine-3'-phosphate
  modified_base 4: mod_base = OTHER; note = 2'-O-methylguanosine-3'-phosphate
  modified_base 5: mod_base = OTHER; note = 2'-O-methylguanosine-3'-phosphate
  modified_base 6: mod_base = OTHER; note = 2'-deoxy-2'-fluorouridine-3'-phosphate
  modified_base 7: mod_base = OTHER; note = 2'-O-methylcytidine-3'-phosphate
  modified_base 8: mod_base = OTHER; note = 2'-deoxy-2'-fluorouridine-3'-phosphate
  modified_base 9: mod_base = OTHER; note = 2'-deoxy-2'-fluorouridine-3'-phosphate
  modified_base 10: mod_base = OTHER; note = 2'-O-methylguanosine-3'-phosphate
  modified_base 11: mod_base = OTHER; note = 2'-O-methyluridine-3'-phosphate
  modified_base 12: mod_base = OTHER; note = 2'-O-methylguanosine-3'-phosphate
  modified_base 13: mod_base = OTHER; note = 2'-O-methyluridine-3'-phosphate
  modified_base 14: mod_base = OTHER; note = 2'-deoxy-2'-fluorouridine-3'-phosphate
  modified_base 15: mod_base = OTHER; note = 2'-O-methyladenosine-3'-phosphate
  modified_base 16: mod_base = OTHER; note = 2'-deoxy-2'-fluorocytidine-3'-phosphate
  modified_base 17: mod_base = OTHER; note = 2'-O-methyladenosine-3'-phosphate
  modified_base 18: mod_base = OTHER; note = 2'-O-methylcytidine-3'-phosphate
  modified_base 19: mod_base = OTHER; note = 2'-O-methyladenosine-3'-phosphate
  modified_base 20: mod_base = OTHER; note = 2'-O-methyluridine-3'-phosphate
  modified_base 21: mod_base = OTHER; note = 2'-O-methylcytidine-3'-phosphorothioate
  modified_base 22: mod_base = OTHER; note = 2'-O-methylcytidine-3'-phosphorothioate
  modified_base 23: mod_base = OTHER; note = 2'-O-methyladenosine
attggtcttgtgttacacatcca

SEQ ID NO: 507 - RNA, 23 nt, synthetic construct
  source 1..23: mol_type = other RNA
  modified_base 1: mod_base = OTHER; note = 2'-O-methyladenosine-3'-phosphorothioate
  modified_base 2: mod_base = OTHER; note = 2'-deoxy-2'-fluoroadenosine-3'-phosphorothioate
  modified_base 3: mod_base = OTHER; note = 2'-O-methyluridine-3'-phosphate
  modified_base 4: mod_base = OTHER; note = 2'-O-methyladenosine-3'-phosphate
  modified_base 5: mod_base = OTHER; note = 2'-O-methyladenosine-3'-phosphate
  modified_base 6: mod_base = OTHER; note = 2'-deoxy-2'-fluorocytidine-3'-phosphate
  modified_base 7: mod_base = OTHER; note = 2'-O-methyladenosine-3'-phosphate
  modified_base 8: mod_base = OTHER; note = 2'-deoxy-2'-fluorouridine-3'-phosphate
  modified_base 9: mod_base = OTHER; note = 2'-deoxy-2'-fluorouridine-3'-phosphate
  modified_base 10: mod_base = OTHER; note = 2'-O-methylcytidine-3'-phosphate
  modified_base 11: mod_base = OTHER; note = 2'-O-methyladenosine-3'-phosphate
  modified_base 12: mod_base = OTHER; note = 2'-O-methylguanosine-3'-phosphate
  modified_base 13: mod_base = OTHER; note = 2'-O-methyladenosine-3'-phosphate
  modified_base 14: mod_base = OTHER; note = 2'-deoxy-2'-fluorocytidine-3'-phosphate
  modified_base 15: mod_base = OTHER; note = 2'-O-methyluridine-3'-phosphate
  modified_base 16: mod_base = OTHER; note = 2'-deoxy-2'-fluorocytidine-3'-phosphate
  modified_base 17: mod_base = OTHER; note = 2'-O-methyluridine-3'-phosphate
  modified_base 18: mod_base = OTHER; note = 2'-O-methylcytidine-3'-phosphate
  modified_base 19: mod_base = OTHER; note = 2'-O-methyladenosine-3'-phosphate
  modified_base 20: mod_base = OTHER; note = 2'-O-methylguanosine-3'-phosphate
  modified_base 21: mod_base = OTHER; note = 2'-O-methyluridine-3'-phosphorothioate
  modified_base 22: mod_base = OTHER; note = 2'-O-methyluridine-3'-phosphorothioate
  modified_base 23: mod_base = OTHER; note = 2'-O-methylguanosine
aataacattcagactctcagttg

SEQ ID NO: 508 - RNA, 23 nt, synthetic construct
  source 1..23: mol_type = other RNA
  modified_base 1: mod_base = OTHER; note = 2'-O-methyladenosine-3'-phosphorothioate
  modified_base 2: mod_base = OTHER; note = 2'-deoxy-2'-fluorocytidine-3'-phosphorothioate
  modified_base 3: mod_base = OTHER; note = 2'-O-methyladenosine-3'-phosphate
  modified_base 4: mod_base = OTHER; note = 2'-O-methyladenosine-3'-phosphate
  modified_base 5: mod_base = OTHER; note = 2'-O-methyluridine-3'-phosphate
  modified_base 6: mod_base = OTHER; note = 2'-deoxy-2'-fluorocytidine-3'-phosphate
  modified_base 7: mod_base = OTHER; note = 2'-O-methylcytidine-3'-phosphate
  modified_base 8: mod_base = OTHER; note = 2'-deoxy-2'-fluorouridine-3'-phosphate
  modified_base 9: mod_base = OTHER; note = 2'-deoxy-2'-fluoroadenosine-3'-phosphate
  modified_base 10: mod_base = OTHER; note = 2'-O-methylguanosine-3'-phosphate
  modified_base 11: mod_base = OTHER; note = 2'-O-methyladenosine-3'-phosphate
  modified_base 12: mod_base = OTHER; note = 2'-O-methylcytidine-3'-phosphate
  modified_base 13: mod_base = OTHER; note = 2'-O-methyluridine-3'-phosphate
  modified_base 14: mod_base = OTHER; note = 2'-deoxy-2'-fluorocytidine-3'-phosphate
  modified_base 15: mod_base = OTHER; note = 2'-O-methyladenosine-3'-phosphate
  modified_base 16: mod_base = OTHER; note = 2'-deoxy-2'-fluorocytidine-3'-phosphate
  modified_base 17: mod_base = OTHER; note = 2'-O-methylguanosine-3'-phosphate
  modified_base 18: mod_base = OTHER; note = 2'-O-methyluridine-3'-phosphate
  modified_base 19: mod_base = OTHER; note = 2'-O-methylguanosine-3'-phosphate
  modified_base 20: mod_base = OTHER; note = 2'-O-methyluridine-3'-phosphate
  modified_base 21: mod_base = OTHER; note = 2'-O-methylguanosine-3'-phosphorothioate
  modified_base 22: mod_base = OTHER; note = 2'-O-methylcytidine-3'-phosphorothioate
  modified_base 23: mod_base = OTHER; note = 2'-O-methylcytidine
acaatcctagactcacgtgtgcc

SEQ ID NO: 509 - RNA, 23 nt, synthetic construct
  source 1..23: mol_type = other RNA
  modified_base 1: mod_base = OTHER; note = 2'-O-methyladenosine-3'-phosphorothioate
  modified_base 2: mod_base = OTHER; note = 2'-deoxy-2'-fluorouridine-3'-phosphorothioate
  modified_base 3: mod_base = OTHER; note = 2'-O-methyluridine-3'-phosphate
  modified_base 4: mod_base = OTHER; note = 2'-O-methylguanosine-3'-phosphate
  modified_base 5: mod_base = OTHER; note = 2'-O-methyluridine-3'-phosphate
  modified_base 6: mod_base = OTHER; note = 2'-deoxy-2'-fluorouridine-3'-phosphate
  modified_base 7: mod_base = OTHER; note = 2'-O-methylcytidine-3'-phosphate
  modified_base 8: mod_base = OTHER; note = 2'-deoxy-2'-fluoroadenosine-3'-phosphate
  modified_base 9: mod_base = OTHER; note = 2'-deoxy-2'-fluorouridine-3'-phosphate
  modified_base 10: mod_base = OTHER; note = 2'-O-methyluridine-3'-phosphate
  modified_base 11: mod_base = OTHER; note = 2'-O-methyluridine-3'-phosphate
  modified_base 12: mod_base = OTHER; note = 2'-O-methyladenosine-3'-phosphate
  modified_base 13: mod_base = OTHER; note = 2'-O-methylcytidine-3'-phosphate
  modified_base 14: mod_base = OTHER; note = 2'-deoxy-2'-fluoroadenosine-3'-phosphate
  modified_base 15: mod_base = OTHER; note = 2'-O-methyluridine-3'-phosphate
  modified_base 16: mod_base = OTHER; note = 2'-deoxy-2'-fluoroguanosine-3'-phosphate
  modified_base 17: mod_base = OTHER; note = 2'-O-methylcytidine-3'-phosphate
  modified_base 18: mod_base = OTHER; note = 2'-O-methyluridine-3'-phosphate
  modified_base 19: mod_base = OTHER; note = 2'-O-methylcytidine-3'-phosphate
  modified_base 20: mod_base = OTHER; note = 2'-O-methyluridine-3'-phosphate
  modified_base 21: mod_base = OTHER; note = 2'-O-methyluridine-3'-phosphorothioate
  modified_base 22: mod_base = OTHER; note = 2'-O-methylguanosine-3'-phosphorothioate
  modified_base 23: mod_base = OTHER; note = 2'-O-methylguanosine
attgttcatttacatgctcttgg

SEQ ID NO: 510 - RNA, 23 nt, synthetic construct
  source 1..23: mol_type = other RNA
  modified_base 1: mod_base = OTHER; note = 2'-O-methyladenosine-3'-phosphorothioate
  modified_base 2: mod_base = OTHER; note = 2'-deoxy-2'-fluorouridine-3'-phosphorothioate
  modified_base 3: mod_base = OTHER; note = 2'-O-methyluridine-3'-phosphate
  modified_base 4: mod_base = OTHER; note = 2'-O-methylcytidine-3'-phosphate
  modified_base 5: mod_base = OTHER; note = 2'-O-methyladenosine-3'-phosphate
  modified_base 6: mod_base = OTHER; note = 2'-deoxy-2'-fluoroadenosine-3'-phosphate
  modified_base 7: mod_base = OTHER; note = 2'-O-methyluridine-3'-phosphate
  modified_base 8: mod_base = OTHER; note = 2'-deoxy-2'-fluoroadenosine-3'-phosphate
  modified_base 9: mod_base = OTHER; note = 2'-deoxy-2'-fluorouridine-3'-phosphate
  modified_base 10: mod_base = OTHER; note = 2'-O-methyluridine-3'-phosphate
  modified_base 11: mod_base = OTHER; note = 2'-O-methyluridine-3'-phosphate
  modified_base 12: mod_base = OTHER; note = 2'-O-methylguanosine-3'-phosphate
  modified_base 13: mod_base = OTHER; note = 2'-O-methylcytidine-3'-phosphate
  modified_base 14: mod_base = OTHER; note = 2'-deoxy-2'-fluorouridine-3'-phosphate
  modified_base 15: mod_base = OTHER; note = 2'-O-methyluridine-3'-phosphate
  modified_base 16: mod_base = OTHER; note = 2'-deoxy-2'-fluoroguanosine-3'-phosphate
  modified_base 17: mod_base = OTHER; note = 2'-O-methyluridine-3'-phosphate
  modified_base 18: mod_base = OTHER; note = 2'-O-methyluridine-3'-phosphate
  modified_base 19: mod_base = OTHER; note = 2'-O-methylguanosine-3'-phosphate
  modified_base 20: mod_base = OTHER; note = 2'-O-methyluridine-3'-phosphate
  modified_base 21: mod_base = OTHER; note = 2'-O-methyluridine-3'-phosphorothioate
  modified_base 22: mod_base = OTHER; note = 2'-O-methylcytidine-3'-phosphorothioate
  modified_base 23: mod_base = OTHER; note = 2'-O-methyladenosine
attcaatatttgcttgttgttca

SEQ ID NO: 511 - RNA, 23 nt, synthetic construct
  source 1..23: mol_type = other RNA
  modified_base 1: mod_base = OTHER; note = 2'-O-methyladenosine-3'-phosphorothioate
  modified_base 2: mod_base = OTHER; note = 2'-deoxy-2'-fluorouridine-3'-phosphorothioate
  modified_base 3: mod_base = OTHER; note = 2'-O-methyladenosine-3'-phosphate
  modified_base 4: mod_base = OTHER; note = 2'-O-methylguanosine-3'-phosphate
  modified_base 5: mod_base = OTHER; note = 2'-O-methylcytidine-3'-phosphate
  modified_base 6: mod_base = OTHER; note = 2'-deoxy-2'-fluoroadenosine-3'-phosphate
  modified_base 7: mod_base = OTHER; note = 2'-O-methyladenosine-3'-phosphate
  modified_base 8: mod_base = OTHER; note = 2'-deoxy-2'-fluorouridine-3'-phosphate
  modified_base 9: mod_base = OTHER; note = 2'-deoxy-2'-fluoroguanosine-3'-phosphate
  modified_base 10: mod_base = OTHER; note = 2'-O-methylguanosine-3'-phosphate
  modified_base 11: mod_base = OTHER; note = 2'-O-methylguanosine-3'-phosphate
  modified_base 12: mod_base = OTHER; note = 2'-O-methyladenosine-3'-phosphate
  modified_base 13: mod_base = OTHER; note = 2'-O-methyladenosine-3'-phosphate
  modified_base 14: mod_base = OTHER; note = 2'-deoxy-2'-fluoroadenosine-3'-phosphate
  modified_base 15: mod_base = OTHER; note = 2'-O-methyluridine-3'-phosphate
  modified_base 16: mod_base = OTHER; note = 2'-deoxy-2'-fluoroadenosine-3'-phosphate
  modified_base 17: mod_base = OTHER; note = 2'-O-methyladenosine-3'-phosphate
  modified_base 18: mod_base = OTHER; note = 2'-O-methylguanosine-3'-phosphate
  modified_base 19: mod_base = OTHER; note = 2'-O-methyluridine-3'-phosphate
  modified_base 20: mod_base = OTHER; note = 2'-O-methylguanosine-3'-phosphate
  modified_base 21: mod_base = OTHER; note = 2'-O-methylguanosine-3'-phosphorothioate
  modified_base 22: mod_base = OTHER; note = 2'-O-methyluridine-3'-phosphorothioate
  modified_base 23: mod_base = OTHER; note = 2'-O-methylcytidine
atagcaatgggaaataagtggtc

SEQ ID NO: 512 - RNA, 23 nt, synthetic construct
  source 1..23: mol_type = other RNA
  modified_base 1: mod_base = OTHER; note = 2'-O-methyladenosine-3'-phosphorothioate
  modified_base 2: mod_base = OTHER; note = 2'-deoxy-2'-fluoroadenosine-3'-phosphorothioate
  modified_base 3: mod_base = OTHER; note = 2'-O-methylguanosine-3'-phosphate
  modified_base 4: mod_base = OTHER; note = 2'-O-methyladenosine-3'-phosphate
  modified_base 5: mod_base = OTHER; note = 2'-O-methylcytidine-3'-phosphate
  modified_base 6: mod_base = OTHER; note = 2'-deoxy-2'-fluorouridine-3'-phosphate
  modified_base 7: mod_base = OTHER; note = 2'-O-methylguanosine-3'-phosphate
  modified_base 8: mod_base = OTHER; note = 2'-deoxy-2'-fluorouridine-3'-phosphate
  modified_base 9: mod_base = OTHER; note = 2'-deoxy-2'-fluorouridine-3'-phosphate
  modified_base 10: mod_base = OTHER; note = 2'-O-methyluridine-3'-phosphate
  modified_base 11: mod_base = OTHER; note = 2'-O-methylcytidine-3'-phosphate
  modified_base 12: mod_base = OTHER; note = 2'-O-methyladenosine-3'-phosphate
  modified_base 13: mod_base = OTHER; note = 2'-O-methyladenosine-3'-phosphate
  modified_base 14: mod_base = OTHER; note = 2'-deoxy-2'-fluoroadenosine-3'-phosphate
  modified_base 15: mod_base = OTHER; note = 2'-O-methyladenosine-3'-phosphate
  modified_base 16: mod_base = OTHER; note = 2'-deoxy-2'-fluorocytidine-3'-phosphate
  modified_base 17: mod_base = OTHER; note = 2'-O-methylcytidine-3'-phosphate
  modified_base 18: mod_base = OTHER; note = 2'-O-methylguanosine-3'-phosphate
  modified_base 19: mod_base = OTHER; note = 2'-O-methylguanosine-3'-phosphate
  modified_base 20: mod_base = OTHER; note = 2'-O-methylguanosine-3'-phosphate
  modified_base 21: mod_base = OTHER; note = 2'-O-methylcytidine-3'-phosphorothioate
  modified_base 22: mod_base = OTHER; note = 2'-O-methyladenosine-3'-phosphorothioate
  modified_base 23: mod_base = OTHER; note = 2'-O-methylguanosine
aagactgtttcaaaaccgggcag

SEQ ID NO: 513 - RNA, 23 nt, synthetic construct
  source 1..23: mol_type = other RNA
  modified_base 1: mod_base = OTHER; note = 2'-O-methyladenosine-3'-phosphorothioate
  modified_base 2: mod_base = OTHER; note = 2'-deoxy-2'-fluorocytidine-3'-phosphorothioate
  modified_base 3: mod_base = OTHER; note = 2'-O-methyladenosine-3'-phosphate
  modified_base 4: mod_base = OTHER; note = 2'-O-methylcytidine-3'-phosphate
  modified_base 5: mod_base = OTHER; note = 2'-O-methyladenosine-3'-phosphate
  modified_base 6: mod_base = OTHER; note = 2'-deoxy-2'-fluoroguanosine-3'-phosphate
  modified_base 7: mod_base = OTHER; note = 2'-O-methylguanosine-3'-phosphate
  modified_base 8: mod_base = OTHER; note = 2'-deoxy-2'-fluorouridine-3'-phosphate
  modified_base 9: mod_base = OTHER; note = 2'-deoxy-2'-fluorocytidine-3'-phosphate
  modified_base 10: mod_base = OTHER; note = 2'-O-methyladenosine-3'-phosphate
  modified_base 11: mod_base = OTHER; note = 2'-O-methyluridine-3'-phosphate
  modified_base 12: mod_base = OTHER; note = 2'-O-methyluridine-3'-phosphate
  modified_base 13: mod_base = OTHER; note = 2'-O-methylcytidine-3'-phosphate
  modified_base 14: mod_base = OTHER; note = 2'-deoxy-2'-fluorouridine-3'-phosphate
  modified_base 15: mod_base = OTHER; note = 2'-O-methylcytidine-3'-phosphate
  modified_base 16: mod_base = OTHER; note = 2'-deoxy-2'-fluorocytidine-3'-phosphate
  modified_base 17: mod_base = OTHER; note = 2'-O-methyluridine-3'-phosphate
  modified_base 18: mod_base = OTHER; note = 2'-O-methylguanosine-3'-phosphate
  modified_base 19: mod_base = OTHER; note = 2'-O-methyluridine-3'-phosphate
  modified_base 20: mod_base = OTHER; note = 2'-O-methylguanosine-3'-phosphate
  modified_base 21: mod_base = OTHER; note = 2'-O-methyladenosine-3'-phosphorothioate
  modified_base 22: mod_base = OTHER; note = 2'-O-methylcytidine-3'-phosphorothioate
  modified_base 23: mod_base = OTHER; note = 2'-O-methylcytidine
acacaggtcattctcctgtgacc

SEQ ID NO: 514 - RNA, 23 nt, synthetic construct
  source 1..23: mol_type = other RNA
  modified_base 1: mod_base = OTHER; note = 2'-O-methyladenosine-3'-phosphorothioate
  modified_base 2: mod_base = OTHER; note = 2'-deoxy-2'-fluorouridine-3'-phosphorothioate
  modified_base 3: mod_base = OTHER; note = 2'-O-methyluridine-3'-phosphate
  modified_base 4: mod_base = OTHER; note = 2'-O-methylcytidine-3'-phosphate
  modified_base 5: mod_base = OTHER; note = 2'-O-methyluridine-3'-phosphate
  modified_base 6: mod_base = OTHER; note = 2'-deoxy-2'-fluoroadenosine-3'-phosphate
  modified_base 7: mod_base = OTHER; note = 2'-O-methyladenosine-3'-phosphate
  modified_base 8: mod_base = OTHER; note = 2'-deoxy-2'-fluoroadenosine-3'-phosphate
  modified_base 9: mod_base = OTHER; note = 2'-deoxy-2'-fluorocytidine-3'-phosphate
  modified_base 10: mod_base = OTHER; note = 2'-O-methyladenosine-3'-phosphate
  modified_base 11: mod_base = OTHER; note = 2'-O-methyluridine-3'-phosphate
  modified_base 12: mod_base = OTHER; note = 2'-O-methylguanosine-3'-phosphate
  modified_base 13: mod_base = OTHER; note = 2'-O-methyluridine-3'-phosphate
  modified_base 14: mod_base = OTHER; note = 2'-deoxy-2'-fluoroadenosine-3'-phosphate
  modified_base 15: mod_base = OTHER; note = 2'-O-methyluridine-3'-phosphate
  modified_base 16: mod_base = OTHER; note = 2'-deoxy-2'-fluorocytidine-3'-phosphate
  modified_base 17: mod_base = OTHER; note = 2'-O-methyluridine-3'-phosphate
  modified_base 18: mod_base = OTHER; note = 2'-O-methylcytidine-3'-phosphate
  modified_base 19: mod_base = OTHER; note = 2'-O-methyluridine-3'-phosphate
  modified_base 20: mod_base = OTHER; note = 2'-O-methylcytidine-3'-phosphate
  modified_base 21: mod_base = OTHER; note = 2'-O-methylcytidine-3'-phosphorothioate
  modified_base 22: mod_base = OTHER; note = 2'-O-methylcytidine-3'-phosphorothioate
  modified_base 23: mod_base = OTHER; note = 2'-O-methyladenosine
attctaaacatgtatctctccca

SEQ ID NO: 515 - RNA, 23 nt, synthetic construct
  source 1..23: mol_type = other RNA
  modified_base 1: mod_base = OTHER; note = 2'-O-methyladenosine-3'-phosphorothioate
  modified_base 2: mod_base = OTHER; note = 2'-deoxy-2'-fluorouridine-3'-phosphorothioate
  modified_base 3: mod_base = OTHER; note = 2'-O-methylguanosine-3'-phosphate
  modified_base 4: mod_base = OTHER; note = 2'-O-methylcytidine-3'-phosphate
  modified_base 5: mod_base = OTHER; note = 2'-O-methylcytidine-3'-phosphate
  modified_base 6: mod_base = OTHER; note = 2'-deoxy-2'-fluorouridine-3'-phosphate
  modified_base 7: mod_base = OTHER; note = 2'-O-methyluridine-3'-phosphate
  modified_base 8: mod_base = OTHER; note = 2'-deoxy-2'-fluorouridine-3'-phosphate
  modified_base 9: mod_base = OTHER; note = 2'-deoxy-2'-fluoroguanosine-3'-phosphate
  modified_base 10: mod_base = OTHER; note = 2'-O-methyluridine-3'-phosphate
  modified_base 11: mod_base = OTHER; note = 2'-O-methylcytidine-3'-phosphate
  modified_base 12: mod_base = OTHER; note = 2'-O-methylcytidine-3'-phosphate
  modified_base 13: mod_base = OTHER; note = 2'-O-methyluridine-3'-phosphate
  modified_base 14: mod_base = OTHER; note = 2'-deoxy-2'-fluorouridine-3'-phosphate
  modified_base 15: mod_base = OTHER; note = 2'-O-methyluridine-3'-phosphate
  modified_base 16: mod_base = OTHER; note = 2'-deoxy-2'-fluorocytidine-3'-phosphate
  modified_base 17: mod_base = OTHER; note = 2'-O-methyluridine-3'-phosphate
  modified_base 18: mod_base = OTHER; note = 2'-O-methylcytidine-3'-phosphate
  modified_base 19: mod_base = OTHER; note = 2'-O-methyluridine-3'-phosphate
  modified_base 20: mod_base = OTHER; note = 2'-O-methyluridine-3'-phosphate
  modified_base 21: mod_base = OTHER; note = 2'-O-methylcytidine-3'-phosphorothioate
  modified_base 22: mod_base = OTHER; note = 2'-O-methylcytidine-3'-phosphorothioate
  modified_base 23: mod_base = OTHER; note = 2'-O-methyluridine
atgcctttgtcctttctcttcct

SEQ ID NO: 516 - RNA, 23 nt, synthetic construct
  source 1..23: mol_type = other RNA
  modified_base 1: mod_base = OTHER; note = 2'-O-methyladenosine-3'-phosphorothioate
  modified_base 2: mod_base = OTHER; note = 2'-deoxy-2'-fluoroadenosine-3'-phosphorothioate
  modified_base 3: mod_base = OTHER; note = 2'-O-methyluridine-3'-phosphate
  modified_base 4: mod_base = OTHER; note = 2'-O-methyluridine-3'-phosphate
  modified_base 5: mod_base = OTHER; note = 2'-O-methyluridine-3'-phosphate
  modified_base 6: mod_base = OTHER; note = 2'-deoxy-2'-fluorouridine-3'-phosphate
  modified_base 7: mod_base = OTHER; note = 2'-O-methyladenosine-3'-phosphate
  modified_base 8: mod_base = OTHER; note = 2'-deoxy-2'-fluoroadenosine-3'-phosphate
  modified_base 9: mod_base = OTHER; note = 2'-deoxy-2'-fluoroadenosine-3'-phosphate
  modified_base 10: mod_base = OTHER; note = 2'-O-methyluridine-3'-phosphate
  modified_base 11: mod_base = OTHER; note = 2'-O-methylguanosine-3'-phosphate
  modified_base 12: mod_base = OTHER; note = 2'-O-methylguanosine-3'-phosphate
  modified_base 13: mod_base = OTHER; note = 2'-O-methyluridine-3'-phosphate
  modified_base 14: mod_base = OTHER; note = 2'-deoxy-2'-fluoroadenosine-3'-phosphate
  modified_base 15: mod_base = OTHER; note = 2'-O-methyladenosine-3'-phosphate
  modified_base 16: mod_base = OTHER; note = 2'-deoxy-2'-fluoroadenosine-3'-phosphate
  modified_base 17: mod_base = OTHER; note = 2'-O-methyladenosine-3'-phosphate
  modified_base 18: mod_base = OTHER; note = 2'-O-methylcytidine-3'-phosphate
  modified_base 19: mod_base = OTHER; note = 2'-O-methylguanosine-3'-phosphate
  modified_base 20: mod_base = OTHER; note = 2'-O-methyluridine-3'-phosphate
  modified_base 21: mod_base = OTHER; note = 2'-O-methylguanosine-3'-phosphorothioate
  modified_base 22: mod_base = OTHER; note = 2'-O-methyluridine-3'-phosphorothioate
  modified_base 23: mod_base = OTHER; note = 2'-O-methylguanosine
aattttaaatggtaaaacgtgtg

SEQ ID NO: 517 - RNA, 23 nt, synthetic construct
  source 1..23: mol_type = other RNA
  modified_base 1: mod_base = OTHER; note = 2'-O-methyladenosine-3'-phosphorothioate
  modified_base 2: mod_base = OTHER; note = 2'-deoxy-2'-fluoroguanosine-3'-phosphorothioate
  modified_base 3: mod_base = OTHER; note = 2'-O-methyluridine-3'-phosphate
  modified_base 4: mod_base = OTHER; note = 2'-O-methyladenosine-3'-phosphate
  modified_base 5: mod_base = OTHER; note = 2'-O-methyladenosine-3'-phosphate
  modified_base 6: mod_base = OTHER; note = 2'-deoxy-2'-fluoroguanosine-3'-phosphate
  modified_base 7: mod_base = OTHER; note = 2'-O-methyladenosine-3'-phosphate
  modified_base 8: mod_base = OTHER; note = 2'-deoxy-2'-fluorouridine-3'-phosphate
  modified_base 9: mod_base = OTHER; note = 2'-deoxy-2'-fluoroguanosine-3'-phosphate
  modified_base 10: mod_base = OTHER; note = 2'-O-methyladenosine-3'-phosphate
  modified_base 11: mod_base = OTHER; note = 2'-O-methylcytidine-3'-phosphate
  modified_base 12: mod_base = OTHER; note = 2'-O-methyluridine-3'-phosphate
  modified_base 13: mod_base = OTHER; note = 2'-O-methylguanosine-3'-phosphate
  modified_base 14: mod_base = OTHER; note = 2'-deoxy-2'-fluorouridine-3'-phosphate
  modified_base 15: mod_base = OTHER; note = 2'-O-methyluridine-3'-phosphate
  modified_base 16: mod_base = OTHER; note = 2'-deoxy-2'-fluoroguanosine-3'-phosphate
  modified_base 17: mod_base = OTHER; note = 2'-O-methylcytidine-3'-phosphate
  modified_base 18: mod_base = OTHER; note = 2'-O-methyladenosine-3'-phosphate
  modified_base 19: mod_base = OTHER; note = 2'-O-methyluridine-3'-phosphate
  modified_base 20: mod_base = OTHER; note = 2'-O-methyluridine-3'-phosphate
  modified_base 21: mod_base = OTHER; note = 2'-O-methylguanosine-3'-phosphorothioate
  modified_base 22: mod_base = OTHER; note = 2'-O-methyluridine-3'-phosphorothioate
  modified_base 23: mod_base = OTHER; note = 2'-O-methyluridine
agtaagatgactgttgcattgtt

SEQ ID NO: 518 - RNA, 23 nt, synthetic construct
  source 1..23: mol_type = other RNA
  modified_base 1: mod_base = OTHER; note = 2'-O-methyladenosine-3'-phosphorothioate
  modified_base 2: mod_base = OTHER; note = 2'-deoxy-2'-fluorouridine-3'-phosphorothioate
  modified_base 3: mod_base = OTHER; note = 2'-O-methylcytidine-3'-phosphate
  modified_base 4: mod_base = OTHER; note = 2'-O-methyluridine-3'-phosphate
  modified_base 5: mod_base = OTHER; note = 2'-O-methylguanosine-3'-phosphate
  modified_base 6: mod_base = OTHER; note = 2'-deoxy-2'-fluorocytidine-3'-phosphate
  modified_base 7: mod_base = OTHER; note = 2'-O-methyladenosine-3'-phosphate
  modified_base 8: mod_base = OTHER; note = 2'-deoxy-2'-fluorouridine-3'-phosphate
  modified_base 9: mod_base = OTHER; note = 2'-deoxy-2'-fluorouridine-3'-phosphate
  modified_base 10: mod_base = OTHER; note = 2'-O-methyluridine-3'-phosphate
  modified_base 11: mod_base = OTHER; note = 2'-O-methylcytidine-3'-phosphate
  modified_base 12: mod_base = OTHER; note = 2'-O-methyluridine-3'-phosphate
  modified_base 13: mod_base = OTHER; note = 2'-O-methylcytidine-3'-phosphate
  modified_base 14: mod_base = OTHER; note = 2'-deoxy-2'-fluorouridine-3'-phosphate
  modified_base 15: mod_base = OTHER; note = 2'-O-methylguanosine-3'-phosphate
  modified_base 16: mod_base = OTHER; note = 2'-deoxy-2'-fluorocytidine-3'-phosphate
  modified_base 17: mod_base = OTHER; note = 2'-O-methyluridine-3'-phosphate
  modified_base 18: mod_base = OTHER; note = 2'-O-methylguanosine-3'-phosphate
  modified_base 19: mod_base = OTHER; note = 2'-O-methyluridine-3'-phosphate
  modified_base 20: mod_base = OTHER; note = 2'-O-methyladenosine-3'-phosphate
  modified_base 21: mod_base = OTHER; note = 2'-O-methyladenosine-3'-phosphorothioate
  modified_base 22: mod_base = OTHER; note = 2'-O-methylguanosine-3'-phosphorothioate
  modified_base 23: mod_base = OTHER; note = 2'-O-methyladenosine
atctgcatttctctgctgtaaga

SEQ ID NO: 519 - RNA, 23 nt, synthetic construct
  source 1..23: mol_type = other RNA
  modified_base 1: mod_base = OTHER; note = 2'-O-methyladenosine-3'-phosphorothioate
  modified_base 2: mod_base = OTHER; note = 2'-deoxy-2'-fluoroguanosine-3'-phosphorothioate
  modified_base 3: mod_base = OTHER; note = 2'-O-methylcytidine-3'-phosphate
  modified_base 4: mod_base = OTHER; note = 2'-O-methyladenosine-3'-phosphate
  modified_base 5: mod_base = OTHER; note = 2'-O-methylguanosine-3'-phosphate
  modified_base 6: mod_base = OTHER; note = 2'-deoxy-2'-fluorouridine-3'-phosphate
  modified_base 7: mod_base = OTHER; note = 2'-O-methyluridine-3'-phosphate
  modified_base 8: mod_base = OTHER; note = 2'-deoxy-2'-fluorouridine-3'-phosphate
  modified_base 9: mod_base = OTHER; note = 2'-deoxy-2'-fluorouridine-3'-phosphate
  modified_base 10: mod_base = OTHER; note = 2'-O-methylguanosine-3'-phosphate
  modified_base 11: mod_base = OTHER; note = 2'-O-methylcytidine-3'-phosphate
  modified_base 12: mod_base = OTHER; note = 2'-O-methyluridine-3'-phosphate
  modified_base 13: mod_base = OTHER; note = 2'-O-methyluridine-3'-phosphate
  modified_base 14: mod_base = OTHER; note = 2'-deoxy-2'-fluorouridine-3'-phosphate
  modified_base 15: mod_base = OTHER; note = 2'-O-methyluridine-3'-phosphate
  modified_base 16: mod_base = OTHER; note = 2'-deoxy-2'-fluorocytidine-3'-phosphate
  modified_base 17: mod_base = OTHER; note = 2'-O-methyluridine-3'-phosphate
  modified_base 18: mod_base = OTHER; note = 2'-O-methylcytidine-3'-phosphate
  modified_base 19: mod_base = OTHER; note = 2'-O-methyluridine-3'-phosphate
  modified_base 20: mod_base = OTHER; note = 2'-O-methylguanosine-3'-phosphate
  modified_base 21: mod_base = OTHER; note = 2'-O-methylcytidine-3'-phosphorothioate
  modified_base 22: mod_base = OTHER; note = 2'-O-methyladenosine-3'-phosphorothioate
  modified_base 23: mod_base = OTHER; note = 2'-O-methyluridine
agcagttttgcttttctctgcat

SEQ ID NO: 520 - RNA, 23 nt, synthetic construct
  source 1..23: mol_type = other RNA
  modified_base 1: mod_base = OTHER; note = 2'-O-methyladenosine-3'-phosphorothioate
  modified_base 2: mod_base = OTHER; note = 2'-deoxy-2'-fluoroadenosine-3'-phosphorothioate
  modified_base 3: mod_base = OTHER; note = 2'-O-methyluridine-3'-phosphate
  modified_base 4: mod_base = OTHER; note = 2'-O-methyluridine-3'-phosphate
  modified_base 5: mod_base = OTHER; note = 2'-O-methylcytidine-3'-phosphate
  modified_base 6: mod_base = OTHER; note = 2'-deoxy-2'-fluoroadenosine-3'-phosphate
  modified_base 7: mod_base = OTHER; note = 2'-O-methylcytidine-3'-phosphate
  modified_base 8: mod_base = OTHER; note = 2'-deoxy-2'-fluorocytidine-3'-phosphate
  modified_base 9: mod_base = OTHER; note = 2'-deoxy-2'-fluorocytidine-3'-phosphate
  modified_base 10: mod_base = OTHER; note = 2'-O-methyluridine-3'-phosphate
  modified_base 11: mod_base = OTHER; note = 2'-O-methyluridine-3'-phosphate
  modified_base 12: mod_base = OTHER; note = 2'-O-methyluridine-3'-phosphate
  modified_base 13: mod_base = OTHER; note = 2'-O-methyladenosine-3'-phosphate
  modified_base 14: mod_base = OTHER; note = 2'-deoxy-2'-fluorouridine-3'-phosphate
  modified_base 15: mod_base = OTHER; note = 2'-O-methyluridine-3'-phosphate
  modified_base 16: mod_base = OTHER; note = 2'-deoxy-2'-fluorocytidine-3'-phosphate
  modified_base 17: mod_base = OTHER; note = 2'-O-methyladenosine-3'-phosphate
  modified_base 18: mod_base = OTHER; note = 2'-O-methylcytidine-3'-phosphate
  modified_base 19: mod_base = OTHER; note = 2'-O-methyladenosine-3'-phosphate
  modified_base 20: mod_base = OTHER; note = 2'-O-methylguanosine-3'-phosphate
  modified_base 21: mod_base = OTHER; note = 2'-O-methyluridine-3'-phosphorothioate
  modified_base 22: mod_base = OTHER; note = 2'-O-methylcytidine-3'-phosphorothioate
  modified_base 23: mod_base = OTHER; note = 2'-O-methyladenosine
aattcaccctttattcacagtca

SEQ ID NO: 521 - RNA, 23 nt, synthetic construct
  source 1..23: mol_type = other RNA
  modified_base 1: mod_base = OTHER; note = 2'-O-methyladenosine-3'-phosphorothioate
  modified_base 2: mod_base = OTHER; note = 2'-deoxy-2'-fluorouridine-3'-phosphorothioate
  modified_base 3: mod_base = OTHER; note = 2'-O-methylcytidine-3'-phosphate
  modified_base 4: mod_base = OTHER; note = 2'-O-methyluridine-3'-phosphate
  modified_base 5: mod_base = OTHER; note = 2'-O-methyluridine-3'-phosphate
  modified_base 6: mod_base = OTHER; note = 2'-deoxy-2'-fluorouridine-3'-phosphate
  modified_base 7: mod_base = OTHER; note = 2'-O-methylguanosine-3'-phosphate
  modified_base 8: mod_base = OTHER; note = 2'-deoxy-2'-fluoroadenosine-3'-phosphate
  modified_base 9: mod_base = OTHER; note = 2'-deoxy-2'-fluoroguanosine-3'-phosphate
  modified_base 10: mod_base = OTHER; note = 2'-O-methylguanosine-3'-phosphate
  modified_base 11: mod_base = OTHER; note = 2'-O-methyladenosine-3'-phosphate
  modified_base 12: mod_base = OTHER; note = 2'-O-methyluridine-3'-phosphate
  modified_base 13: mod_base = OTHER; note = 2'-O-methyluridine-3'-phosphate
  modified_base 14: mod_base = OTHER; note = 2'-deoxy-2'-fluorouridine-3'-phosphate
  modified_base 15: mod_base = OTHER; note = 2'-O-methylguanosine-3'-phosphate
  modified_base 16: mod_base = OTHER; note = 2'-deoxy-2'-fluoroadenosine-3'-phosphate
  modified_base 17: mod_base = OTHER; note = 2'-O-methylguanosine-3'-phosphate
  modified_base 18: mod_base = OTHER; note = 2'-O-methyladenosine-3'-phosphate
  modified_base 19: mod_base = OTHER; note = 2'-O-methylcytidine-3'-phosphate
  modified_base 20: mod_base = OTHER; note = 2'-O-methyluridine-3'-phosphate
  modified_base 21: mod_base = OTHER; note = 2'-O-methyladenosine-3'-phosphorothioate
  modified_base 22: mod_base = OTHER; note = 2'-O-methylcytidine-3'-phosphorothioate
  modified_base 23: mod_base = OTHER; note = 2'-O-methyladenosine
atctttgaggatttgagactaca

SEQ ID NO: 522 - RNA, 23 nt, synthetic construct
  source 1..23: mol_type = other RNA
  modified_base 1: mod_base = OTHER; note = 2'-O-methyladenosine-3'-phosphorothioate
  modified_base 2: mod_base = OTHER; note = 2'-deoxy-2'-fluoroadenosine-3'-phosphorothioate
  modified_base 3: mod_base = OTHER; note = 2'-O-methyladenosine-3'-phosphate
  modified_base 4: mod_base = OTHER; note = 2'-O-methyluridine-3'-phosphate
  modified_base 5: mod_base = OTHER; note = 2'-O-methylguanosine-3'-phosphate
  modified_base 6: mod_base = OTHER; note = 2'-deoxy-2'-fluoroadenosine-3'-phosphate
  modified_base 7: mod_base = OTHER; note = 2'-O-methyladenosine-3'-phosphate
  modified_base 8: mod_base = OTHER; note = 2'-deoxy-2'-fluoroadenosine-3'-phosphate
  modified_base 9: mod_base = OTHER; note = 2'-deoxy-2'-fluorouridine-3'-phosphate
  modified_base 10: mod_base = OTHER; note = 2'-O-methyladenosine-3'-phosphate
  modified_base 11: mod_base = OTHER; note = 2'-O-methyladenosine-3'-phosphate
  modified_base 12: mod_base = OTHER; note = 2'-O-methyladenosine-3'-phosphate
  modified_base 13: mod_base = OTHER; note = 2'-O-methylcytidine-3'-phosphate
  modified_base 14: mod_base = OTHER; note = 2'-deoxy-2'-fluoroadenosine-3'-phosphate
  modified_base 15: mod_base = OTHER; note = 2'-O-methylcytidine-3'-phosphate
  modified_base 16: mod_base = OTHER; note = 2'-deoxy-2'-fluoroadenosine-3'-phosphate
  modified_base 17: mod_base = OTHER; note = 2'-O-methylguanosine-3'-phosphate
  modified_base 18: mod_base = OTHER; note = 2'-O-methylcytidine-3'-phosphate
  modified_base 19: mod_base = OTHER; note = 2'-O-methyluridine-3'-phosphate
  modified_base 20: mod_base = OTHER; note = 2'-O-methylcytidine-3'-phosphate
  modified_base 21: mod_base = OTHER; note = 2'-O-methyluridine-3'-phosphorothioate
  modified_base 22: mod_base = OTHER; note = 2'-O-methyluridine-3'-phosphorothioate
  modified_base 23: mod_base = OTHER; note = 2'-O-methyluridine
aaatgaaataaacacagctcttt

SEQ ID NO: 523 - RNA, 23 nt, synthetic construct
  source 1..23: mol_type = other RNA
  modified_base 1: mod_base = OTHER; note = 2'-O-methyladenosine-3'-phosphorothioate
  modified_base 2: mod_base = OTHER; note = 2'-deoxy-2'-fluoroadenosine-3'-phosphorothioate
  modified_base 3: mod_base = OTHER; note = 2'-O-methylcytidine-3'-phosphate
  modified_base 4: mod_base = OTHER; note = 2'-O-methylcytidine-3'-phosphate
  modified_base 5: mod_base = OTHER; note = 2'-O-methyladenosine-3'-phosphate
  modified_base 6: mod_base = OTHER; note = 2'-deoxy-2'-fluoroguanosine-3'-phosphate
  modified_base 7: mod_base = OTHER; note = 2'-O-methyladenosine-3'-phosphate
  modified_base 8: mod_base = OTHER; note = 2'-deoxy-2'-fluorouridine-3'-phosphate
  modified_base 9: mod_base = OTHER; note = 2'-deoxy-2'-fluoroadenosine-3'-phosphate
  modified_base 10: mod_base = OTHER; note = 2'-O-methylguanosine-3'-phosphate
  modified_base 11: mod_base = OTHER; note = 2'-O-methyluridine-3'-phosphate
  modified_base 12: mod_base = OTHER; note = 2'-O-methylcytidine-3'-phosphate
  modified_base 13: mod_base = OTHER; note = 2'-O-methyladenosine-3'-phosphate
  modified_base 14: mod_base = OTHER; note = 2'-deoxy-2'-fluoroadenosine-3'-phosphate
  modified_base 15: mod_base = OTHER; note = 2'-O-methyladenosine-3'-phosphate
  modified_base 16: mod_base = OTHER; note = 2'-deoxy-2'-fluorouridine-3'-phosphate
  modified_base 17: mod_base = OTHER; note = 2'-O-methyluridine-3'-phosphate
  modified_base 18: mod_base = OTHER; note = 2'-O-methyladenosine-3'-phosphate
  modified_base 19: mod_base = OTHER; note = 2'-O-methyladenosine-3'-phosphate
  modified_base 20: mod_base = OTHER; note = 2'-O-methylguanosine-3'-phosphate
  modified_base 21: mod_base = OTHER; note = 2'-O-methyluridine-3'-phosphorothioate
  modified_base 22: mod_base = OTHER; note = 2'-O-methyluridine-3'-phosphorothioate
  modified_base 23: mod_base = OTHER; note = 2'-O-methyladenosine
aaccagatagtcaaattaagtta

SEQ ID NO: 524 - RNA, 23 nt, synthetic construct
  source 1..23: mol_type = other RNA
  modified_base 1: mod_base = OTHER; note = 2'-O-methyladenosine-3'-phosphorothioate
  modified_base 2: mod_base = OTHER; note = 2'-deoxy-2'-fluoroadenosine-3'-phosphorothioate
  modified_base 3: mod_base = OTHER; note = 2'-O-methyluridine-3'-phosphate
  modified_base 4: mod_base = OTHER; note = 2'-O-methylguanosine-3'-phosphate
  modified_base 5: mod_base = OTHER; note = 2'-O-methyluridine-3'-phosphate
  modified_base 6: mod_base = OTHER; note = 2'-deoxy-2'-fluorouridine-3'-phosphate
  modified_base 7: mod_base = OTHER; note = 2'-O-methylguanosine-3'-phosphate
  modified_base 8: mod_base = OTHER; note = 2'-deoxy-2'-fluorouridine-3'-phosphate
  modified_base 9: mod_base = OTHER; note = 2'-deoxy-2'-fluorouridine-3'-phosphate
  modified_base 10: mod_base = OTHER; note = 2'-O-methylguanosine-3'-phosphate
  modified_base 11: mod_base = OTHER; note = 2'-O-methyladenosine-3'-phosphate
  modified_base 12: mod_base = OTHER; note = 2'-O-methylcytidine-3'-phosphate
  modified_base 13: mod_base = OTHER; note = 2'-O-methyluridine-3'-phosphate
  modified_base 14: mod_base = OTHER; note = 2'-deoxy-2'-fluorouridine-3'-phosphate
  modified_base 15: mod_base = OTHER; note = 2'-O-methyladenosine-3'-phosphate
  modified_base 16: mod_base = OTHER; note = 2'-deoxy-2'-fluorocytidine-3'-phosphate
  modified_base 17: mod_base = OTHER; note = 2'-O-methyladenosine-3'-phosphate
  modified_base 18: mod_base = OTHER; note = 2'-O-methyluridine-3'-phosphate
  modified_base 19: mod_base = OTHER; note = 2'-O-methylguanosine-3'-phosphate
  modified_base 20: mod_base = OTHER; note = 2'-O-methyladenosine-3'-phosphate
  modified_base 21: mod_base = OTHER; note = 2'-O-methylguanosine-3'-phosphorothioate
  modified_base 22: mod_base = OTHER; note = 2'-O-methyladenosine-3'-phosphorothioate
  modified_base 23: mod_base = OTHER; note = 2'-O-methylguanosine
aatgttgttgacttacatgagag

SEQ ID NO: 525 - RNA, 23 nt, synthetic construct
  source 1..23: mol_type = other RNA
  modified_base 1: mod_base = OTHER; note = 2'-O-methyladenosine-3'-phosphorothioate
  modified_base 2: mod_base = OTHER; note = 2'-deoxy-2'-fluoroadenosine-3'-phosphorothioate
  modified_base 3: mod_base = OTHER; note = 2'-O-methylguanosine-3'-phosphate
  modified_base 4: mod_base = OTHER; note = 2'-O-methyladenosine-3'-phosphate
  modified_base 5: mod_base = OTHER; note = 2'-O-methyluridine-3'-phosphate
  modified_base 6: mod_base = OTHER; note = 2'-deoxy-2'-fluoroguanosine-3'-phosphate
  modified_base 7: mod_base = OTHER; note = 2'-O-methyladenosine-3'-phosphate
  modified_base 8: mod_base = OTHER; note = 2'-deoxy-2'-fluoroadenosine-3'-phosphate
  modified_base 9: mod_base = OTHER; note = 2'-deoxy-2'-fluoroadenosine-3'-phosphate
  modified_base 10: mod_base = OTHER; note = 2'-O-methylguanosine-3'-phosphate
  modified_base 11: mod_base = OTHER; note = 2'-O-methylguanosine-3'-phosphate
  modified_base 12: mod_base = OTHER; note = 2'-O-methylguanosine-3'-phosphate
  modified_base 13: mod_base = OTHER; note = 2'-O-methyladenosine-3'-phosphate
  modified_base 14: mod_base = OTHER; note = 2'-deoxy-2'-fluoroadenosine-3'-phosphate
  modified_base 15: mod_base = OTHER; note = 2'-O-methyluridine-3'-phosphate
  modified_base 16: mod_base = OTHER; note = 2'-deoxy-2'-fluoroguanosine-3'-phosphate
  modified_base 17: mod_base = OTHER; note = 2'-O-methyluridine-3'-phosphate
  modified_base 18: mod_base = OTHER; note = 2'-O-methylcytidine-3'-phosphate
  modified_base 19: mod_base = OTHER; note = 2'-O-methyluridine-3'-phosphate
  modified_base 20: mod_base = OTHER; note = 2'-O-methyluridine-3'-phosphate
  modified_base 21: mod_base = OTHER; note = 2'-O-methyladenosine-3'-phosphorothioate
  modified_base 22: mod_base = OTHER; note = 2'-O-methylcytidine-3'-phosphorothioate
  modified_base 23: mod_base = OTHER; note = 2'-O-methylcytidine
aagatgaaagggaatgtcttacc

SEQ ID NO: 526 - RNA, 23 nt, synthetic construct
  source 1..23: mol_type = other RNA
  modified_base 1: mod_base = OTHER; note = 2'-O-methyladenosine-3'-phosphorothioate
  modified_base 2: mod_base = OTHER; note = 2'-deoxy-2'-fluoroadenosine-3'-phosphorothioate
  modified_base 3: mod_base = OTHER; note = 2'-O-methylguanosine-3'-phosphate
  modified_base 4: mod_base = OTHER; note = 2'-O-methyluridine-3'-phosphate
  modified_base 5: mod_base = OTHER; note = 2'-O-methyladenosine-3'-phosphate
  modified_base 6: mod_base = OTHER; note = 2'-deoxy-2'-fluoroguanosine-3'-phosphate
  modified_base 7: mod_base = OTHER; note = 2'-O-methyladenosine-3'-phosphate
  modified_base 8: mod_base = OTHER; note = 2'-deoxy-2'-fluorouridine-3'-phosphate
  modified_base 9: mod_base = OTHER; note = 2'-deoxy-2'-fluoroguanosine-3'-phosphate
  modified_base 10: mod_base = OTHER; note = 2'-O-methyladenosine-3'-phosphate
  modified_base 11: mod_base = OTHER; note = 2'-O-methyladenosine-3'-phosphate
  modified_base 12: mod_base = OTHER; note = 2'-O-methylcytidine-3'-phosphate
  modified_base 13: mod_base = OTHER; note = 2'-O-methyladenosine-3'-phosphate
  modified_base 14: mod_base = OTHER; note = 2'-deoxy-2'-fluorocytidine-3'-phosphate
  modified_base 15: mod_base = OTHER; note = 2'-O-methyladenosine-3'-phosphate
  modified_base 16: mod_base = OTHER; note = 2'-deoxy-2'-fluoroadenosine-3'-phosphate
  modified_base 17: mod_base = OTHER; note = 2'-O-methyladenosine-3'-phosphate
  modified_base 18: mod_base = OTHER; note = 2'-O-methylguanosine-3'-phosphate
  modified_base 19: mod_base = OTHER; note = 2'-O-methyladenosine-3'-phosphate
  modified_base 20: mod_base = OTHER; note = 2'-O-methyluridine-3'-phosphate
  modified_base 21: mod_base = OTHER; note = 2'-O-methylguanosine-3'-phosphorothioate
  modified_base 22: mod_base = OTHER; note = 2'-O-methyladenosine-3'-phosphorothioate
  modified_base 23: mod_base = OTHER; note = 2'-O-methyladenosine
aagtagatgaacacaaagatgaa

SEQ ID NO: 527 - RNA, 23 nt, synthetic construct
  source 1..23: mol_type = other RNA
  modified_base 1: mod_base = OTHER; note = 2'-O-methyladenosine-3'-phosphorothioate
  modified_base 2: mod_base = OTHER; note = 2'-deoxy-2'-fluoroadenosine-3'-phosphorothioate
  modified_base 3: mod_base = OTHER; note = 2'-O-methyluridine-3'-phosphate
  modified_base 4: mod_base = OTHER; note = 2'-O-methyladenosine-3'-phosphate
  modified_base 5: mod_base = OTHER; note = 2'-O-methyladenosine-3'-phosphate
  modified_base 6: mod_base = OTHER; note = 2'-deoxy-2'-fluoroguanosine-3'-phosphate
  modified_base 7: mod_base = OTHER; note = 2'-O-methylguanosine-3'-phosphate
  modified_base 8: mod_base = OTHER; note = 2'-deoxy-2'-fluoroguanosine-3'-phosphate
  modified_base 9: mod_base = OTHER; note = 2'-deoxy-2'-fluoroadenosine-3'-phosphate
  modified_base 10: mod_base = OTHER; note = 2'-O-methylcytidine-3'-phosphate
  modified_base 11: mod_base = OTHER; note = 2'-O-methyluridine-3'-phosphate
  modified_base 12: mod_base = OTHER; note = 2'-O-methyluridine-3'-phosphate
  modified_base 13: mod_base = OTHER; note = 2'-O-methylguanosine-3'-phosphate
  modified_base 14: mod_base = OTHER; note = 2'-deoxy-2'-fluoroadenosine-3'-phosphate
  modified_base 15: mod_base = OTHER; note = 2'-O-methylguanosine-3'-phosphate
  modified_base 16: mod_base = OTHER; note = 2'-deoxy-2'-fluoroadenosine-3'-phosphate
  modified_base 17: mod_base = OTHER; note = 2'-O-methyladenosine-3'-phosphate
  modified_base 18: mod_base = OTHER; note = 2'-O-methylguanosine-3'-phosphate
  modified_base 19: mod_base = OTHER; note = 2'-O-methylcytidine-3'-phosphate
  modified_base 20: mod_base = OTHER; note = 2'-O-methyladenosine-3'-phosphate
  modified_base 21: mod_base = OTHER; note = 2'-O-methyluridine-3'-phosphorothioate
  modified_base 22: mod_base = OTHER; note = 2'-O-methylguanosine-3'-phosphorothioate
  modified_base 23: mod_base = OTHER; note = 2'-O-methylguanosine
aataagggacttgagaagcatgg

SEQ ID NO: 528 - RNA, 23 nt, synthetic construct
  source 1..23: mol_type = other RNA
  modified_base 1: mod_base = OTHER; note = 2'-O-methyladenosine-3'-phosphorothioate
  modified_base 2: mod_base = OTHER; note = 2'-deoxy-2'-fluoroguanosine-3'-phosphorothioate
  modified_base 3: mod_base = OTHER; note = 2'-O-methyluridine-3'-phosphate
  modified_base 4: mod_base = OTHER; note = 2'-O-methyladenosine-3'-phosphate
  modified_base 5: mod_base = OTHER; note = 2'-O-methyluridine-3'-phosphate
  modified_base 6: mod_base = OTHER; note = 2'-deoxy-2'-fluoroguanosine-3'-phosphate
  modified_base 7: mod_base = OTHER; note = 2'-O-methyluridine-3'-phosphate
  modified_base 8: mod_base = OTHER; note = 2'-deoxy-2'-fluoroadenosine-3'-phosphate
  modified_base 9: mod_base = OTHER; note = 2'-deoxy-2'-fluoroguanosine-3'-phosphate
  modified_base 10: mod_base = OTHER; note = 2'-O-methylguanosine-3'-phosphate
  modified_base 11: mod_base = OTHER; note = 2'-O-methyluridine-3'-phosphate
  modified_base 12: mod_base = OTHER; note = 2'-O-methyluridine-3'-phosphate
  modified_base 13: mod_base = OTHER; note = 2'-O-methyladenosine-3'-phosphate
  modified_base 14: mod_base = OTHER; note = 2'-deoxy-2'-fluorouridine-3'-phosphate
  modified_base 15: mod_base = OTHER; note = 2'-O-methyladenosine-3'-phosphate
  modified_base 16: mod_base = OTHER; note = 2'-deoxy-2'-fluorouridine-3'-phosphate
  modified_base 17: mod_base = OTHER; note = 2'-O-methylguanosine-3'-phosphate
  modified_base 18: mod_base = OTHER; note = 2'-O-methylcytidine-3'-phosphate
  modified_base 19: mod_base = OTHER; note = 2'-O-methyladenosine-3'-phosphate
  modified_base 20: mod_base = OTHER; note = 2'-O-methyladenosine-3'-phosphate
  modified_base 21: mod_base = OTHER; note = 2'-O-methyladenosine-3'-phosphorothioate
  modified_base 22: mod_base = OTHER; note = 2'-O-methyluridine-3'-phosphorothioate
  modified_base 23: mod_base = OTHER; note = 2'-O-methyladenosine
agtatgtaggttatatgcaaata

SEQ ID NO: 529 - RNA, 23 nt, synthetic construct
  source 1..23: mol_type = other RNA
  modified_base 1: mod_base = OTHER; note = 2'-O-methyladenosine-3'-phosphorothioate
  modified_base 2: mod_base = OTHER; note = 2'-deoxy-2'-fluoroguanosine-3'-phosphorothioate
  modified_base 3: mod_base = OTHER; note = 2'-O-methyladenosine-3'-phosphate
  modified_base 4: mod_base = OTHER; note = 2'-O-methyluridine-3'-phosphate
  modified_base 5: mod_base = OTHER; note = 2'-O-methyluridine-3'-phosphate
  modified_base 6: mod_base = OTHER; note = 2'-deoxy-2'-fluoroadenosine-3'-phosphate
  modified_base 7: mod_base = OTHER; note = 2'-O-methyluridine-3'-phosphate
  modified_base 8: mod_base = OTHER; note = 2'-deoxy-2'-fluoroadenosine-3'-phosphate
  modified_base 9: mod_base = OTHER; note = 2'-deoxy-2'-fluorocytidine-3'-phosphate
  modified_base 10: mod_base = OTHER; note = 2'-O-methyladenosine-3'-phosphate
  modified_base 11: mod_base = OTHER; note = 2'-O-methyladenosine-3'-phosphate
  modified_base 12: mod_base = OTHER; note = 2'-O-methylguanosine-3'-phosphate
  modified_base 13: mod_base = OTHER; note = 2'-O-methyladenosine-3'-phosphate
  modified_base 14: mod_base = OTHER; note = 2'-deoxy-2'-fluoroguanosine-3'-phosphate
  modified_base 15: mod_base = OTHER; note = 2'-O-methyladenosine-3'-phosphate
  modified_base 16: mod_base = OTHER; note = 2'-deoxy-2'-fluoroadenosine-3'-phosphate
  modified_base 17: mod_base = OTHER; note = 2'-O-methylguanosine-3'-phosphate
  modified_base 18: mod_base = OTHER; note = 2'-O-methylguanosine-3'-phosphate
  modified_base 19: mod_base = OTHER; note = 2'-O-methyluridine-3'-phosphate
  modified_base 20: mod_base = OTHER; note = 2'-O-methyladenosine-3'-phosphate
  modified_base 21: mod_base = OTHER; note = 2'-O-methyluridine-3'-phosphorothioate
  modified_base 22: mod_base = OTHER; note = 2'-O-methylguanosine-3'-phosphorothioate
  modified_base 23: mod_base = OTHER; note = 2'-O-methyluridine
agattatacaagagaaggtatgt

SEQ ID NO: 530 - RNA, 23 nt, synthetic construct
  source 1..23: mol_type = other RNA
  modified_base 1: mod_base = OTHER; note = 2'-O-methyladenosine-3'-phosphorothioate
  modified_base 2: mod_base = OTHER; note = 2'-deoxy-2'-fluoroadenosine-3'-phosphorothioate
  modified_base 3: mod_base = OTHER; note = 2'-O-methylcytidine-3'-phosphate
  modified_base 4: mod_base = OTHER; note = 2'-O-methyladenosine-3'-phosphate
  modified_base 5: mod_base = OTHER; note = 2'-O-methyladenosine-3'-phosphate
  modified_base 6: mod_base = OTHER; note = 2'-deoxy-2'-fluorocytidine-3'-phosphate
  modified_base 7: mod_base = OTHER; note = 2'-O-methylguanosine-3'-phosphate
  modified_base 8: mod_base = OTHER; note = 2'-deoxy-2'-fluoroadenosine-3'-phosphate
  modified_base 9: mod_base = OTHER; note = 2'-deoxy-2'-fluorouridine-3'-phosphate
  modified_base 10: mod_base = OTHER; note = 2'-O-methyluridine-3'-phosphate
  modified_base 11: mod_base = OTHER; note = 2'-O-methyladenosine-3'-phosphate
  modified_base 12: mod_base = OTHER; note = 2'-O-methyladenosine-3'-phosphate
  modified_base 13: mod_base = OTHER; note = 2'-O-methyladenosine-3'-phosphate
  modified_base 14: mod_base = OTHER; note = 2'-deoxy-2'-fluorouridine-3'-phosphate
  modified_base 15: mod_base = OTHER; note = 2'-O-methyladenosine-3'-phosphate
  modified_base 16: mod_base = OTHER; note = 2'-deoxy-2'-fluoroguanosine-3'-phosphate
  modified_base 17: mod_base = OTHER; note = 2'-O-methylcytidine-3'-phosphate
  modified_base 18: mod_base = OTHER; note = 2'-O-methyladenosine-3'-phosphate
  modified_base 19: mod_base = OTHER; note = 2'-O-methyluridine-3'-phosphate
  modified_base 20: mod_base = OTHER; note = 2'-O-methyluridine-3'-phosphate
  modified_base 21: mod_base = OTHER; note = 2'-O-methyluridine-3'-phosphorothioate
  modified_base 22: mod_base = OTHER; note = 2'-O-methyladenosine-3'-phosphorothioate
  modified_base 23: mod_base = OTHER; note = 2'-O-methylcytidine
aacaacgattaaatagcatttac

SEQ ID NO: 531 - RNA, 23 nt, synthetic construct
  source 1..23: mol_type = other RNA
  modified_base 1: mod_base = OTHER; note = 2'-O-methyladenosine-3'-phosphorothioate
  modified_base 2: mod_base = OTHER; note = 2'-deoxy-2'-fluoroadenosine-3'-phosphorothioate
  modified_base 3: mod_base = OTHER; note = 2'-O-methyladenosine-3'-phosphate
  modified_base 4: mod_base = OTHER; note = 2'-O-methyladenosine-3'-phosphate
  modified_base 5: mod_base = OTHER; note = 2'-O-methylcytidine-3'-phosphate
  modified_base 6: mod_base = OTHER; note = 2'-deoxy-2'-fluoroadenosine-3'-phosphate
  modified_base 7: mod_base = OTHER; note = 2'-O-methyladenosine-3'-phosphate
  modified_base 8: mod_base = OTHER; note = 2'-deoxy-2'-fluorouridine-3'-phosphate
  modified_base 9: mod_base = OTHER; note = 2'-deoxy-2'-fluoroadenosine-3'-phosphate
  modified_base 10: mod_base = OTHER; note = 2'-O-methylcytidine-3'-phosphate
  modified_base 11: mod_base = OTHER; note = 2'-O-methyladenosine-3'-phosphate
  modified_base 12: mod_base = OTHER; note = 2'-O-methylguanosine-3'-phosphate
  modified_base 13: mod_base = OTHER; note = 2'-O-methyluridine-3'-phosphate
  modified_base 14: mod_base = OTHER; note = 2'-deoxy-2'-fluoroadenosine-3'-phosphate
  modified_base 15: mod_base = OTHER; note = 2'-O-methyluridine-3'-phosphate
  modified_base 16: mod_base = OTHER; note = 2'-deoxy-2'-fluoroadenosine-3'-phosphate
  modified_base 17: mod_base = OTHER; note = 2'-O-methyladenosine-3'-phosphate
  modified_base 18: mod_base = OTHER; note = 2'-O-methylcytidine-3'-phosphate
  modified_base 19: mod_base = OTHER; note = 2'-O-methyladenosine-3'-phosphate
  modified_base 20: mod_base = OTHER; note = 2'-O-methyladenosine-3'-phosphate
  modified_base 21: mod_base = OTHER; note = 2'-O-methylcytidine-3'-phosphorothioate
  modified_base 22: mod_base = OTHER; note = 2'-O-methylguanosine-3'-phosphorothioate
  modified_base 23: mod_base = OTHER; note = 2'-O-methyladenosine
aaaacaatacagtataacaacga

SEQ ID NO: 532 - RNA, 23 nt, synthetic construct
  source 1..23: mol_type = other RNA
  modified_base 1: mod_base = OTHER; note = 2'-O-methyladenosine-3'-phosphorothioate
  modified_base 2: mod_base = OTHER; note = 2'-deoxy-2'-fluorouridine-3'-phosphorothioate
  modified_base 3: mod_base = OTHER; note = 2'-O-methylguanosine-3'-phosphate
  modified_base 4: mod_base = OTHER; note = 2'-O-methyladenosine-3'-phosphate
  modified_base 5: mod_base = OTHER; note = 2'-O-methylcytidine-3'-phosphate
  modified_base 6: mod_base = OTHER; note = 2'-deoxy-2'-fluoroadenosine-3'-phosphate
  modified_base 7: mod_base = OTHER; note = 2'-O-methylguanosine-3'-phosphate
  modified_base 8: mod_base = OTHER; note = 2'-deoxy-2'-fluoroadenosine-3'-phosphate
  modified_base 9: mod_base = OTHER; note = 2'-deoxy-2'-fluoroadenosine-3'-phosphate
  modified_base 10: mod_base = OTHER; note = 2'-O-methyladenosine-3'-phosphate
  modified_base 11: mod_base = OTHER; note = 2'-O-methyladenosine-3'-phosphate
  modified_base 12: mod_base = OTHER; note = 2'-O-methyluridine-3'-phosphate
  modified_base 13: mod_base = OTHER; note = 2'-O-methyladenosine-3'-phosphate
  modified_base 14: mod_base = OTHER; note = 2'-deoxy-2'-fluoroadenosine-3'-phosphate
  modified_base 15: mod_base = OTHER; note = 2'-O-methylcytidine-3'-phosphate
  modified_base 16: mod_base = OTHER; note = 2'-deoxy-2'-fluoroadenosine-3'-phosphate
  modified_base 17: mod_base = OTHER; note = 2'-O-methyladenosine-3'-phosphate
  modified_base 18: mod_base = OTHER; note = 2'-O-methyluridine-3'-phosphate
  modified_base 19: mod_base = OTHER; note = 2'-O-methyladenosine-3'-phosphate
  modified_base 20: mod_base = OTHER; note = 2'-O-methyluridine-3'-phosphate
  modified_base 21: mod_base = OTHER; note = 2'-O-methylguanosine-3'-phosphorothioate
  modified_base 22: mod_base = OTHER; note = 2'-O-methyladenosine-3'-phosphorothioate
  modified_base 23: mod_base = OTHER; note = 2'-O-methylcytidine
atgacagaaaataacaatatgac

SEQ ID NO: 533 - RNA, 23 nt, synthetic construct
  source 1..23: mol_type = other RNA
  modified_base 1: mod_base = OTHER; note = 2'-O-methyladenosine-3'-phosphorothioate
  modified_base 2: mod_base = OTHER; note = 2'-deoxy-2'-fluoroadenosine-3'-phosphorothioate
  modified_base 3: mod_base = OTHER; note = 2'-O-methyladenosine-3'-phosphate
  modified_base 4: mod_base = OTHER; note = 2'-O-methyladenosine-3'-phosphate
  modified_base 5: mod_base = OTHER; note = 2'-O-methylguanosine-3'-phosphate
  modified_base 6: mod_base = OTHER; note = 2'-deoxy-2'-fluoroadenosine-3'-phosphate
  modified_base 7: mod_base = OTHER; note = 2'-O-methylcytidine-3'-phosphate
  modified_base 8: mod_base = OTHER; note = 2'-deoxy-2'-fluorouridine-3'-phosphate
  modified_base 9: mod_base = OTHER; note = 2'-deoxy-2'-fluorouridine-3'-phosphate
  modified_base 10: mod_base = OTHER; note = 2'-O-methylguanosine-3'-phosphate
  modified_base 11: mod_base = OTHER; note = 2'-O-methyladenosine-3'-phosphate
  modified_base 12: mod_base = OTHER; note = 2'-O-methyladenosine-3'-phosphate
  modified_base 13: mod_base = OTHER; note = 2'-O-methyladenosine-3'-phosphate
  modified_base 14: mod_base = OTHER; note = 2'-deoxy-2'-fluoroadenosine-3'-phosphate
  modified_base 15: mod_base = OTHER; note = 2'-O-methyladenosine-3'-phosphate
  modified_base 16: mod_base = OTHER; note = 2'-deoxy-2'-fluoroguanosine-3'-phosphate
  modified_base 17: mod_base = OTHER; note = 2'-O-methyladenosine-3'-phosphate
  modified_base 18: mod_base = OTHER; note = 2'-O-methyluridine-3'-phosphate
  modified_base 19: mod_base = OTHER; note = 2'-O-methylguanosine-3'-phosphate
  modified_base 20: mod_base = OTHER; note = 2'-O-methyladenosine-3'-phosphate
  modified_base 21: mod_base = OTHER; note = 2'-O-methylcytidine-3'-phosphorothioate
  modified_base 22: mod_base = OTHER; note = 2'-O-methyladenosine-3'-phosphorothioate
  modified_base 23: mod_base = OTHER; note = 2'-O-methylguanosine
aaaagacttgaaaaagatgacag

SEQ ID NO: 534 - RNA, 23 nt, synthetic construct
  source 1..23: mol_type = other RNA
  modified_base 1: mod_base = OTHER; note = 2'-O-methyladenosine-3'-phosphorothioate
  modified_base 2: mod_base = OTHER; note = 2'-deoxy-2'-fluoroadenosine-3'-phosphorothioate
  modified_base 3: mod_base = OTHER; note = 2'-O-methyladenosine-3'-phosphate
  modified_base 4: mod_base = OTHER; note = 2'-O-methyluridine-3'-phosphate
  modified_base 5: mod_base = OTHER; note = 2'-O-methyluridine-3'-phosphate
  modified_base 6: mod_base = OTHER; note = 2'-deoxy-2'-fluorocytidine-3'-phosphate
  modified_base 7: mod_base = OTHER; note = 2'-O-methyladenosine-3'-phosphate
  modified_base 8: mod_base = OTHER; note = 2'-deoxy-2'-fluoroadenosine-3'-phosphate
  modified_base 9: mod_base = OTHER; note = 2'-deoxy-2'-fluorocytidine-3'-phosphate
  modified_base 10: mod_base = OTHER; note = 2'-O-methylcytidine-3'-phosphate
  modified_base 11: mod_base = OTHER; note = 2'-O-methyladenosine-3'-phosphate
  modified_base 12: mod_base = OTHER; note = 2'-O-methyladenosine-3'-phosphate
  modified_base 13: mod_base = OTHER; note = 2'-O-methylcytidine-3'-phosphate
  modified_base 14: mod_base = OTHER; note = 2'-deoxy-2'-fluorouridine-3'-phosphate
  modified_base 15: mod_base = OTHER; note = 2'-O-methylguanosine-3'-phosphate
  modified_base 16: mod_base = OTHER; note = 2'-deoxy-2'-fluorouridine-3'-phosphate
  modified_base 17: mod_base = OTHER; note = 2'-O-methylguanosine-3'-phosphate
  modified_base 18: mod_base = OTHER; note = 2'-O-methylguanosine-3'-phosphate
  modified_base 19: mod_base = OTHER; note = 2'-O-methyladenosine-3'-phosphate
  modified_base 20: mod_base = OTHER; note = 2'-O-methyluridine-3'-phosphate
  modified_base 21: mod_base = OTHER; note = 2'-O-methylguanosine-3'-phosphorothioate
  modified_base 22: mod_base = OTHER; note = 2'-O-methylguanosine-3'-phosphorothioate
  modified_base 23: mod_base = OTHER; note = 2'-O-methyladenosine
aaattcaaccaactgtggatgga

SEQ ID NO: 535 - RNA, 23 nt, synthetic construct
  source 1..23: mol_type = other RNA
  modified_base 1: mod_base = OTHER; note = 2'-O-methyladenosine-3'-phosphorothioate
  modified_base 2: mod_base = OTHER; note = 2'-deoxy-2'-fluoroguanosine-3'-phosphorothioate
  modified_base 3: mod_base = OTHER; note = 2'-O-methyladenosine-3'-phosphate
  modified_base 4: mod_base = OTHER; note = 2'-O-methyladenosine-3'-phosphate
  modified_base 5: mod_base = OTHER; note = 2'-O-methyladenosine-3'-phosphate
  modified_base 6: mod_base = OTHER; note = 2'-deoxy-2'-fluorouridine-3'-phosphate
  modified_base 7: mod_base = OTHER; note = 2'-O-methyluridine-3'-phosphate
  modified_base 8: mod_base = OTHER; note = 2'-deoxy-2'-fluoroadenosine-3'-phosphate
  modified_base 9: mod_base = OTHER; note = 2'-deoxy-2'-fluorouridine-3'-phosphate
  modified_base 10: mod_base = OTHER; note = 2'-O-methylcytidine-3'-phosphate
  modified_base 11: mod_base = OTHER; note = 2'-O-methylcytidine-3'-phosphate
  modified_base 12: mod_base = OTHER; note = 2'-O-methyluridine-3'-phosphate
  modified_base 13: mod_base = OTHER; note = 2'-O-methyladenosine-3'-phosphate
  modified_base 14: mod_base = OTHER; note = 2'-deoxy-2'-fluoroadenosine-3'-phosphate
  modified_base 15: mod_base = OTHER; note = 2'-O-methyladenosine-3'-phosphate
  modified_base 16: mod_base = OTHER; note = 2'-deoxy-2'-fluorouridine-3'-phosphate
  modified_base 17: mod_base = OTHER; note = 2'-O-methyladenosine-3'-phosphate
  modified_base 18: mod_base = OTHER; note = 2'-O-methylcytidine-3'-phosphate
  modified_base 19: mod_base = OTHER; note = 2'-O-methyladenosine-3'-phosphate
  modified_base 20: mod_base = OTHER; note = 2'-O-methylguanosine-3'-phosphate
  modified_base 21: mod_base = OTHER; note = 2'-O-methyluridine-3'-phosphorothioate
  modified_base 22: mod_base = OTHER; note = 2'-O-methyluridine-3'-phosphorothioate
  modified_base 23: mod_base = OTHER; note = 2'-O-methylguanosine
agaaattatcctaaatacagttg

SEQ ID NO: 536 - RNA, 23 nt, synthetic construct
  source 1..23: mol_type = other RNA
  modified_base 1: mod_base = OTHER; note = 2'-O-methyladenosine-3'-phosphorothioate
  modified_base 2: mod_base = OTHER; note = 2'-deoxy-2'-fluoroguanosine-3'-phosphorothioate
  modified_base 3: mod_base = OTHER; note = 2'-O-methylguanosine-3'-phosphate
  modified_base 4: mod_base = OTHER; note = 2'-O-methyluridine-3'-phosphate
  modified_base 5: mod_base = OTHER; note = 2'-O-methyluridine-3'-phosphate
  modified_base 6: mod_base = OTHER; note = 2'-deoxy-2'-fluorouridine-3'-phosphate
  modified_base 7: mod_base = OTHER; note = 2'-O-methylguanosine-3'-phosphate
  modified_base 8: mod_base = OTHER; note = 2'-deoxy-2'-fluoroadenosine-3'-phosphate
  modified_base 9: mod_base = OTHER; note = 2'-deoxy-2'-fluoroadenosine-3'-phosphate
  modified_base 10: mod_base = OTHER; note = 2'-O-methyluridine-3'-phosphate
  modified_base 11: mod_base = OTHER; note = 2'-O-methyluridine-3'-phosphate
  modified_base 12: mod_base = OTHER; note = 2'-O-methyladenosine-3'-phosphate
  modified_base 13: mod_base = OTHER; note = 2'-O-methyladenosine-3'-phosphate
  modified_base 14: mod_base = OTHER; note = 2'-deoxy-2'-fluoroadenosine-3'-phosphate
  modified_base 15: mod_base = OTHER; note = 2'-O-methyladenosine-3'-phosphate
  modified_base 16: mod_base = OTHER; note = 2'-deoxy-2'-fluoroguanosine-3'-phosphate
  modified_base 17: mod_base = OTHER; note = 2'-O-methyluridine-3'-phosphate
  modified_base 18: mod_base = OTHER; note = 2'-O-methylguanosine-3'-phosphate
  modified_base 19: mod_base = OTHER; note = 2'-O-methyladenosine-3'-phosphate
  modified_base 20: mod_base = OTHER; note = 2'-O-methyluridine-3'-phosphate
  modified_base 21: mod_base = OTHER; note = 2'-O-methylguanosine-3'-phosphorothioate
  modified_base 22: mod_base = OTHER; note = 2'-O-methyladenosine-3'-phosphorothioate
  modified_base 23: mod_base = OTHER; note = 2'-O-methyladenosine
aggtttgaattaaaagtgatgaa

SEQ ID NO: 537 - RNA, 23 nt, synthetic construct
  source 1..23: mol_type = other RNA
  modified_base 1: mod_base = OTHER; note = 2'-O-methyladenosine-3'-phosphorothioate
  modified_base 2: mod_base = OTHER; note = 2'-deoxy-2'-fluorouridine-3'-phosphorothioate
  modified_base 3: mod_base = OTHER; note = 2'-O-methyluridine-3'-phosphate
  modified_base 4: mod_base = OTHER; note = 2'-O-methyladenosine-3'-phosphate
  modified_base 5: mod_base = OTHER; note = 2'-O-methyluridine-3'-phosphate
  modified_base 6: mod_base = OTHER; note = 2'-deoxy-2'-fluorouridine-3'-phosphate
  modified_base 7: mod_base = OTHER; note = 2'-O-methylcytidine-3'-phosphate
  modified_base 8: mod_base = OTHER; note = 2'-deoxy-2'-fluoroadenosine-3'-phosphate
  modified_base 9: mod_base = OTHER; note = 2'-deoxy-2'-fluorocytidine-3'-phosphate
  modified_base 10: mod_base = OTHER; note = 2'-O-methyladenosine-3'-phosphate
  modified_base 11: mod_base = OTHER; note = 2'-O-methyluridine-3'-phosphate
  modified_base 12: mod_base = OTHER; note = 2'-O-methyladenosine-3'-phosphate
  modified_base 13: mod_base = OTHER; note = 2'-O-methyluridine-3'-phosphate
  modified_base 14: mod_base = OTHER; note = 2'-deoxy-2'-fluorouridine-3'-phosphate
  modified_base 15: mod_base = OTHER; note = 2'-O-methylguanosine-3'-phosphate
  modified_base 16: mod_base = OTHER; note = 2'-deoxy-2'-fluorouridine-3'-phosphate
  modified_base 17: mod_base = OTHER; note = 2'-O-methylguanosine-3'-phosphate
  modified_base 18: mod_base = OTHER; note = 2'-O-methylguanosine-3'-phosphate
  modified_base 19: mod_base = OTHER; note = 2'-O-methyluridine-3'-phosphate
  modified_base 20: mod_base = OTHER; note = 2'-O-methyluridine-3'-phosphate
  modified_base 21: mod_base = OTHER; note = 2'-O-methyluridine-3'-phosphorothioate
  modified_base 22: mod_base = OTHER; note = 2'-O-methylguanosine-3'-phosphorothioate
  modified_base 23: mod_base = OTHER; note = 2'-O-methyladenosine
attattcacatattgtggtttga

SEQ ID NO: 538 - RNA, 23 nt, synthetic construct
  source 1..23: mol_type = other RNA
  modified_base 1: mod_base = OTHER; note = 2'-O-methyladenosine-3'-phosphorothioate
  modified_base 2: mod_base = OTHER; note = 2'-deoxy-2'-fluoroadenosine-3'-phosphorothioate
  modified_base 3: mod_base = OTHER; note = 2'-O-methyladenosine-3'-phosphate
  modified_base 4: mod_base = OTHER; note = 2'-O-methyladenosine-3'-phosphate
  modified_base 5: mod_base = OTHER; note = 2'-O-methylguanosine-3'-phosphate
  modified_base 6: mod_base = OTHER; note = 2'-deoxy-2'-fluoroadenosine-3'-phosphate
  modified_base 7: mod_base = OTHER; note = 2'-O-methyluridine-3'-phosphate
  modified_base 8: mod_base = OTHER; note = 2'-deoxy-2'-fluorouridine-3'-phosphate
  modified_base 9: mod_base = OTHER; note = 2'-deoxy-2'-fluorocytidine-3'-phosphate
  modified_base 10: mod_base = OTHER; note = 2'-O-methyluridine-3'-phosphate
  modified_base 11: mod_base = OTHER; note = 2'-O-methyluridine-3'-phosphate
  modified_base 12: mod_base = OTHER; note = 2'-O-methyluridine-3'-phosphate
  modified_base 13: mod_base = OTHER; note = 2'-O-methylcytidine-3'-phosphate
  modified_base 14: mod_base = OTHER; note = 2'-deoxy-2'-fluorouridine-3'-phosphate
  modified_base 15: mod_base = OTHER; note = 2'-O-methyladenosine-3'-phosphate
  modified_base 16: mod_base = OTHER; note = 2'-deoxy-2'-fluorouridine-3'-phosphate
  modified_base 17: mod_base = OTHER; note = 2'-O-methylcytidine-3'-phosphate
  modified_base 18: mod_base = OTHER; note = 2'-O-methyluridine-3'-phosphate
  modified_base 19: mod_base = OTHER; note = 2'-O-methylguanosine-3'-phosphate
  modified_base 20: mod_base = OTHER; note = 2'-O-methylcytidine-3'-phosphate
  modified_base 21: mod_base = OTHER; note = 2'-O-methyluridine-3'-phosphorothioate
  modified_base 22: mod_base = OTHER; note = 2'-O-methyluridine-3'-phosphorothioate
  modified_base 23: mod_base = OTHER; note = 2'-O-methyladenosine
aaaagattctttctatctgctta

SEQ ID NO: 539 - RNA, 23 nt, synthetic construct
  source 1..23: mol_type = other RNA
  modified_base 1: mod_base = OTHER; note = 2'-O-methyladenosine-3'-phosphorothioate
  modified_base 2: mod_base = OTHER; note = 2'-deoxy-2'-fluoroadenosine-3'-phosphorothioate
  modified_base 3: mod_base = OTHER; note = 2'-O-methyladenosine-3'-phosphate
  modified_base 4: mod_base = OTHER; note = 2'-O-methyladenosine-3'-phosphate
  modified_base 5: mod_base = OTHER; note = 2'-O-methyladenosine-3'-phosphate
  modified_base 6: mod_base = OTHER; note = 2'-deoxy-2'-fluoroadenosine-3'-phosphate
  modified_base 7: mod_base = OTHER; note = 2'-O-methyluridine-3'-phosphate
  modified_base 8: mod_base = OTHER; note = 2'-deoxy-2'-fluoroadenosine-3'-phosphate
  modified_base 9: mod_base = OTHER; note = 2'-deoxy-2'-fluoroguanosine-3'-phosphate
  modified_base 10: mod_base = OTHER; note = 2'-O-methyluridine-3'-phosphate
  modified_base 11: mod_base = OTHER; note = 2'-O-methyluridine-3'-phosphate
  modified_base 12: mod_base = OTHER; note = 2'-O-methylguanosine-3'-phosphate
  modified_base 13: mod_base = OTHER; note = 2'-O-methyladenosine-3'-phosphate
  modified_base 14: mod_base = OTHER; note = 2'-deoxy-2'-fluoroadenosine-3'-phosphate
  modified_base 15: mod_base = OTHER; note = 2'-O-methylcytidine-3'-phosphate
  modified_base 16: mod_base = OTHER; note = 2'-deoxy-2'-fluoroadenosine-3'-phosphate
  modified_base 17: mod_base = OTHER; note = 2'-O-methyluridine-3'-phosphate
  modified_base 18: mod_base = OTHER; note = 2'-O-methylcytidine-3'-phosphate
  modified_base 19: mod_base = OTHER; note = 2'-O-methylguanosine-3'-phosphate
  modified_base 20: mod_base = OTHER; note = 2'-O-methyladenosine-3'-phosphate
  modified_base 21: mod_base = OTHER; note = 2'-O-methylcytidine-3'-phosphorothioate
  modified_base 22: mod_base = OTHER; note = 2'-O-methyladenosine-3'-phosphorothioate
  modified_base 23: mod_base = OTHER; note = 2'-O-methyluridine
aaaaaatagttgaacatcgacat

SEQ ID NO: 540 - RNA, 23 nt, synthetic construct
  source 1..23: mol_type = other RNA
  modified_base 1: mod_base = OTHER; note = 2'-O-methyladenosine-3'-phosphorothioate
  modified_base 2: mod_base = OTHER; note = 2'-deoxy-2'-fluoroadenosine-3'-phosphorothioate
  modified_base 3: mod_base = OTHER; note = 2'-O-methyladenosine-3'-phosphate
  modified_base 4: mod_base = OTHER; note = 2'-O-methyladenosine-3'-phosphate
  modified_base 5: mod_base = OTHER; note = 2'-O-methyluridine-3'-phosphate
  modified_base 6: mod_base = OTHER; note = 2'-deoxy-2'-fluoroadenosine-3'-phosphate
  modified_base 7: mod_base = OTHER; note = 2'-O-methylguanosine-3'-phosphate
  modified_base 8: mod_base = OTHER; note = 2'-deoxy-2'-fluoroadenosine-3'-phosphate
  modified_base 9: mod_base = OTHER; note = 2'-deoxy-2'-fluoroadenosine-3'-phosphate
  modified_base 10: mod_base = OTHER; note = 2'-O-methyladenosine-3'-phosphate
  modified_base 11: mod_base = OTHER; note = 2'-O-methylguanosine-3'-phosphate
  modified_base 12: mod_base = OTHER; note = 2'-O-methylcytidine-3'-phosphate
  modified_base 13: mod_base = OTHER; note = 2'-O-methyladenosine-3'-phosphate
  modified_base 14: mod_base = OTHER; note = 2'-deoxy-2'-fluoroadenosine-3'-phosphate
  modified_base 15: mod_base = OTHER; note = 2'-O-methylcytidine-3'-phosphate
  modified_base 16: mod_base = OTHER; note = 2'-deoxy-2'-fluorocytidine-3'-phosphate
  modified_base 17: mod_base = OTHER; note = 2'-O-methyladenosine-3'-phosphate
  modified_base 18: mod_base = OTHER; note = 2'-O-methyluridine-3'-phosphate
  modified_base 19: mod_base = OTHER; note = 2'-O-methylguanosine-3'-phosphate
  modified_base 20: mod_base = OTHER; note = 2'-O-methyluridine-3'-phosphate
  modified_base 21: mod_base = OTHER; note = 2'-O-methyluridine-3'-phosphorothioate
  modified_base 22: mod_base = OTHER; note = 2'-O-methylcytidine-3'-phosphorothioate
  modified_base 23: mod_base = OTHER; note = 2'-O-methyluridine
aaaatagaaagcaaccatgttct

SEQ ID NO: 541 - RNA, 23 nt, synthetic construct
  source 1..23: mol_type = other RNA
  modified_base 1: mod_base = OTHER; note = 2'-O-methyladenosine-3'-phosphorothioate
  modified_base 2: mod_base = OTHER; note = 2'-deoxy-2'-fluoroadenosine-3'-phosphorothioate
  modified_base 3: mod_base = OTHER; note = 2'-O-methylguanosine-3'-phosphate
  modified_base 4: mod_base = OTHER; note = 2'-O-methyladenosine-3'-phosphate
  modified_base 5: mod_base = OTHER; note = 2'-O-methyladenosine-3'-phosphate
  modified_base 6: mod_base = OTHER; note = 2'-deoxy-2'-fluoroadenosine-3'-phosphate
  modified_base 7: mod_base = OTHER; note = 2'-O-methylcytidine-3'-phosphate
  modified_base 8: mod_base = OTHER; note = 2'-deoxy-2'-fluorocytidine-3'-phosphate
  modified_base 9: mod_base = OTHER; note = 2'-deoxy-2'-fluorouridine-3'-phosphate
  modified_base 10: mod_base = OTHER; note = 2'-O-methylcytidine-3'-phosphate
  modified_base 11: mod_base = OTHER; note = 2'-O-methylcytidine-3'-phosphate
  modified_base 12: mod_base = OTHER; note = 2'-O-methyladenosine-3'-phosphate
  modified_base 13: mod_base = OTHER; note = 2'-O-methyluridine-3'-phosphate
  modified_base 14: mod_base = OTHER; note = 2'-deoxy-2'-fluoroadenosine-3'-phosphate
  modified_base 15: mod_base = OTHER; note = 2'-O-methyluridine-3'-phosphate
  modified_base 16: mod_base = OTHER; note = 2'-deoxy-2'-fluorocytidine-3'-phosphate
  modified_base 17: mod_base = OTHER; note = 2'-O-methylcytidine-3'-phosphate
  modified_base 18: mod_base = OTHER; note = 2'-O-methyladenosine-3'-phosphate
  modified_base 19: mod_base = OTHER; note = 2'-O-methyladenosine-3'-phosphate
  modified_base 20: mod_base = OTHER; note = 2'-O-methylguanosine-3'-phosphate
  modified_base 21: mod_base = OTHER; note = 2'-O-methyladenosine-3'-phosphorothioate
  modified_base 22: mod_base = OTHER; note = 2'-O-methyladenosine-3'-phosphorothioate
  modified_base 23: mod_base = OTHER; note = 2'-O-methyladenosine
aagaaacctccatatccaagaaa

SEQ ID NO: 542 - RNA, 23 nt, synthetic construct
  source 1..23: mol_type = other RNA
  modified_base 1: mod_base = OTHER; note = 2'-O-methyladenosine-3'-phosphorothioate
  modified_base 2: mod_base = OTHER; note = 2'-deoxy-2'-fluoroadenosine-3'-phosphorothioate
  modified_base 3: mod_base = OTHER; note = 2'-O-methyluridine-3'-phosphate
  modified_base 4: mod_base = OTHER; note = 2'-O-methylguanosine-3'-phosphate
  modified_base 5: mod_base = OTHER; note = 2'-O-methyluridine-3'-phosphate
  modified_base 6: mod_base = OTHER; note = 2'-deoxy-2'-fluorouridine-3'-phosphate
  modified_base 7: mod_base = OTHER; note = 2'-O-methylcytidine-3'-phosphate
  modified_base 8: mod_base = OTHER; note = 2'-deoxy-2'-fluorouridine-3'-phosphate
  modified_base 9: mod_base = OTHER; note = 2'-deoxy-2'-fluoroadenosine-3'-phosphate
  modified_base 10: mod_base = OTHER; note = 2'-O-methylguanosine-3'-phosphate
  modified_base 11: mod_base = OTHER; note = 2'-O-methylguanosine-3'-phosphate
  modified_base 12: mod_base = OTHER; note = 2'-O-methyluridine-3'-phosphate
  modified_base 13: mod_base = OTHER; note = 2'-O-methylcytidine-3'-phosphate
  modified_base 14: mod_base = OTHER; note = 2'-deoxy-2'-fluorouridine-3'-phosphate
  modified_base 15: mod_base = OTHER; note = 2'-O-methyluridine-3'-phosphate
  modified_base 16: mod_base = OTHER; note = 2'-deoxy-2'-fluorocytidine-3'-phosphate
  modified_base 17: mod_base = OTHER; note = 2'-O-methyladenosine-3'-phosphate
  modified_base 18: mod_base = OTHER; note = 2'-O-methyladenosine-3'-phosphate
  modified_base 19: mod_base = OTHER; note = 2'-O-methylguanosine-3'-phosphate
  modified_base 20: mod_base = OTHER; note = 2'-O-methyladenosine-3'-phosphate
  modified_base 21: mod_base = OTHER; note = 2'-O-methyladenosine-3'-phosphorothioate
  modified_base 22: mod_base = OTHER; note = 2'-O-methyladenosine-3'-phosphorothioate
  modified_base 23: mod_base = OTHER; note = 2'-O-methylcytidine
aatgttctaggtcttcaagaaac

SEQ ID NO: 543 - RNA, 23 nt, synthetic construct
  source 1..23: mol_type = other RNA
  modified_base 1: mod_base = OTHER; note = 2'-O-methyladenosine-3'-phosphorothioate
  modified_base 2: mod_base = OTHER; note = 2'-deoxy-2'-fluoroadenosine-3'-phosphorothioate
  modified_base 3: mod_base = OTHER; note = 2'-O-methyladenosine-3'-phosphate
  modified_base 4: mod_base = OTHER; note = 2'-O-methylcytidine-3'-phosphate
  modified_base 5: mod_base = OTHER; note = 2'-O-methyluridine-3'-phosphate
  modified_base 6: mod_base = OTHER; note = 2'-deoxy-2'-fluoroadenosine-3'-phosphate
  modified_base 7: mod_base = OTHER; note = 2'-O-methylguanosine-3'-phosphate
  modified_base 8: mod_base = OTHER; note = 2'-deoxy-2'-fluoroguanosine-3'-phosphate
  modified_base 9: mod_base = OTHER; note = 2'-deoxy-2'-fluorocytidine-3'-phosphate
  modified_base 10: mod_base = OTHER; note = 2'-O-methyladenosine-3'-phosphate
  modified_base 11: mod_base = OTHER; note = 2'-O-methyluridine-3'-phosphate
  modified_base 12: mod_base = OTHER; note = 2'-O-methyluridine-3'-phosphate
  modified_base 13: mod_base = OTHER; note = 2'-O-methylcytidine-3'-phosphate
  modified_base 14: mod_base = OTHER; note = 2'-deoxy-2'-fluorouridine-3'-phosphate
  modified_base 15: mod_base = OTHER; note = 2'-O-methyluridine-3'-phosphate
  modified_base 16: mod_base = OTHER; note = 2'-deoxy-2'-fluorocytidine-3'-phosphate
  modified_base 17: mod_base = OTHER; note = 2'-O-methyluridine-3'-phosphate
  modified_base 18: mod_base = OTHER; note = 2'-O-methyladenosine-3'-phosphate
  modified_base 19: mod_base = OTHER; note = 2'-O-methyluridine-3'-phosphate
  modified_base 20: mod_base = OTHER; note = 2'-O-methylguanosine-3'-phosphate
  modified_base 21: mod_base = OTHER; note = 2'-O-methyluridine-3'-phosphorothioate
  modified_base 22: mod_base = OTHER; note = 2'-O-methyluridine-3'-phosphorothioate
  modified_base 23: mod_base = OTHER; note = 2'-O-methylcytidine
aaactaggcattcttctatgttc

SEQ ID NO: 544 - RNA, 23 nt, synthetic construct
  source 1..23: mol_type = other RNA
  modified_base 1: mod_base = OTHER; note = 2'-O-methyladenosine-3'-phosphorothioate
  modified_base 2: mod_base = OTHER; note = 2'-deoxy-2'-fluoroguanosine-3'-phosphorothioate
  modified_base 3: mod_base = OTHER; note = 2'-O-methyladenosine-3'-phosphate
  modified_base 4: mod_base = OTHER; note = 2'-O-methyluridine-3'-phosphate
  modified_base 5: mod_base = OTHER; note = 2'-O-methyluridine-3'-phosphate
  modified_base 6: mod_base = OTHER; note = 2'-deoxy-2'-fluorouridine-3'-phosphate
  modified_base 7: mod_base = OTHER; note = 2'-O-methylguanosine-3'-phosphate
  modified_base 8: mod_base = OTHER; note = 2'-deoxy-2'-fluoroguanosine-3'-phosphate
  modified_base 9: mod_base = OTHER; note = 2'-deoxy-2'-fluorocytidine-3'-phosphate
  modified_base 10: mod_base = OTHER; note = 2'-O-methylcytidine-3'-phosphate
  modified_base 11: mod_base = OTHER; note = 2'-O-methyluridine-3'-phosphate
  modified_base 12: mod_base = OTHER; note = 2'-O-methyladenosine-3'-phosphate
  modified_base 13: mod_base = OTHER; note = 2'-O-methyladenosine-3'-phosphate
  modified_base 14: mod_base = OTHER; note = 2'-deoxy-2'-fluoroadenosine-3'-phosphate
  modified_base 15: mod_base = OTHER; note = 2'-O-methyladenosine-3'-phosphate
  modified_base 16: mod_base = OTHER; note = 2'-deoxy-2'-fluorocytidine-3'-phosphate
  modified_base 17: mod_base = OTHER; note = 2'-O-methyluridine-3'-phosphate
  modified_base 18: mod_base = OTHER; note = 2'-O-methylcytidine-3'-phosphate
  modified_base 19: mod_base = OTHER; note = 2'-O-methyladenosine-3'-phosphate
  modified_base 20: mod_base = OTHER; note = 2'-O-methyluridine-3'-phosphate
  modified_base 21: mod_base = OTHER; note = 2'-O-methyladenosine-3'-phosphorothioate
  modified_base 22: mod_base = OTHER; note = 2'-O-methylguanosine-3'-phosphorothioate
  modified_base 23: mod_base = OTHER; note = 2'-O-methyluridine
agatttggcctaaaactcatagt

SEQ ID NO: 545 - RNA, 23 nt, synthetic construct
  source 1..23: mol_type = other RNA
  modified_base 1: mod_base = OTHER; note = 2'-O-methyladenosine-3'-phosphorothioate
  modified_base 2: mod_base = OTHER; note = 2'-deoxy-2'-fluorouridine-3'-phosphorothioate
  modified_base 3: mod_base = OTHER; note = 2'-O-methyluridine-3'-phosphate
  modified_base 4: mod_base = OTHER; note = 2'-O-methyluridine-3'-phosphate
  modified_base 5: mod_base = OTHER; note = 2'-O-methylguanosine-3'-phosphate
  modified_base 6: mod_base = OTHER; note = 2'-deoxy-2'-fluoroadenosine-3'-phosphate
  modified_base 7: mod_base = OTHER; note = 2'-O-methyluridine-3'-phosphate
  modified_base 8: mod_base = OTHER; note = 2'-deoxy-2'-fluorocytidine-3'-phosphate
  modified_base 9: mod_base = OTHER; note = 2'-deoxy-2'-fluorouridine-3'-phosphate
  modified_base 10: mod_base = OTHER; note = 2'-O-methyluridine-3'-phosphate
  modified_base 11: mod_base = OTHER; note = 2'-O-methyluridine-3'-phosphate
  modified_base 12: mod_base = OTHER; note = 2'-O-methyluridine-3'-phosphate
  modified_base 13: mod_base = OTHER; note = 2'-O-methylcytidine-3'-phosphate
  modified_base 14: mod_base = OTHER; note = 2'-deoxy-2'-fluorouridine-3'-phosphate
  modified_base 15: mod_base = OTHER; note = 2'-O-methylcytidine-3'-phosphate
  modified_base 16: mod_base = OTHER; note = 2'-deoxy-2'-fluoroadenosine-3'-phosphate
  modified_base 17: mod_base = OTHER; note = 2'-O-methylguanosine-3'-phosphate
  modified_base 18: mod_base = OTHER; note = 2'-O-methyladenosine-3'-phosphate
  modified_base 19: mod_base = OTHER; note = 2'-O-methyluridine-3'-phosphate
  modified_base 20: mod_base = OTHER; note = 2'-O-methyluridine-3'-phosphate
  modified_base 21: mod_base = OTHER; note = 2'-O-methyluridine-3'-phosphorothioate
  modified_base 22: mod_base = OTHER; note = 2'-O-methylguanosine-3'-phosphorothioate
  modified_base 23: mod_base = OTHER; note = 2'-O-methylguanosine
atttgatcttttctcagatttgg

SEQ ID NO: 546 - RNA, 23 nt, synthetic construct
  source 1..23: mol_type = other RNA
  modified_base 1: mod_base = OTHER; note = 2'-O-methyladenosine-3'-phosphorothioate
  modified_base 2: mod_base = OTHER; note = 2'-deoxy-2'-fluoroguanosine-3'-phosphorothioate
  modified_base 3: mod_base = OTHER; note = 2'-O-methyluridine-3'-phosphate
  modified_base 4: mod_base = OTHER; note = 2'-O-methyluridine-3'-phosphate
  modified_base 5: mod_base = OTHER; note = 2'-O-methylcytidine-3'-phosphate
  modified_base 6: mod_base = OTHER; note = 2'-deoxy-2'-fluorouridine-3'-phosphate
  modified_base 7: mod_base = OTHER; note = 2'-O-methyladenosine-3'-phosphate
  modified_base 8: mod_base = OTHER; note = 2'-deoxy-2'-fluoroadenosine-3'-phosphate
  modified_base 9: mod_base = OTHER; note = 2'-deoxy-2'-fluorocytidine-3'-phosphate
  modified_base 10: mod_base = OTHER; note = 2'-O-methylcytidine-3'-phosphate
  modified_base 11: mod_base = OTHER; note = 2'-O-methyluridine-3'-phosphate
  modified_base 12: mod_base = OTHER; note = 2'-O-methylguanosine-3'-phosphate
  modified_base 13: mod_base = OTHER; note = 2'-O-methyladenosine-3'-phosphate
  modified_base 14: mod_base = OTHER; note = 2'-deoxy-2'-fluorouridine-3'-phosphate
  modified_base 15: mod_base = OTHER; note = 2'-O-methyladenosine-3'-phosphate
  modified_base 16: mod_base = OTHER; note = 2'-deoxy-2'-fluorouridine-3'-phosphate
  modified_base 17: mod_base = OTHER; note = 2'-O-methylguanosine-3'-phosphate
  modified_base 18: mod_base = OTHER; note = 2'-O-methylcytidine-3'-phosphate
  modified_base 19: mod_base = OTHER; note = 2'-O-methyluridine-3'-phosphate
  modified_base 20: mod_base = OTHER; note = 2'-O-methyluridine-3'-phosphate
  modified_base 21: mod_base = OTHER; note = 2'-O-methyladenosine-3'-phosphorothioate
  modified_base 22: mod_base = OTHER; note = 2'-O-methylcytidine-3'-phosphorothioate
  modified_base 23: mod_base = OTHER; note = 2'-O-methyluridine
agttctaacctgatatgcttact

SEQ ID NO: 547 - RNA, 23 nt, synthetic construct
  source 1..23: mol_type = other RNA
  modified_base 1: mod_base = OTHER; note = 2'-O-methyladenosine-3'-phosphorothioate
  modified_base 2: mod_base = OTHER; note = 2'-deoxy-2'-fluoroguanosine-3'-phosphorothioate
  modified_base 3: mod_base = OTHER; note = 2'-O-methyladenosine-3'-phosphate
  modified_base 4: mod_base = OTHER; note = 2'-O-methyladenosine-3'-phosphate
  modified_base 5: mod_base = OTHER; note = 2'-O-methylcytidine-3'-phosphate
  modified_base 6: mod_base = OTHER; note = 2'-deoxy-2'-fluoroadenosine-3'-phosphate
  modified_base 7: mod_base = OTHER; note = 2'-O-methyluridine-3'-phosphate
  modified_base 8: mod_base = OTHER; note = 2'-deoxy-2'-fluoroguanosine-3'-phosphate
  modified_base 9: mod_base = OTHER; note = 2'-deoxy-2'-fluorouridine-3'-phosphate
  modified_base 10: mod_base = OTHER; note = 2'-O-methylguanosine-3'-phosphate
  modified_base 11: mod_base = OTHER; note = 2'-O-methyladenosine-3'-phosphate
  modified_base 12: mod_base = OTHER; note = 2'-O-methyluridine-3'-phosphate
  modified_base 13: mod_base = OTHER; note = 2'-O-methylguanosine-3'-phosphate
  modified_base 14: mod_base = OTHER; note = 2'-deoxy-2'-fluoroadenosine-3'-phosphate
  modified_base 15: mod_base = OTHER; note = 2'-O-methylguanosine-3'-phosphate
  modified_base 16: mod_base = OTHER; note = 2'-deoxy-2'-fluoroadenosine-3'-phosphate
  modified_base 17: mod_base = OTHER; note = 2'-O-methylguanosine-3'-phosphate
  modified_base 18: mod_base = OTHER; note = 2'-O-methyluridine-3'-phosphate
  modified_base 19: mod_base = OTHER; note = 2'-O-methyluridine-3'-phosphate
  modified_base 20: mod_base = OTHER; note = 2'-O-methylcytidine-3'-phosphate
  modified_base 21: mod_base = OTHER; note = 2'-O-methyluridine-3'-phosphorothioate
  modified_base 22: mod_base = OTHER; note = 2'-O-methyladenosine-3'-phosphorothioate
  modified_base 23: mod_base = OTHER; note = 2'-O-methyladenosine
agaacatgtgatgagagttctaa

SEQ ID NO: 548 - RNA, 23 nt, synthetic construct
  source 1..23: mol_type = other RNA
  modified_base 1: mod_base = OTHER; note = 2'-O-methyladenosine-3'-phosphorothioate
  modified_base 2: mod_base = OTHER; note = 2'-deoxy-2'-fluorouridine-3'-phosphorothioate
  modified_base 3: mod_base = OTHER; note = 2'-O-methyluridine-3'-phosphate
  modified_base 4: mod_base = OTHER; note = 2'-O-methyladenosine-3'-phosphate
  modified_base 5: mod_base = OTHER; note = 2'-O-methyluridine-3'-phosphate
  modified_base 6: mod_base = OTHER; note = 2'-deoxy-2'-fluorouridine-3'-phosphate
  modified_base 7: mod_base = OTHER; note = 2'-O-methyluridine-3'-phosphate
  modified_base 8: mod_base = OTHER; note = 2'-deoxy-2'-fluoroadenosine-3'-phosphate
  modified_base 9: mod_base = OTHER; note = 2'-deoxy-2'-fluorocytidine-3'-phosphate
  modified_base 10: mod_base = OTHER; note = 2'-O-methyluridine-3'-phosphate
  modified_base 11: mod_base = OTHER; note = 2'-O-methylcytidine-3'-phosphate
  modified_base 12: mod_base = OTHER; note = 2'-O-methyluridine-3'-phosphate
  modified_base 13: mod_base = OTHER; note = 2'-O-methyluridine-3'-phosphate
  modified_base 14: mod_base = OTHER; note = 2'-deoxy-2'-fluorouridine-3'-phosphate
  modified_base 15: mod_base = OTHER; note = 2'-O-methyluridine-3'-phosphate
  modified_base 16: mod_base = OTHER; note = 2'-deoxy-2'-fluoroguanosine-3'-phosphate
  modified_base 17: mod_base = OTHER; note = 2'-O-methylcytidine-3'-phosphate
  modified_base 18: mod_base = OTHER; note = 2'-O-methyluridine-3'-phosphate
  modified_base 19: mod_base = OTHER; note = 2'-O-methylcytidine-3'-phosphate
  modified_base 20: mod_base = OTHER; note = 2'-O-methylcytidine-3'-phosphate
  modified_base 21: mod_base = OTHER; note = 2'-O-methyladenosine-3'-phosphorothioate
  modified_base 22: mod_base = OTHER; note = 2'-O-methylcytidine-3'-phosphorothioate
  modified_base 23: mod_base = OTHER; note = 2'-O-methyladenosine
attatttactcttttgctccaca

SEQ ID NO: 549 - RNA, 23 nt, synthetic construct
  source 1..23: mol_type = other RNA
aagtcaacaacatcctgggattg

SEQ ID NO: 550 - RNA, 23 nt, synthetic construct
  source 1..23: mol_type = other RNA
ttcttttatttctgaaatcaggt

SEQ ID NO: 551 - RNA, 23 nt, synthetic construct
  source 1..23: mol_type = other RNA
tggatgactatgtgaatacccag

SEQ ID NO: 552 - RNA, 23 nt, synthetic construct
  source 1..23: mol_type = other RNA
cttcactgttcagtgtcactaag

SEQ ID NO: 553 - RNA, 23 nt, synthetic construct
  source 1..23: mol_type = other RNA
ggagcaggaagtatagaagaatg

SEQ ID NO: 554 - RNA, 23 nt, synthetic construct
  source 1..23: mol_type = other RNA
agaatgtgcagcaaaatgtgagg

SEQ ID NO: 555 - RNA, 23 nt, synthetic construct
  source 1..23: mol_type = other RNA
gaggaggacgaagaattcacctg

SEQ ID NO: 556 - RNA, 23 nt, synthetic construct
  source 1..23: mol_type = other RNA
ggcattccaatatcacagtaaag

SEQ ID NO: 557 - RNA, 23 nt, synthetic construct
  source 1..23: mol_type = other RNA
aagagcaacaatgtgtgataatg

SEQ ID NO: 558 - RNA, 23 nt, synthetic construct
  source 1..23: mol_type = other RNA
atggctgaaaacaggaagtcctc

SEQ ID NO: 559 - RNA, 23 nt, synthetic construct
  source 1..23: mol_type = other RNA
agtcctccataatcattaggatg

SEQ ID NO: 560 - RNA, 23 nt, synthetic construct
  source 1..23: mol_type = other RNA
atgagagatgtagttttatttga

SEQ ID NO: 561 - RNA, 23 nt, synthetic construct
  source 1..23: mol_type = other RNA
gtgtatctctcagagtgcaagac

SEQ ID NO: 562 - RNA, 23 nt, synthetic construct
  source 1..23: mol_type = other RNA
agactgggaatggaaagaactac

SEQ ID NO: 563 - RNA, 23 nt, synthetic construct
  source 1..23: mol_type = other RNA
gagggacgatgtccaaaacaaaa

SEQ ID NO: 564 - RNA, 23 nt, synthetic construct
  source 1..23: mol_type = other RNA
cagacctagattctcacctgcta

SEQ ID NO: 565 - RNA, 23 nt, synthetic construct
  source 1..23: mol_type = other RNA
actgcaggaatccagacaacgat

SEQ ID NO: 566 - RNA, 23 nt, synthetic construct
  source 1..23: mol_type = other RNA
gtgctatactactgatccagaaa

SEQ ID NO: 567 - RNA, 23 nt, synthetic construct
  source 1..23: mol_type = other RNA
agatatgactactgcgacattct

SEQ ID NO: 568 - RNA, 23 nt, synthetic construct
  source 1..23: mol_type = other RNA
cattcttgagtgtgaagaggaat

SEQ ID NO: 569 - RNA, 23 nt, synthetic construct
  source 1..23: mol_type = other RNA
agaggaatgtatgcattgcagtg

SEQ ID NO: 570 - RNA, 23 nt, synthetic construct
  source 1..23: mol_type = other RNA
tgcagtggagaaaactatgacgg

SEQ ID NO: 571 - RNA, 23 nt, synthetic construct
  source 1..23: mol_type = other RNA
acggcaaaatttccaagaccatg

SEQ ID NO: 572 - RNA, 23 nt, synthetic construct
  source 1..23: mol_type = other RNA
acacgctcatggatacattcctt

SEQ ID NO: 573 - RNA, 23 nt, synthetic construct
  source 1..23: mol_type = other RNA
cattccttccaaatttccaaaca

SEQ ID NO: 574 - RNA, 23 nt, synthetic construct
  source 1..23: mol_type = other RNA
aagaacctgaagaagaattactg

SEQ ID NO: 575 - RNA, 23 nt, synthetic construct
  source 1..23: mol_type = other RNA
gccttggtgtttcaccaccgacc

SEQ ID NO: 576 - RNA, 23 nt, synthetic construct
  source 1..23: mol_type = other RNA
cgctgggaactttgtgacatccc

SEQ ID NO: 577 - RNA, 23 nt, synthetic construct
  source 1..23: mol_type = other RNA
aacacctccaccatcttctggtc

SEQ ID NO: 578 - RNA, 23 nt, synthetic construct
  source 1..23: mol_type = other RNA
gtcccacctaccagtgtctgaag

SEQ ID NO: 579 - RNA, 23 nt, synthetic construct
  source 1..23: mol_type = other RNA
gtctgaagggaacaggtgaaaac

SEQ ID NO: 580 - RNA, 23 nt, synthetic construct
  source 1..23: mol_type = other RNA
tcgcgggaatgtggctgttaccg

SEQ ID NO: 581 - RNA, 23 nt, synthetic construct
  source 1..23: mol_type = other RNA
taacaggacaccagaaaacttcc

SEQ ID NO: 582 - RNA, 23 nt, synthetic construct
  source 1..23: mol_type = other RNA
aaatttggatgaaaactactgcc

SEQ ID NO: 583 - RNA, 23 nt, synthetic construct
  source 1..23: mol_type = other RNA
actgccgcaatcctgacggaaaa

SEQ ID NO: 584 - RNA, 23 nt, synthetic construct
  source 1..23: mol_type = other RNA
tggtgccatacaaccaacagcca

SEQ ID NO: 585 - RNA, 23 nt, synthetic construct
  source 1..23: mol_type = other RNA
gagtactgtaagataccgtcctg

SEQ ID NO: 586 - RNA, 23 nt, synthetic construct
  source 1..23: mol_type = other RNA
ccacaggaaagaagtgtcagtct

SEQ ID NO: 587 - RNA, 23 nt, synthetic construct
  source 1..23: mol_type = other RNA
gtcagtcttggtcatctatgaca

SEQ ID NO: 588 - RNA, 23 nt, synthetic construct
  source 1..23: mol_type = other RNA
aatgctggcctgacaatgaacta

SEQ ID NO: 589 - RNA, 23 nt, synthetic construct
  source 1..23: mol_type = other RNA
caggaatccagatgccgataaag

SEQ ID NO: 590 - RNA, 23 nt, synthetic construct
  source 1..23: mol_type = other RNA
ccctggtgttttaccacagaccc

SEQ ID NO: 591 - RNA, 23 nt, synthetic construct
  source 1..23: mol_type = other RNA
gtgggagtactgcaacctgaaaa

SEQ ID NO: 592 - RNA, 23 nt, synthetic construct
  source 1..23: mol_type = other RNA
aggaacagaagcgagtgttgtag

SEQ ID NO: 593 - RNA, 23 nt, synthetic construct
  source 1..23: mol_type = other RNA
ctccgcctgttgtcctgcttcca

SEQ ID NO: 594 - RNA, 23 nt, synthetic construct
  source 1..23: mol_type = other RNA
cttccagatgtagagactccttc

SEQ ID NO: 595 - RNA, 23 nt, synthetic construct
  source 1..23: mol_type = other RNA
ttccgaagaagactgtatgtttg

SEQ ID NO: 596 - RNA, 23 nt, synthetic construct
  source 1..23: mol_type = other RNA
catagacacagcattttcactcc

SEQ ID NO: 597 - RNA, 23 nt, synthetic construct
  source 1..23: mol_type = other RNA
ttcactccagagacaaatccacg

SEQ ID NO: 598 - RNA, 23 nt, synthetic construct
  source 1..23: mol_type = other RNA
ctgccgtaaccctgatggtgatg

SEQ ID NO: 599 - RNA, 23 nt, synthetic construct
  source 1..23: mol_type = other RNA
tggtgctacacgacaaatccaag

SEQ ID NO: 600 - RNA, 23 nt, synthetic construct
  source 1..23: mol_type = other RNA
aatccaagaaaactttacgacta

SEQ ID NO: 601 - RNA, 23 nt, synthetic construct
  source 1..23: mol_type = other RNA
acgactactgtgatgtccctcag

SEQ ID NO: 602 - RNA, 23 nt, synthetic construct
  source 1..23: mol_type = other RNA
tggcaagtcagtcttagaacaag

SEQ ID NO: 603 - RNA, 23 nt, synthetic construct
  source 1..23: mol_type = other RNA
agaacaaggtttggaatgcactt

SEQ ID NO: 604 - RNA, 23 nt, synthetic construct
  source 1..23: mol_type = other RNA
gctgcccactgcttggagaagtc

SEQ ID NO: 605 - RNA, 23 nt, synthetic construct
  source 1..23: mol_type = other RNA
acaccaagaagtgaatctcgaac

SEQ ID NO: 606 - RNA, 23 nt, synthetic construct
  source 1..23: mol_type = other RNA
aaccgcatgttcaggaaatagaa

SEQ ID NO: 607 - RNA, 23 nt, synthetic construct
  source 1..23: mol_type = other RNA
acgaaaagatattgccttgctaa

SEQ ID NO: 608 - RNA, 23 nt, synthetic construct
  source 1..23: mol_type = other RNA
cttgctaaagctaagcagtcctg

SEQ ID NO: 609 - RNA, 23 nt, synthetic construct
  source 1..23: mol_type = other RNA
cgtcatcactgacaaagtaatcc

SEQ ID NO: 610 - RNA, 23 nt, synthetic construct
  source 1..23: mol_type = other RNA
accgaatgtttcatcactggctg

SEQ ID NO: 611 - RNA, 23 nt, synthetic construct
  source 1..23: mol_type = other RNA
gggagaaacccaaggtacttttg

SEQ ID NO: 612 - RNA, 23 nt, synthetic construct
  source 1..23: mol_type = other RNA
tccctgtgattgagaataaagtg

SEQ ID NO: 613 - RNA, 23 nt, synthetic construct
  source 1..23: mol_type = other RNA
caatcgctatgagtttctgaatg

SEQ ID NO: 614 - RNA, 23 nt, synthetic construct
  source 1..23: mol_type = other RNA
tctgaatggaagagtccaatcca

SEQ ID NO: 615 - RNA, 23 nt, synthetic construct
  source 1..23: mol_type = other RNA
gaggtcctctggtttgcttcgag

SEQ ID NO: 616 - RNA, 23 nt, synthetic construct
  source 1..23: mol_type = other RNA
gtgtctatgttcgtgtttcaagg

SEQ ID NO: 617 - RNA, 23 nt, synthetic construct
  source 1..23: mol_type = other RNA
gggagtgatgagaaataattaat

SEQ ID NO: 618 - RNA, 23 nt, synthetic construct
  source 1..23: mol_type = other RNA
gtgacgcactgactcacctagag

SEQ ID NO: 619 - RNA, 23 nt, synthetic construct
  source 1..23: mol_type = other RNA
tttagcatgctggaaataactgg

SEQ ID NO: 620 - RNA, 23 nt, synthetic construct
  source 1..23: mol_type = other RNA
gtaatcaaacgaagacactgtcc

SEQ ID NO: 621 - RNA, 23 nt, synthetic construct
  source 1..23: mol_type = other RNA
ctaccagctacgccaaacctcgg

SEQ ID NO: 622 - RNA, 23 nt, synthetic construct
  source 1..23: mol_type = other RNA
acctcggcattttttgtgttatt

SEQ ID NO: 623 - RNA, 23 nt, synthetic construct
  source 1..23: mol_type = other RNA
ctgactgctggattctgtagtaa

SEQ ID NO: 624 - RNA, 23 nt, synthetic construct
  source 1..23: mol_type = other RNA
tgtagtaaggtgacatagctatg

SEQ ID NO: 625 - RNA, 23 nt, synthetic construct
  source 1..23: mol_type = other RNA
actctgtacttaactttgatttg

SEQ ID NO: 626 - RNA, 23 nt, synthetic construct
  source 1..23: mol_type = other RNA
aaattttggttttggtcttcaac

SEQ ID NO: 627 - RNA, 23 nt, synthetic construct
  source 1..23: mol_type = other RNA
tcttcaacattttcatgctcttt

SEQ ID NO: 628 - RNA, 23 nt, synthetic construct
  source 1..23: mol_type = other RNA
cccaccaatttttaaatgggcag

SEQ ID NO: 629 - RNA, 23 nt, synthetic construct
  source 1..23: mol_type = other RNA
ttagctgcttttgataaggaaca

SEQ ID NO: 630 - RNA, 23 nt, synthetic construct
  source 1..23: mol_type = other RNA
agctgcacaaaggactgagcagg

SEQ ID NO: 631 - RNA, 23 nt, synthetic construct
  source 1..23: mol_type = other RNA
aagaagttgtccacgcatttacc

SEQ ID NO: 632 - RNA, 23 nt, synthetic construct
  source 1..23: mol_type = other RNA
atttacctcatcagctaacgagg

SEQ ID NO: 633 - RNA, 23 nt, synthetic construct
  source 1..23: mol_type = other RNA
cttgacatgcatttttactgtct

SEQ ID NO: 634 - RNA, 23 nt, synthetic construct
  source 1..23: mol_type = other RNA
tactgtctttattcctgacactg

SEQ ID NO: 635 - RNA, 23 nt, synthetic construct
  source 1..23: mol_type = other RNA
cactgagatgaatgttttcaaag

SEQ ID NO: 636 - RNA, 23 nt, synthetic construct
  source 1..23: mol_type = other RNA
tttcaaagctgcaacatgtatgg

SEQ ID NO: 637 - RNA, 23 nt, synthetic construct
  source 1..23: mol_type = other RNA
agtcatgcaaaccgattctgtta

SEQ ID NO: 638 - RNA, 23 nt, synthetic construct
  source 1..23: mol_type = other RNA
gttattgggaatgaaatctgtca

SEQ ID NO: 639 - RNA, 23 nt, synthetic construct
  source 1..23: mol_type = other RNA
gtcaccgactgcttgacttgagc

SEQ ID NO: 640 - RNA, 23 nt, synthetic construct
  source 1..23: mol_type = other RNA
agctgtatatgatggagtgaacc

SEQ ID NO: 641 - RNA, 23 nt, synthetic construct
  source 1..23: mol_type = other RNA
tggatgtgtaacacaagaccaac

SEQ ID NO: 642 - RNA, 23 nt, synthetic construct
  source 1..23: mol_type = other RNA
caactgagagtctgaatgttatt

SEQ ID NO: 643 - RNA, 23 nt, synthetic construct
  source 1..23: mol_type = other RNA
ggcacacgtgagtctaggattgg

SEQ ID NO: 644 - RNA, 23 nt, synthetic construct
  source 1..23: mol_type = other RNA
ccaagagcatgtaaatgaacaac

SEQ ID NO: 645 - RNA, 23 nt, synthetic construct
  source 1..23: mol_type = other RNA
tgaacaacaagcaaatattgaag

SEQ ID NO: 646 - RNA, 23 nt, synthetic construct
  source 1..23: mol_type = other RNA
gaccacttatttcccattgctaa

SEQ ID NO: 647 - RNA, 23 nt, synthetic construct
  source 1..23: mol_type = other RNA
ctgcccggttttgaaacagtctg

SEQ ID NO: 648 - RNA, 23 nt, synthetic construct
  source 1..23: mol_type = other RNA
ggtcacaggagaatgacctgtgg

SEQ ID NO: 649 - RNA, 23 nt, synthetic construct
  source 1..23: mol_type = other RNA
tgggagagatacatgtttagaag

SEQ ID NO: 650 - RNA, 23 nt, synthetic construct
  source 1..23: mol_type = other RNA
aggaagagaaaggacaaaggcac

SEQ ID NO: 651 - RNA, 23 nt, synthetic construct
  source 1..23: mol_type = other RNA
cacacgttttaccatttaaaata

SEQ ID NO: 652 - RNA, 23 nt, synthetic construct
  source 1..23: mol_type = other RNA
aacaatgcaacagtcatcttaca

SEQ ID NO: 653 - RNA, 23 nt, synthetic construct
  source 1..23: mol_type = other RNA
tcttacagcagagaaatgcagag

SEQ ID NO: 654 - RNA, 23 nt, synthetic construct
  source 1..23: mol_type = other RNA
atgcagagaaaagcaaaactgca

SEQ ID NO: 655 - RNA, 23 nt, synthetic construct
  source 1..23: mol_type = other RNA
tgactgtgaataaagggtgaatg

SEQ ID NO: 656 - RNA, 23 nt, synthetic construct
  source 1..23: mol_type = other RNA
tgtagtctcaaatcctcaaagag

SEQ ID NO: 657 - RNA, 23 nt, synthetic construct
  source 1..23: mol_type = other RNA
aaagagctgtgtttatttcattg

SEQ ID NO: 658 - RNA, 23 nt, synthetic construct
  source 1..23: mol_type = other RNA
taacttaatttgactatctggtt

SEQ ID NO: 659 - RNA, 23 nt, synthetic construct
  source 1..23: mol_type = other RNA
ctctcatgtaagtcaacaacatc

SEQ ID NO: 660 - RNA, 23 nt, synthetic construct
  source 1..23: mol_type = other RNA
ggtaagacattccctttcatctt

SEQ ID NO: 661 - RNA, 23 nt, synthetic construct
  source 1..23: mol_type = other RNA
ttcatctttgtgttcatctactg

SEQ ID NO: 662 - RNA, 23 nt, synthetic construct
  source 1..23: mol_type = other RNA
ccatgcttctcaagtcccttata

SEQ ID NO: 663 - RNA, 23 nt, synthetic construct
  source 1..23: mol_type = other RNA
tatttgcatataacctacatacc

SEQ ID NO: 664 - RNA, 23 nt, synthetic construct
  source 1..23: mol_type = other RNA
acataccttctcttgtataatcc

SEQ ID NO: 665 - RNA, 23 nt, synthetic construct
  source 1..23: mol_type = other RNA
gtaaatgctatttaatcgttgtt

SEQ ID NO: 666 - RNA, 23 nt, synthetic construct
  source 1..23: mol_type = other RNA
tcgttgttatactgtattgtttt

SEQ ID NO: 667 - RNA, 23 nt, synthetic construct
  source 1..23: mol_type = other RNA
gtcatattgttattttctgtcat

SEQ ID NO: 668 - RNA, 23 nt, synthetic construct
  source 1..23: mol_type = other RNA
ctgtcatctttttcaagtctttt

SEQ ID NO: 669 - RNA, 23 nt, synthetic construct
  source 1..23: mol_type = other RNA
tccatccacagttggttgaattt

SEQ ID NO: 670 - RNA, 23 nt, synthetic construct
  source 1..23: mol_type = other RNA
caactgtatttaggataatttca

SEQ ID NO: 671 - RNA, 23 nt, synthetic construct
  source 1..23: mol_type = other RNA
ttcatcacttttaattcaaacca

SEQ ID NO: 672 - RNA, 23 nt, synthetic construct
  source 1..23: mol_type = other RNA
tcaaaccacaatatgtgaataag

SEQ ID NO: 673 - RNA, 23 nt, synthetic construct
  source 1..23: mol_type = other RNA
taagcagatagaaagaatctttt

SEQ ID NO: 674 - RNA, 23 nt, synthetic construct
  source 1..23: mol_type = other RNA
atgtcgatgttcaactatttttg

SEQ ID NO: 675 - RNA, 23 nt, synthetic construct
  source 1..23: mol_type = other RNA
agaacatggttgctttctatttt

SEQ ID NO: 676 - RNA, 23 nt, synthetic construct
  source 1..23: mol_type = other RNA
tttcttggatatggaggtttctt

SEQ ID NO: 677 - RNA, 23 nt, synthetic construct
  source 1..23: mol_type = other RNA
gtttcttgaagacctagaacata

SEQ ID NO: 678 - RNA, 23 nt, synthetic construct
  source 1..23: mol_type = other RNA
gaacatagaagaatgcctagttt

SEQ ID NO: 679 - RNA, 23 nt, synthetic construct
  source 1..23: mol_type = other RNA
actatgagttttaggccaaatct

SEQ ID NO: 680 - RNA, 23 nt, synthetic construct
  source 1..23: mol_type = other RNA
ccaaatctgagaaaagatcaaag

SEQ ID NO: 681 - RNA, 23 nt, synthetic construct
  source 1..23: mol_type = other RNA
agtaagcatatcaggttagaact

SEQ ID NO: 682 - RNA, 23 nt, synthetic construct
  source 1..23: mol_type = other RNA
ttagaactctcatcacatgttcg

SEQ ID NO: 683 - RNA, 23 nt, synthetic construct
  source 1..23: mol_type = other RNA
tgtggagcaaaagagtaaataag

SEQ ID NO: 684 - RNA, 12 nt, synthetic construct
  source 1..12: mol_type = other RNA
  modified_base 12: mod_base = OTHER; note = adenosine-3'-phosphate
aaaaaaaaaaaa

SEQ ID NO: 685 - RNA, 2703 nt, Macaca fascicularis
  source 1..2703: mol_type = mRNA
gggattgggacacactttctgggcactgctggccagtcccaaaatggaacataaggaagtggttcttctacttcttttatttctgaaatcaggtcaaggagagcctctggatgactatgtgaataccaagggggcttcactgttcagcatcactaagaagcagctgggggcaggaagcatagaagaatgcgcagcaaaatgtgaggaggaggaagaattcacctgcaggtcattccaatatcacagtaaagagcaacaatgtgtgataatggctgaaaacaggaagtcctccatagtctttaggatgagagatgtcgttttatttgaaaagaaagtgtatctttcagagtgcaagactgggaatggaaagagttacagagggacaatgtccaaaacaagaaccggcatcacctgtcaaaaatggagttccacttctccccacagacctaaattctcacctgctacacacccttcagagggactggaagagaactactgcaggaacccagacaacgatgggctggggccctggtgctacactactgatccagaagagagatttgactactgcgacattcccgagtgtgaagatgaatgtatgcattgcagtggagaaaattatgatggcaaaatttccaagaccatgtctggactggaatgccaggcctgggactctcagagcccacacgctcacggatacattccttccaaatttccaaacaagaacctgaagaagaattactgtcgtaaccccgatggggagccacggccttggtgtttcaccaccgaccccaacaagcgctgggaactttgtgacatcccccgctgcacaacacctccaccatcttctggtcccacctaccagtgtctgaagggaacaggtgaaaactatcgtggggatgtggctgttaccgtgtctgggcacacctgtcagcgctggagtgcacagacccctcacacacataacaggacaccagaaaactttccctgcaaaaatttggatgaaaactactgccgcaatcctgatggagaaaaggccccatggtgctatacaaccaacagccaagtgcggtgggagtactgtaagataccgtcctgtgagtcctccccagtatccacggaaccattggatcccacagcaccacctgagcttactcctgtggtccaggagtgctaccatggtgatgggcagagctaccgaggcacatcctccaccaccaccacaggaaagaagtgtcagtcttggtcatctatgacaccacactggcatgagaagaccccagaaaacttcccaaatgctggcctgacaatgaactactgcaggaatccagatgccgataaaggtccctggtgttttaccacggaccccagcgtcaggtgggagtactgcaacctgaaaaaatgctcaggaacagaagggagtgttgcagcacctccgcctgttgcccaacttccagatgcagagactccttccgaggaagactgtatgtttgggaatgggaaaggataccgaggcaagaaggcaaccactgttactgggacaccatgccaggaatgggctgcccaggagccccacagccaccgcattttcactccagagacaaatccacgggcaggtctggaaaaaaactactgccgtaaccctgatggtgatataggtggtccctggtgctacacgacaaatccaagaaaacttttcgactactgtgatgtccctcagtgtgcggcctcttcatttgattgtgggaagcctcaagtggagccgaagaaatgtcctggaagggttgtaggggggtgtgtggcctacccacattcctggccctggcaaatcagtcttagaacaaggcttggaatgcacttctgtggaggcaccttgatatccccagagtgggtgctgactgctgcccactgcttggagaagtcctcaaggccttcattctacaaggtcatcctgggtgcacaccgagaagtgcatctcgaaccacatgttcaggaaatagaagtatctaagatgttctcggagcccgcaagagcagatattgccttgctaaagctaagcagtcctgccatcatcactgacaaagtaatcccagcttgtctgccatccccaaattatgtggtcgctgaccggaccgaatgtttcatcactggctggggagaaacccaaggtacctatggggctggccttctcaaggaagcccggctccccgtgattgagaataaagtgtgcaatcgctatgagtttctgaatggaagagtcaaaaccaccgagctctgtgctgggcatttggccggaggcactgacagttgccagggtgacagtggagggcctctggtttgcttcgagaaggacaaatacattttacaaggagttacttcttggggtcttggctgtgcgcgtcccaataagccaggtgtctatgttcgtgtttcaaggtttgtcacttggatcgagggagtgatgagaaataattaattggacgggattacagagtgaagcattgactcacctagaggctggaacatgggtagggatttagcatgctggaaataactgacagtaaacaaacgaggacattgtccccagctaccagggaagccaaacctcagcattttttgtattattttctgactgctggattctgtaataaggtgacatagctatgaccatttgttaaaaataaactctgtacttaaccttaa

SEQ ID NO: 686 - RNA, 2703 nt, Macaca fascicularis
  source 1..2703: mol_type = mRNA
ttaaggttaagtacagagtttatttttaacaaatggtcatagctatgtcaccttattacagaatccagcagtcagaaaataatacaaaaaatgctgaggtttggcttccctggtagctggggacaatgtcctcgtttgtttactgtcagttatttccagcatgctaaatccctacccatgttccagcctctaggtgagtcaatgcttcactctgtaatcccgtccaattaattatttctcatcactccctcgatccaagtgacaaaccttgaaacacgaacatagacacctggcttattgggacgcgcacagccaagaccccaagaagtaactccttgtaaaatgtatttgtccttctcgaagcaaaccagaggccctccactgtcaccctggcaactgtcagtgcctccggccaaatgcccagcacagagctcggtggttttgactcttccattcagaaactcatagcgattgcacactttattctcaatcacggggagccgggcttccttgagaaggccagccccataggtaccttgggtttctccccagccagtgatgaaacattcggtccggtcagcgaccacataatttggggatggcagacaagctgggattactttgtcagtgatgatggcaggactgcttagctttagcaaggcaatatctgctcttgcgggctccgagaacatcttagatacttctatttcctgaacatgtggttcgagatgcacttctcggtgtgcacccaggatgaccttgtagaatgaaggccttgaggacttctccaagcagtgggcagcagtcagcacccactctggggatatcaaggtgcctccacagaagtgcattccaagccttgttctaagactgatttgccagggccaggaatgtgggtaggccacacacccccctacaacccttccaggacatttcttcggctccacttgaggcttcccacaatcaaatgaagaggccgcacactgagggacatcacagtagtcgaaaagttttcttggatttgtcgtgtagcaccagggaccacctatatcaccatcagggttacggcagtagtttttttccagacctgcccgtggatttgtctctggagtgaaaatgcggtggctgtggggctcctgggcagcccattcctggcatggtgtcccagtaacagtggttgccttcttgcctcggtatcctttcccattcccaaacatacagtcttcctcggaaggagtctctgcatctggaagttgggcaacaggcggaggtgctgcaacactcccttctgttcctgagcattttttcaggttgcagtactcccacctgacgctggggtccgtggtaaaacaccagggacctttatcggcatctggattcctgcagtagttcattgtcaggccagcatttgggaagttttctggggtcttctcatgccagtgtggtgtcatagatgaccaagactgacacttctttcctgtggtggtggtggaggatgtgcctcggtagctctgcccatcaccatggtagcactcctggaccacaggagtaagctcaggtggtgctgtgggatccaatggttccgtggatactggggaggactcacaggacggtatcttacagtactcccaccgcacttggctgttggttgtatagcaccatggggccttttctccatcaggattgcggcagtagttttcatccaaatttttgcagggaaagttttctggtgtcctgttatgtgtgtgaggggtctgtgcactccagcgctgacaggtgtgcccagacacggtaacagccacatccccacgatagttttcacctgttcccttcagacactggtaggtgggaccagaagatggtggaggtgttgtgcagcgggggatgtcacaaagttcccagcgcttgttggggtcggtggtgaaacaccaaggccgtggctccccatcggggttacgacagtaattcttcttcaggttcttgtttggaaatttggaaggaatgtatccgtgagcgtgtgggctctgagagtcccaggcctggcattccagtccagacatggtcttggaaattttgccatcataattttctccactgcaatgcatacattcatcttcacactcgggaatgtcgcagtagtcaaatctctcttctggatcagtagtgtagcaccagggccccagcccatcgttgtctgggttcctgcagtagttctcttccagtccctctgaagggtgtgtagcaggtgagaatttaggtctgtggggagaagtggaactccatttttgacaggtgatgccggttcttgttttggacattgtccctctgtaactctttccattcccagtcttgcactctgaaagatacactttcttttcaaataaaacgacatctctcatcctaaagactatggaggacttcctgttttcagccattatcacacattgttgctctttactgtgatattggaatgacctgcaggtgaattcttcctcctcctcacattttgctgcgcattcttctatgcttcctgcccccagctgcttcttagtgatgctgaacagtgaagcccccttggtattcacatagtcatccagaggctctccttgacctgatttcagaaataaaagaagtagaagaaccacttccttatgttccattttgggactggccagcagtgcccagaaagtgtgtcccaatccc

SEQ ID NO: 687 - RNA, 2755 nt, Mus musculus
  source 1..2755: mol_type = mRNA
tttaagtcaacaccaggaactaggacacagttgtccaggtgctgttggccagtcccaacatggaccataaggaagtaatccttctgtttctcttgcttctgaaaccaggacaaggggactcgctggatggctacataagcacacaaggggcttcactgttcagtctcaccaagaagcagctcgcagcaggaggtgtctcggactgtttggccaaatgtgaaggggaaacagactttgtctgcaggtcattccagtaccacagcaaagagcagcaatgcgtgatcatggcggagaacagcaagacttcctccatcatccggatgagagacgtcatcttattcgaaaagagagtgtatctgtcagaatgtaagaccggcatcggcaacggctacagaggaaccatgtccaggacaaagagtggtgttgcctgtcaaaagtggggtgccacgttcccccacgtacccaactactctcccagtacacatcccaatgagggactagaagagaactactgtaggaacccagacaatgatgaacaagggccttggtgctacactacagatccggacaagagatatgactactgcaacattcctgaatgtgaagaggaatgcatgtactgcagtggagaaaagtatgagggcaaaatctccaagaccatgtctggacttgactgccaggcctgggattctcagagcccacatgctcatggatacatccctgccaaatttccaagcaagaacctgaagatgaattattgccgcaaccctgacggggagccaaggccctggtgcttcacaacagaccccaccaaacgctgggaatactgtgacatcccccgctgcacaacacccccgcccccacccagcccaacctaccaatgtctgaaaggaagaggtgaaaattaccgagggaccgtgtctgtcaccgtgtctgggaaaacctgtcagcgctggagtgagcaaacccctcataggcacaacaggacaccagaaaatttcccctgcaaaaatctggaagagaactactgccggaacccagatggagaaactgctccctggtgctataccactgacagccagctgaggtgggagtactgtgagattccatcctgcgagtcctcagcatcaccagaccagtcagattcctcagttccaccagaggagcaaacacctgtggtccaggaatgctaccagagcgatgggcagagctatcggggtacatcgtccactaccatcacagggaagaagtgccagtcctgggcagctatgtttccacacaggcattcgaagaccccagagaacttcccagatgctggcttggagatgaactactgcaggaacccggatggtgacaagggcccttggtgctacaccactgacccgagcgtcaggtgggaatactgcaacctgaagcggtgctcagagacaggagggagtgttgtggaattgcccacagtttcccaggaaccaagtgggccgagcgactctgagacagactgcatgtatgggaatggcaaagactatcggggcaaaacggccgtcactgcagctggcaccccctgccagggatgggctgcccaggagccccacaggcacagcatcttcaccccacagacaaacccacgggcaggtctggaaaagaactactgccgaaacccagatggggatgtgaatggtccttggtgctatacaacaaaccccagaaaactttatgactattgtgacatccccctgtgtgcatcagcatcatcctttgagtgcgggaaacctcaggtggaaccgaagaaatgccctgggagggtggtgggtggctgcgtggccaaccctcactcctggccctggcaaatcagccttagaacaagatttaccggacagcacttctgtggcggtactttaatagccccagagtgggttctgactgctgcccactgtttggagaaatcttcaagacctgaattctacaaggttatcctgggtgcgcacgaagaatatatccgtgggttggatgttcaggaaatatcagtagccaaactgatcttggagcccaacaaccgtgacattgccctgctgaaactaagccgcccagccaccatcacggataaagtcattccagcttgtctgccatctccaaattacatggttgctgaccggacaatatgttacatcaccggctggggagagactcaagggactttcggtgccggtcgtctcaaggaggctcagctgcctgtgattgagaacaaggtgtgcaaccgcgtcgagtatctgaacaacagagtcaaatccacggagctctgtgccgggcaactggctggtggcgtcgacagctgccagggcgacagtggaggacctctggtttgcttcgagaaggacaagtacattttacaaggagtcacttcttggggtcttggctgtgctcgccccaataagcctggtgtctacgttcgtgtctcacggtttgttgattggattgaaagggagatgaggaataactgactaggtggaaggccgagcaaaacctctgcttactaaagcttactgaatatggggagagggcttagggtgtttggaaaaactgacagtaatcaaactgggacactacactgaaccacagcttcctgtcgcccctcagcccctcccctttttttgtattattgtgggtaaaattttcctgtctgtggacttctggattttgtgacaatagaccatcactgctgtgacctttgttgaaaataaactcgatacttactttg

SEQ ID NO: 688 - RNA, 2755 nt, Mus musculus
  source 1..2755: mol_type = mRNA
caaagtaagtatcgagtttattttcaacaaaggtcacagcagtgatggtctattgtcacaaaatccagaagtccacagacaggaaaattttacccacaataatacaaaaaaaggggaggggctgaggggcgacaggaagctgtggttcagtgtagtgtcccagtttgattactgtcagtttttccaaacaccctaagccctctccccatattcagtaagctttagtaagcagaggttttgctcggccttccacctagtcagttattcctcatctccctttcaatccaatcaacaaaccgtgagacacgaacgtagacaccaggcttattggggcgagcacagccaagaccccaagaagtgactccttgtaaaatgtacttgtccttctcgaagcaaaccagaggtcctccactgtcgccctggcagctgtcgacgccaccagccagttgcccggcacagagctccgtggatttgactctgttgttcagatactcgacgcggttgcacaccttgttctcaatcacaggcagctgagcctccttgagacgaccggcaccgaaagtcccttgagtctctccccagccggtgatgtaacatattgtccggtcagcaaccatgtaatttggagatggcagacaagctggaatgactttatccgtgatggtggctgggcggcttagtttcagcagggcaatgtcacggttgttgggctccaagatcagtttggctactgatatttcctgaacatccaacccacggatatattcttcgtgcgcacccaggataaccttgtagaattcaggtcttgaagatttctccaaacagtgggcagcagtcagaacccactctggggctattaaagtaccgccacagaagtgctgtccggtaaatcttgttctaaggctgatttgccagggccaggagtgagggttggccacgcagccacccaccaccctcccagggcatttcttcggttccacctgaggtttcccgcactcaaaggatgatgctgatgcacacagggggatgtcacaatagtcataaagttttctggggtttgttgtatagcaccaaggaccattcacatccccatctgggtttcggcagtagttcttttccagacctgcccgtgggtttgtctgtggggtgaagatgctgtgcctgtggggctcctgggcagcccatccctggcagggggtgccagctgcagtgacggccgttttgccccgatagtctttgccattcccatacatgcagtctgtctcagagtcgctcggcccacttggttcctgggaaactgtgggcaattccacaacactccctcctgtctctgagcaccgcttcaggttgcagtattcccacctgacgctcgggtcagtggtgtagcaccaagggcccttgtcaccatccgggttcctgcagtagttcatctccaagccagcatctgggaagttctctggggtcttcgaatgcctgtgtggaaacatagctgcccaggactggcacttcttccctgtgatggtagtggacgatgtaccccgatagctctgcccatcgctctggtagcattcctggaccacaggtgtttgctcctctggtggaactgaggaatctgactggtctggtgatgctgaggactcgcaggatggaatctcacagtactcccacctcagctggctgtcagtggtatagcaccagggagcagtttctccatctgggttccggcagtagttctcttccagatttttgcaggggaaattttctggtgtcctgttgtgcctatgaggggtttgctcactccagcgctgacaggttttcccagacacggtgacagacacggtccctcggtaattttcacctcttcctttcagacattggtaggttgggctgggtgggggcgggggtgttgtgcagcgggggatgtcacagtattcccagcgtttggtggggtctgttgtgaagcaccagggccttggctccccgtcagggttgcggcaataattcatcttcaggttcttgcttggaaatttggcagggatgtatccatgagcatgtgggctctgagaatcccaggcctggcagtcaagtccagacatggtcttggagattttgccctcatacttttctccactgcagtacatgcattcctcttcacattcaggaatgttgcagtagtcatatctcttgtccggatctgtagtgtagcaccaaggcccttgttcatcattgtctgggttcctacagtagttctcttctagtccctcattgggatgtgtactgggagagtagttgggtacgtgggggaacgtggcaccccacttttgacaggcaacaccactctttgtcctggacatggttcctctgtagccgttgccgatgccggtcttacattctgacagatacactctcttttcgaataagatgacgtctctcatccggatgatggaggaagtcttgctgttctccgccatgatcacgcattgctgctctttgctgtggtactggaatgacctgcagacaaagtctgtttccccttcacatttggccaaacagtccgagacacctcctgctgcgagctgcttcttggtgagactgaacagtgaagccccttgtgtgcttatgtagccatccagcgagtccccttgtcctggtttcagaagcaagagaaacagaaggattacttccttatggtccatgttgggactggccaacagcacctggacaactgtgtcctagttcctggtgttgacttaaa

SEQ ID NO: 689 - RNA, 2752 nt, Rattus norvegicus
  source 1..2752: mol_type = mRNA
ggacacagttgtccaggtgctgttggccagtcccaacatggaccataaggaaataatccttctgtttctcttgtttctgaaaccaggacaaggggactcactggatggctatgtaagcacacagggggcttcactgcatagcctcaccaagaagcagctagcggcaggaagcatagcagactgtttggccaaatgtgaaggggaaacagacttcatctgcaggtcattccagtaccacagcaaagagcagcagtgcgtgatcatggccgagaacagcaagacttcctccatcatccggatgagagatgtcatcttattcgaaaagagagtgtatctgtcagagtgtaagactggcatcggcaagggctacagaggaaccatgtccaagacaaagactggtgttacctgtcaaaagtggagtgacacgtccccccacgtacccaaatactcccccagcacacaccccagcgagggactagaggagaactactgtaggaacccagacaatgatgaacaagggccctggtgctacacaacagacccggaccagagatatgagtactgcaacatccccgaatgcgaagaggaatgcatgtactgcagtggagaaaagtacgagggcaaaatctccaagaccatgtctggactcgactgccagtcctgggattctcagagcccacatgctcacggatacatccctgccaaatttccaagcaagaacttgaagatgaattactgtcgcaaccctgacggggagccgcggccctggtgcttcaccacagaccccaacaaacgctgggaatactgtgacatcccccgctgcacaacacccccacccccaccgggcccaacctaccaatgtctgaaggggagaggtgaaaattaccgagggaccgtgtctgtcactgcgtctgggaaaacctgtcagcgctggagtgagcaaacacctcataggcacaacaggacgccagaaaacttcccctgcaaaaatctggaagagaactactgccggaacccagatggagaaactgctccctggtgctataccactgacagccagctgaggtgggagtactgtgagattccgtcctgcgggtcctcggtatcaccagaccagtcagattcctcagttcttccggagcaaacacctgtggtccaggagtgctaccagggcaatggaaagagctatcggggcacatcgtccactaccaacacagggaagaagtgccagtcctgggtatctatgactccacatagtcactcgaagaccccagcgaacttcccagatgctggcttggagatgaactactgcaggaacccagataatgaccagaggggcccttggtgcttcaccactgacccgagcgtcaggtgggaatactgcaacctgaagcggtgctcggagacaggagggggtgttgcggaatcagccatagtcccccaagttcccagtgcgccaggcacctctgagacagactgcatgtatgggaatggcaaagaatatcggggcaaaacggccgtcactgcagctggaaccccctgccaggaatgggctgcccaggagccccacagtcacagaatcttcaccccacagacaaacccacgggcaggtctggaaaagaattactgccgaaacccggatggggatgtcaatgggccctggtgctatacaatgaaccccagaaaactttacgactattgtaacattcccctttgtgcatcattatcgtcctttgaatgtgggaagcctcaggtggagccgaagaaatgccctgggagggtggtgggtggctgtgtggccaaccctcactcctggccctggcaaatcagccttagaacaagattttctggacagcacttctgtggcggtactttaatatccccagagtgggtgctgactgccgctcactgcttggagaaatcttcgagacctgaattctacaaggttatcctgggagcacacgaagaacgaatccttgggtcagatgttcagcaaatagcagtaaccaaactggtcttggaacccaacgacgctgacattgccctgctgaagctaagccgcccagccaccatcacagataatgtcatcccagcttgtctgccatctccaaattatgtggttgccgaccggacactgtgttacatcaccggctggggagaaacgaaagggactccaggtgccggccgtctcaaggaggcccagctgcccgtgatcgagaacaaggtgtgcaaccgcgctgagtatctaaacaacagagtcaaatccaccgagctctgtgccgggcatctggctggtggcatcgacagttgccagggcgacagtggaggacctctggtttgcttcgagaaggacaagtatattttacaaggagtcacttcttggggtcttggctgtgctcgccccaataagcctggtgtctatgttcgtgtttcccggtacgttaattggattgaaagggagatgaggaatgactaattgggtgggaggcagaacaaaactactaaatatggggaggggattagggcgcttgaaaaaaaacctgacagcaatcaaaccaaagacactacactggaccactacttcctgtcacccctcagctcctccctctttttgtattattgtgggtaaaattttcctgtccctggacttctggattttgtgacaatagaccatcacttctgtgacctttgttgaaaataaactcgatacttactttaaaaaaaaaaaaaaaaaaaaaaaaaaaaaaaaaaa

SEQ ID NO: 690 - RNA, 2752 nt, Rattus norvegicus
  source 1..2752: mol_type = mRNA
tttttttttttttttttttttttttttttttttttaaagtaagtatcgagtttattttcaacaaaggtcacagaagtgatggtctattgtcacaaaatccagaagtccagggacaggaaaattttacccacaataatacaaaaagagggaggagctgaggggtgacaggaagtagtggtccagtgtagtgtctttggtttgattgctgtcaggttttttttcaagcgccctaatcccctccccatatttagtagttttgttctgcctcccacccaattagtcattcctcatctccctttcaatccaattaacgtaccgggaaacacgaacatagacaccaggcttattggggcgagcacagccaagaccccaagaagtgactccttgtaaaatatacttgtccttctcgaagcaaaccagaggtcctccactgtcgccctggcaactgtcgatgccaccagccagatgcccggcacagagctcggtggatttgactctgttgtttagatactcagcgcggttgcacaccttgttctcgatcacgggcagctgggcctccttgagacggccggcacctggagtccctttcgtttctccccagccggtgatgtaacacagtgtccggtcggcaaccacataatttggagatggcagacaagctgggatgacattatctgtgatggtggctgggcggcttagcttcagcagggcaatgtcagcgtcgttgggttccaagaccagtttggttactgctatttgctgaacatctgacccaaggattcgttcttcgtgtgctcccaggataaccttgtagaattcaggtctcgaagatttctccaagcagtgagcggcagtcagcacccactctggggatattaaagtaccgccacagaagtgctgtccagaaaatcttgttctaaggctgatttgccagggccaggagtgagggttggccacacagccacccaccaccctcccagggcatttcttcggctccacctgaggcttcccacattcaaaggacgataatgatgcacaaaggggaatgttacaatagtcgtaaagttttctggggttcattgtatagcaccagggcccattgacatccccatccgggtttcggcagtaattcttttccagacctgcccgtgggtttgtctgtggggtgaagattctgtgactgtggggctcctgggcagcccattcctggcagggggttccagctgcagtgacggccgttttgccccgatattctttgccattcccatacatgcagtctgtctcagaggtgcctggcgcactgggaacttgggggactatggctgattccgcaacaccccctcctgtctccgagcaccgcttcaggttgcagtattcccacctgacgctcgggtcagtggtgaagcaccaagggcccctctggtcattatctgggttcctgcagtagttcatctccaagccagcatctgggaagttcgctggggtcttcgagtgactatgtggagtcatagatacccaggactggcacttcttccctgtgttggtagtggacgatgtgccccgatagctctttccattgccctggtagcactcctggaccacaggtgtttgctccggaagaactgaggaatctgactggtctggtgataccgaggacccgcaggacggaatctcacagtactcccacctcagctggctgtcagtggtatagcaccagggagcagtttctccatctgggttccggcagtagttctcttccagatttttgcaggggaagttttctggcgtcctgttgtgcctatgaggtgtttgctcactccagcgctgacaggttttcccagacgcagtgacagacacggtccctcggtaattttcacctctccccttcagacattggtaggttgggcccggtgggggtgggggtgttgtgcagcgggggatgtcacagtattcccagcgtttgttggggtctgtggtgaagcaccagggccgcggctccccgtcagggttgcgacagtaattcatcttcaagttcttgcttggaaatttggcagggatgtatccgtgagcatgtgggctctgagaatcccaggactggcagtcgagtccagacatggtcttggagattttgccctcgtacttttctccactgcagtacatgcattcctcttcgcattcggggatgttgcagtactcatatctctggtccgggtctgttgtgtagcaccagggcccttgttcatcattgtctgggttcctacagtagttctcctctagtccctcgctggggtgtgtgctgggggagtatttgggtacgtggggggacgtgtcactccacttttgacaggtaacaccagtctttgtcttggacatggttcctctgtagcccttgccgatgccagtcttacactctgacagatacactctcttttcgaataagatgacatctctcatccggatgatggaggaagtcttgctgttctcggccatgatcacgcactgctgctctttgctgtggtactggaatgacctgcagatgaagtctgtttccccttcacatttggccaaacagtctgctatgcttcctgccgctagctgcttcttggtgaggctatgcagtgaagccccctgtgtgcttacatagccatccagtgagtccccttgtcctggtttcagaaacaagagaaacagaaggattatttccttatggtccatgttgggactggccaacagcacctggacaactgtgtcc

SEQ ID NO: 691 - RNA, 21 nt, synthetic construct
  source 1..21: mol_type = other RNA
  modified_base 1: mod_base = OTHER; note = 2'-O-methylcytidine-3'-phosphorothioate
  modified_base 2: mod_base = OTHER; note = 2'-O-methyladenosine-3'-phosphorothioate
  modified_base 3: mod_base = OTHER; note = 2'-O-methylguanosine-3'-phosphate
  modified_base 4: mod_base = OTHER; note = 2'-O-methyluridine-3'-phosphate
  modified_base 5: mod_base = OTHER; note = 2'-O-methylcytidine-3'-phosphate
  modified_base 6: mod_base = OTHER; note = 2'-O-methylcytidine-3'-phosphate
  modified_base 7: mod_base = OTHER; note = 2'-deoxy-2'-fluorocytidine-3'-phosphate
  modified_base 8: mod_base = OTHER; note = 2'-O-methyladenosine-3'-phosphate
  modified_base 9: mod_base = OTHER; note = 2'-deoxy-2'-fluoroadenosine-3'-phosphate
  modified_base 10: mod_base = OTHER; note = 2'-deoxy-2'-fluoroadenosine-3'-phosphate
  modified_base 11: mod_base = OTHER; note = 2'-deoxy-2'-fluoroadenosine-3'-phosphate
  modified_base 12: mod_base = OTHER; note = 2'-O-methyluridine-3'-phosphate
  modified_base 13: mod_base = OTHER; note = 2'-O-methylguanosine-3'-phosphate
  modified_base 14: mod_base = OTHER; note = 2'-O-methylguanosine-3'-phosphate
  modified_base 15: mod_base = OTHER; note = 2'-O-methyladenosine-3'-phosphate
  modified_base 16: mod_base = OTHER; note = 2'-O-methyladenosine-3'-phosphate
  modified_base 17: mod_base = OTHER; note = 2'-O-methylcytidine-3'-phosphate
  modified_base 18: mod_base = OTHER; note = 2'-O-methyladenosine-3'-phosphate
  modified_base 19: mod_base = OTHER; note = 2'-O-methyluridine-3'-phosphate
  modified_base 20: mod_base = OTHER; note = 2'-O-methyladenosine-3'-phosphate
  modified_base 21: mod_base = OTHER; note = 2'-O-methyladenosine-3'-phosphate ((2S,4R)-1-[29-[[2-(acetylamino)-2-deoxy-beta-D-galactopyra nosyl]oxy]-14,14-bis[[3-[[3-[[5-[[2-(acetylamino)-2-deoxy-b eta-D-galactopyranosyl]oxy]-1-oxopentyl]amino]propyl]amino] -3-oxopropoxy]methyl]-1,12,19,25-tetraoxo-16-oxa-13,20,24-t riazanonacos-1-yl]-4-hydroxy-2-pyrrolidinyl)methyl ester
cagtcccaaaatggaacataa

SEQ ID NO: 692 - RNA, 21 nt, synthetic construct
  source 1..21: mol_type = other RNA
  modified_base 1: mod_base = OTHER; note = 2'-O-methylcytidine-3'-phosphorothioate
  modified_base 2: mod_base = OTHER; note = 2'-O-methyladenosine-3'-phosphorothioate
  modified_base 3: mod_base = OTHER; note = 2'-O-methylguanosine-3'-phosphate
  modified_base 4: mod_base = OTHER; note = 2'-O-methyluridine-3'-phosphate
  modified_base 5: mod_base = OTHER; note = 2'-O-methylcytidine-3'-phosphate
  modified_base 6: mod_base = OTHER; note = 2'-O-methylcytidine-3'-phosphate
  modified_base 7: mod_base = OTHER; note = 2'-deoxy-2'-fluorocytidine-3'-phosphate
  modified_base 8: mod_base = OTHER; note = 2'-O-methyladenosine-3'-phosphate
  modified_base 9: mod_base = OTHER; note = 2'-deoxy-2'-fluoroadenosine-3'-phosphate
  modified_base 10: mod_base = OTHER; note = 2'-deoxy-2'-fluoroadenosine-3'-phosphate
  modified_base 11: mod_base = OTHER; note = 2'-deoxy-2'-fluoroadenosine-3'-phosphate
  modified_base 12: mod_base = OTHER; note = 2'-O-methyluridine-3'-phosphate
  modified_base 13: mod_base = OTHER; note = 2'-O-methylguanosine-3'-phosphate
  modified_base 14: mod_base = OTHER; note = 2'-O-methylguanosine-3'-phosphate
  modified_base 15: mod_base = OTHER; note = 2'-O-methyluridine-3'-phosphate
  modified_base 16: mod_base = OTHER; note = 2'-O-methyladenosine-3'-phosphate
  modified_base 17: mod_base = OTHER; note = 2'-O-methylcytidine-3'-phosphate
  modified_base 18: mod_base = OTHER; note = 2'-O-methyladenosine-3'-phosphate
  modified_base 19: mod_base = OTHER; note = 2'-O-methyluridine-3'-phosphate
  modified_base 20: mod_base = OTHER; note = 2'-O-methyladenosine-3'-phosphate
  modified_base 21: mod_base = OTHER; note = 2'-O-methyladenosine-3'-phosphate ((2S,4R)-1-[29-[[2-(acetylamino)-2-deoxy-beta-D-galactopyra nosyl]oxy]-14,14-bis[[3-[[3-[[5-[[2-(acetylamino)-2-deoxy-b eta-D-galactopyranosyl]oxy]-1-oxopentyl]amino]propyl]amino] -3-oxopropoxy]methyl]-1,12,19,25-tetraoxo-16-oxa-13,20,24-t riazanonacos-1-yl]-4-hydroxy-2-pyrrolidinyl)methyl ester
cagtcccaaaatggtacataa

SEQ ID NO: 693 - RNA, 21 nt, synthetic construct
  source 1..21: mol_type = other RNA
  modified_base 1: mod_base = OTHER; note = 2'-O-methyladenosine-3'-phosphorothioate
  modified_base 2: mod_base = OTHER; note = 2'-O-methylguanosine-3'-phosphorothioate
  modified_base 3: mod_base = OTHER; note = 2'-O-methyluridine-3'-phosphate
  modified_base 4: mod_base = OTHER; note = 2'-O-methylcytidine-3'-phosphate
  modified_base 5: mod_base = OTHER; note = 2'-O-methylcytidine-3'-phosphate
  modified_base 6: mod_base = OTHER; note = 2'-O-methylcytidine-3'-phosphate
  modified_base 7: mod_base = OTHER; note = 2'-deoxy-2'-fluoroadenosine-3'-phosphate
  modified_base 8: mod_base = OTHER; note = 2'-O-methyladenosine-3'-phosphate
  modified_base 9: mod_base = OTHER; note = 2'-deoxy-2'-fluoroadenosine-3'-phosphate
  modified_base 10: mod_base = OTHER; note = 2'-deoxy-2'-fluoroadenosine-3'-phosphate
  modified_base 11: mod_base = OTHER; note = 2'-deoxy-2'-fluorouridine-3'-phosphate
  modified_base 12: mod_base = OTHER; note = 2'-O-methylguanosine-3'-phosphate
  modified_base 13: mod_base = OTHER; note = 2'-O-methylguanosine-3'-phosphate
  modified_base 14: mod_base = OTHER; note = 2'-O-methyladenosine-3'-phosphate
  modified_base 15: mod_base = OTHER; note = 2'-O-methyladenosine-3'-phosphate
  modified_base 16: mod_base = OTHER; note = 2'-O-methylcytidine-3'-phosphate
  modified_base 17: mod_base = OTHER; note = 2'-O-methyladenosine-3'-phosphate
  modified_base 18: mod_base = OTHER; note = 2'-O-methyluridine-3'-phosphate
  modified_base 19: mod_base = OTHER; note = 2'-O-methyladenosine-3'-phosphate
  modified_base 20: mod_base = OTHER; note = 2'-O-methyladenosine-3'-phosphate
  modified_base 21: mod_base = OTHER; note = 2'-O-methyladenosine-3'-phosphate ((2S,4R)-1-[29-[[2-(acetylamino)-2-deoxy-beta-D-galactopyra nosyl]oxy]-14,14-bis[[3-[[3-[[5-[[2-(acetylamino)-2-deoxy-b eta-D-galactopyranosyl]oxy]-1-oxopentyl]amino]propyl]amino] -3-oxopropoxy]methyl]-1,12,19,25-tetraoxo-16-oxa-13,20,24-t riazanonacos-1-yl]-4-hydroxy-2-pyrrolidinyl)methyl ester
agtcccaaaatggaacataaa

SEQ ID NO: 694 - RNA, 21 nt, synthetic construct
  source 1..21: mol_type = other RNA
  modified_base 1: mod_base = OTHER; note = 2'-O-methyladenosine-3'-phosphorothioate
  modified_base 2: mod_base = OTHER; note = 2'-O-methylguanosine-3'-phosphorothioate
  modified_base 3: mod_base = OTHER; note = 2'-O-methyluridine-3'-phosphate
  modified_base 4: mod_base = OTHER; note = 2'-O-methylcytidine-3'-phosphate
  modified_base 5: mod_base = OTHER; note = 2'-O-methylcytidine-3'-phosphate
  modified_base 6: mod_base = OTHER; note = 2'-O-methylcytidine-3'-phosphate
  modified_base 7: mod_base = OTHER; note = 2'-deoxy-2'-fluoroadenosine-3'-phosphate
  modified_base 8: mod_base = OTHER; note = 2'-O-methyladenosine-3'-phosphate
  modified_base 9: mod_base = OTHER; note = 2'-deoxy-2'-fluoroadenosine-3'-phosphate
  modified_base 10: mod_base = OTHER; note = 2'-deoxy-2'-fluoroadenosine-3'-phosphate
  modified_base 11: mod_base = OTHER; note = 2'-deoxy-2'-fluorouridine-3'-phosphate
  modified_base 12: mod_base = OTHER; note = 2'-O-methylguanosine-3'-phosphate
  modified_base 13: mod_base = OTHER; note = 2'-O-methylguanosine-3'-phosphate
  modified_base 14: mod_base = OTHER; note = 2'-O-methyladenosine-3'-phosphate
  modified_base 15: mod_base = OTHER; note = 2'-O-methyluridine-3'-phosphate
  modified_base 16: mod_base = OTHER; note = 2'-O-methylcytidine-3'-phosphate
  modified_base 17: mod_base = OTHER; note = 2'-O-methyladenosine-3'-phosphate
  modified_base 18: mod_base = OTHER; note = 2'-O-methyluridine-3'-phosphate
  modified_base 19: mod_base = OTHER; note = 2'-O-methyladenosine-3'-phosphate
  modified_base 20: mod_base = OTHER; note = 2'-O-methyladenosine-3'-phosphate
  modified_base 21: mod_base = OTHER; note = 2'-O-methyladenosine-3'-phosphate ((2S,4R)-1-[29-[[2-(acetylamino)-2-deoxy-beta-D-galactopyra nosyl]oxy]-14,14-bis[[3-[[3-[[5-[[2-(acetylamino)-2-deoxy-b eta-D-galactopyranosyl]oxy]-1-oxopentyl]amino]propyl]amino] -3-oxopropoxy]methyl]-1,12,19,25-tetraoxo-16-oxa-13,20,24-t riazanonacos-1-yl]-4-hydroxy-2-pyrrolidinyl)methyl ester
agtcccaaaatggatcataaa

SEQ ID NO: 695 - RNA, 21 nt, synthetic construct
  source 1..21: mol_type = other RNA
  modified_base 1: mod_base = OTHER; note = 2'-O-methylcytidine-3'-phosphorothioate
  modified_base 2: mod_base = OTHER; note = 2'-O-methylcytidine-3'-phosphorothioate
  modified_base 3: mod_base = OTHER; note = 2'-O-methylcytidine-3'-phosphate
  modified_base 4: mod_base = OTHER; note = 2'-O-methyladenosine-3'-phosphate
  modified_base 5: mod_base = OTHER; note = 2'-O-methyladenosine-3'-phosphate
  modified_base 6: mod_base = OTHER; note = 2'-O-methyladenosine-3'-phosphate
  modified_base 7: mod_base = OTHER; note = 2'-deoxy-2'-fluoroadenosine-3'-phosphate
  modified_base 8: mod_base = OTHER; note = 2'-O-methyluridine-3'-phosphate
  modified_base 9: mod_base = OTHER; note = 2'-deoxy-2'-fluoroguanosine-3'-phosphate
  modified_base 10: mod_base = OTHER; note = 2'-deoxy-2'-fluoroguanosine-3'-phosphate
  modified_base 11: mod_base = OTHER; note = 2'-deoxy-2'-fluoroadenosine-3'-phosphate
  modified_base 12: mod_base = OTHER; note = 2'-O-methyladenosine-3'-phosphate
  modified_base 13: mod_base = OTHER; note = 2'-O-methylcytidine-3'-phosphate
  modified_base 14: mod_base = OTHER; note = 2'-O-methyladenosine-3'-phosphate
  modified_base 15: mod_base = OTHER; note = 2'-O-methyluridine-3'-phosphate
  modified_base 16: mod_base = OTHER; note = 2'-O-methyladenosine-3'-phosphate
  modified_base 17: mod_base = OTHER; note = 2'-O-methyladenosine-3'-phosphate
  modified_base 18: mod_base = OTHER; note = 2'-O-methylguanosine-3'-phosphate
  modified_base 19: mod_base = OTHER; note = 2'-O-methylguanosine-3'-phosphate
  modified_base 20: mod_base = OTHER; note = 2'-O-methyladenosine-3'-phosphate
  modified_base 21: mod_base = OTHER; note = 2'-O-methyladenosine-3'-phosphate ((2S,4R)-1-[29-[[2-(acetylamino)-2-deoxy-beta-D-galactopyra nosyl]oxy]-14,14-bis[[3-[[3-[[5-[[2-(acetylamino)-2-deoxy-b eta-D-galactopyranosyl]oxy]-1-oxopentyl]amino]propyl]amino] -3-oxopropoxy]methyl]-1,12,19,25-tetraoxo-16-oxa-13,20,24-t riazanonacos-1-yl]-4-hydroxy-2-pyrrolidinyl)methyl ester
cccaaaatggaacataaggaa

SEQ ID NO: 696 - RNA, 21 nt, synthetic construct
  source 1..21: mol_type = other RNA
  modified_base 1: mod_base = OTHER; note = 2'-O-methylcytidine-3'-phosphorothioate
  modified_base 2: mod_base = OTHER; note = 2'-O-methylcytidine-3'-phosphorothioate
  modified_base 3: mod_base = OTHER; note = 2'-O-methyluridine-3'-phosphate
  modified_base 4: mod_base = OTHER; note = 2'-O-methylcytidine-3'-phosphate
  modified_base 5: mod_base = OTHER; note = 2'-O-methyluridine-3'-phosphate
  modified_base 6: mod_base = OTHER; note = 2'-O-methylguanosine-3'-phosphate
  modified_base 7: mod_base = OTHER; note = 2'-deoxy-2'-fluoroguanosine-3'-phosphate
  modified_base 8: mod_base = OTHER; note = 2'-O-methyladenosine-3'-phosphate
  modified_base 9: mod_base = OTHER; note = 2'-deoxy-2'-fluorouridine-3'-phosphate
  modified_base 10: mod_base = OTHER; note = 2'-deoxy-2'-fluoroguanosine-3'-phosphate
  modified_base 11: mod_base = OTHER; note = 2'-deoxy-2'-fluoroadenosine-3'-phosphate
  modified_base 12: mod_base = OTHER; note = 2'-O-methylcytidine-3'-phosphate
  modified_base 13: mod_base = OTHER; note = 2'-O-methyluridine-3'-phosphate
  modified_base 14: mod_base = OTHER; note = 2'-O-methyladenosine-3'-phosphate
  modified_base 15: mod_base = OTHER; note = 2'-O-methyluridine-3'-phosphate
  modified_base 16: mod_base = OTHER; note = 2'-O-methylguanosine-3'-phosphate
  modified_base 17: mod_base = OTHER; note = 2'-O-methyluridine-3'-phosphate
  modified_base 18: mod_base = OTHER; note = 2'-O-methylguanosine-3'-phosphate
  modified_base 19: mod_base = OTHER; note = 2'-O-methyladenosine-3'-phosphate
  modified_base 20: mod_base = OTHER; note = 2'-O-methyladenosine-3'-phosphate
  modified_base 21: mod_base = OTHER; note = 2'-O-methyladenosine-3'-phosphate ((2S,4R)-1-[29-[[2-(acetylamino)-2-deoxy-beta-D-galactopyra nosyl]oxy]-14,14-bis[[3-[[3-[[5-[[2-(acetylamino)-2-deoxy-b eta-D-galactopyranosyl]oxy]-1-oxopentyl]amino]propyl]amino] -3-oxopropoxy]methyl]-1,12,19,25-tetraoxo-16-oxa-13,20,24-t riazanonacos-1-yl]-4-hydroxy-2-pyrrolidinyl)methyl ester
cctctggatgactatgtgaaa

SEQ ID NO: 697 - RNA, 21 nt, synthetic construct
  source 1..21: mol_type = other RNA
  modified_base 1: mod_base = OTHER; note = 2'-O-methylcytidine-3'-phosphorothioate
  modified_base 2: mod_base = OTHER; note = 2'-O-methylcytidine-3'-phosphorothioate
  modified_base 3: mod_base = OTHER; note = 2'-O-methyluridine-3'-phosphate
  modified_base 4: mod_base = OTHER; note = 2'-O-methylcytidine-3'-phosphate
  modified_base 5: mod_base = OTHER; note = 2'-O-methyluridine-3'-phosphate
  modified_base 6: mod_base = OTHER; note = 2'-O-methylguanosine-3'-phosphate
  modified_base 7: mod_base = OTHER; note = 2'-deoxy-2'-fluoroguanosine-3'-phosphate
  modified_base 8: mod_base = OTHER; note = 2'-O-methyladenosine-3'-phosphate
  modified_base 9: mod_base = OTHER; note = 2'-deoxy-2'-fluorouridine-3'-phosphate
  modified_base 10: mod_base = OTHER; note = 2'-deoxy-2'-fluoroguanosine-3'-phosphate
  modified_base 11: mod_base = OTHER; note = 2'-deoxy-2'-fluoroadenosine-3'-phosphate
  modified_base 12: mod_base = OTHER; note = 2'-O-methylcytidine-3'-phosphate
  modified_base 13: mod_base = OTHER; note = 2'-O-methyluridine-3'-phosphate
  modified_base 14: mod_base = OTHER; note = 2'-O-methyladenosine-3'-phosphate
  modified_base 15: mod_base = OTHER; note = 2'-O-methyluridine-3'-phosphate
  modified_base 16: mod_base = OTHER; note = 2'-O-methyluridine-3'-phosphate
  modified_base 17: mod_base = OTHER; note = 2'-O-methyluridine-3'-phosphate
  modified_base 18: mod_base = OTHER; note = 2'-O-methylguanosine-3'-phosphate
  modified_base 19: mod_base = OTHER; note = 2'-O-methyladenosine-3'-phosphate
  modified_base 20: mod_base = OTHER; note = 2'-O-methyladenosine-3'-phosphate
  modified_base 21: mod_base = OTHER; note = 2'-O-methyladenosine-3'-phosphate ((2S,4R)-1-[29-[[2-(acetylamino)-2-deoxy-beta-D-galactopyra nosyl]oxy]-14,14-bis[[3-[[3-[[5-[[2-(acetylamino)-2-deoxy-b eta-D-galactopyranosyl]oxy]-1-oxopentyl]amino]propyl]amino] -3-oxopropoxy]methyl]-1,12,19,25-tetraoxo-16-oxa-13,20,24-t riazanonacos-1-yl]-4-hydroxy-2-pyrrolidinyl)methyl ester
cctctggatgactatttgaaa

SEQ ID NO: 698 - RNA, 21 nt, synthetic construct
  source 1..21: mol_type = other RNA
  modified_base 1: mod_base = OTHER; note = 2'-O-methylcytidine-3'-phosphorothioate
  modified_base 2: mod_base = OTHER; note = 2'-O-methyladenosine-3'-phosphorothioate
  modified_base 3: mod_base = OTHER; note = 2'-O-methyladenosine-3'-phosphate
  modified_base 4: mod_base = OTHER; note = 2'-O-methyluridine-3'-phosphate
  modified_base 5: mod_base = OTHER; note = 2'-O-methyladenosine-3'-phosphate
  modified_base 6: mod_base = OTHER; note = 2'-O-methyluridine-3'-phosphate
  modified_base 7: mod_base = OTHER; note = 2'-deoxy-2'-fluorocytidine-3'-phosphate
  modified_base 8: mod_base = OTHER; note = 2'-O-methyladenosine-3'-phosphate
  modified_base 9: mod_base = OTHER; note = 2'-deoxy-2'-fluorocytidine-3'-phosphate
  modified_base 10: mod_base = OTHER; note = 2'-deoxy-2'-fluoroadenosine-3'-phosphate
  modified_base 11: mod_base = OTHER; note = 2'-deoxy-2'-fluoroguanosine-3'-phosphate
  modified_base 12: mod_base = OTHER; note = 2'-O-methyluridine-3'-phosphate
  modified_base 13: mod_base = OTHER; note = 2'-O-methyladenosine-3'-phosphate
  modified_base 14: mod_base = OTHER; note = 2'-O-methyladenosine-3'-phosphate
  modified_base 15: mod_base = OTHER; note = 2'-O-methyladenosine-3'-phosphate
  modified_base 16: mod_base = OTHER; note = 2'-O-methylguanosine-3'-phosphate
  modified_base 17: mod_base = OTHER; note = 2'-O-methyladenosine-3'-phosphate
  modified_base 18: mod_base = OTHER; note = 2'-O-methylguanosine-3'-phosphate
  modified_base 19: mod_base = OTHER; note = 2'-O-methylcytidine-3'-phosphate
  modified_base 20: mod_base = OTHER; note = 2'-O-methyladenosine-3'-phosphate
  modified_base 21: mod_base = OTHER; note = 2'-O-methyladenosine-3'-phosphate ((2S,4R)-1-[29-[[2-(acetylamino)-2-deoxy-beta-D-galactopyra nosyl]oxy]-14,14-bis[[3-[[3-[[5-[[2-(acetylamino)-2-deoxy-b eta-D-galactopyranosyl]oxy]-1-oxopentyl]amino]propyl]amino] -3-oxopropoxy]methyl]-1,12,19,25-tetraoxo-16-oxa-13,20,24-t riazanonacos-1-yl]-4-hydroxy-2-pyrrolidinyl)methyl ester
caatatcacagtaaagagcaa

SEQ ID NO: 699 - RNA, 21 nt, synthetic construct
  source 1..21: mol_type = other RNA
  modified_base 1: mod_base = OTHER; note = 2'-O-methylcytidine-3'-phosphorothioate
  modified_base 2: mod_base = OTHER; note = 2'-O-methyladenosine-3'-phosphorothioate
  modified_base 3: mod_base = OTHER; note = 2'-O-methyladenosine-3'-phosphate
  modified_base 4: mod_base = OTHER; note = 2'-O-methyluridine-3'-phosphate
  modified_base 5: mod_base = OTHER; note = 2'-O-methyladenosine-3'-phosphate
  modified_base 6: mod_base = OTHER; note = 2'-O-methyluridine-3'-phosphate
  modified_base 7: mod_base = OTHER; note = 2'-deoxy-2'-fluorocytidine-3'-phosphate
  modified_base 8: mod_base = OTHER; note = 2'-O-methyladenosine-3'-phosphate
  modified_base 9: mod_base = OTHER; note = 2'-deoxy-2'-fluorocytidine-3'-phosphate
  modified_base 10: mod_base = OTHER; note = 2'-deoxy-2'-fluoroadenosine-3'-phosphate
  modified_base 11: mod_base = OTHER; note = 2'-deoxy-2'-fluoroguanosine-3'-phosphate
  modified_base 12: mod_base = OTHER; note = 2'-O-methyluridine-3'-phosphate
  modified_base 13: mod_base = OTHER; note = 2'-O-methyladenosine-3'-phosphate
  modified_base 14: mod_base = OTHER; note = 2'-O-methyladenosine-3'-phosphate
  modified_base 15: mod_base = OTHER; note = 2'-O-methyluridine-3'-phosphate
  modified_base 16: mod_base = OTHER; note = 2'-O-methylguanosine-3'-phosphate
  modified_base 17: mod_base = OTHER; note = 2'-O-methyladenosine-3'-phosphate
  modified_base 18: mod_base = OTHER; note = 2'-O-methylguanosine-3'-phosphate
  modified_base 19: mod_base = OTHER; note = 2'-O-methylcytidine-3'-phosphate
  modified_base 20: mod_base = OTHER; note = 2'-O-methyladenosine-3'-phosphate
  modified_base 21: mod_base = OTHER; note = 2'-O-methyladenosine-3'-phosphate ((2S,4R)-1-[29-[[2-(acetylamino)-2-deoxy-beta-D-galactopyra nosyl]oxy]-14,14-bis[[3-[[3-[[5-[[2-(acetylamino)-2-deoxy-b eta-D-galactopyranosyl]oxy]-1-oxopentyl]amino]propyl]amino] -3-oxopropoxy]methyl]-1,12,19,25-tetraoxo-16-oxa-13,20,24-t riazanonacos-1-yl]-4-hydroxy-2-pyrrolidinyl)methyl ester
caatatcacagtaatgagcaa

SEQ ID NO: 700 - RNA, 21 nt, synthetic construct
  source 1..21: mol_type = other RNA
  modified_base 1: mod_base = OTHER; note = 2'-O-methyladenosine-3'-phosphorothioate
  modified_base 2: mod_base = OTHER; note = 2'-O-methyluridine-3'-phosphorothioate
  modified_base 3: mod_base = OTHER; note = 2'-O-methyladenosine-3'-phosphate
  modified_base 4: mod_base = OTHER; note = 2'-O-methyluridine-3'-phosphate
  modified_base 5: mod_base = OTHER; note = 2'-O-methylcytidine-3'-phosphate
  modified_base 6: mod_base = OTHER; note = 2'-O-methyladenosine-3'-phosphate
  modified_base 7: mod_base = OTHER; note = 2'-deoxy-2'-fluorocytidine-3'-phosphate
  modified_base 8: mod_base = OTHER; note = 2'-O-methyladenosine-3'-phosphate
  modified_base 9: mod_base = OTHER; note = 2'-deoxy-2'-fluoroguanosine-3'-phosphate
  modified_base 10: mod_base = OTHER; note = 2'-deoxy-2'-fluorouridine-3'-phosphate
  modified_base 11: mod_base = OTHER; note = 2'-deoxy-2'-fluoroadenosine-3'-phosphate
  modified_base 12: mod_base = OTHER; note = 2'-O-methyladenosine-3'-phosphate
  modified_base 13: mod_base = OTHER; note = 2'-O-methyladenosine-3'-phosphate
  modified_base 14: mod_base = OTHER; note = 2'-O-methylguanosine-3'-phosphate
  modified_base 15: mod_base = OTHER; note = 2'-O-methyladenosine-3'-phosphate
  modified_base 16: mod_base = OTHER; note = 2'-O-methylguanosine-3'-phosphate
  modified_base 17: mod_base = OTHER; note = 2'-O-methylcytidine-3'-phosphate
  modified_base 18: mod_base = OTHER; note = 2'-O-methyladenosine-3'-phosphate
  modified_base 19: mod_base = OTHER; note = 2'-O-methyladenosine-3'-phosphate
  modified_base 20: mod_base = OTHER; note = 2'-O-methylcytidine-3'-phosphate
  modified_base 21: mod_base = OTHER; note = 2'-O-methyladenosine-3'-phosphate ((2S,4R)-1-[29-[[2-(acetylamino)-2-deoxy-beta-D-galactopyra nosyl]oxy]-14,14-bis[[3-[[3-[[5-[[2-(acetylamino)-2-deoxy-b eta-D-galactopyranosyl]oxy]-1-oxopentyl]amino]propyl]amino] -3-oxopropoxy]methyl]-1,12,19,25-tetraoxo-16-oxa-13,20,24-t riazanonacos-1-yl]-4-hydroxy-2-pyrrolidinyl)methyl ester
atatcacagtaaagagcaaca

SEQ ID NO: 701 - RNA, 21 nt, synthetic construct
  source 1..21: mol_type = other RNA
  modified_base 1: mod_base = OTHER; note = 2'-O-methyladenosine-3'-phosphorothioate
  modified_base 2: mod_base = OTHER; note = 2'-O-methyluridine-3'-phosphorothioate
  modified_base 3: mod_base = OTHER; note = 2'-O-methyladenosine-3'-phosphate
  modified_base 4: mod_base = OTHER; note = 2'-O-methyluridine-3'-phosphate
  modified_base 5: mod_base = OTHER; note = 2'-O-methylcytidine-3'-phosphate
  modified_base 6: mod_base = OTHER; note = 2'-O-methyladenosine-3'-phosphate
  modified_base 7: mod_base = OTHER; note = 2'-deoxy-2'-fluorocytidine-3'-phosphate
  modified_base 8: mod_base = OTHER; note = 2'-O-methyladenosine-3'-phosphate
  modified_base 9: mod_base = OTHER; note = 2'-deoxy-2'-fluoroguanosine-3'-phosphate
  modified_base 10: mod_base = OTHER; note = 2'-deoxy-2'-fluorouridine-3'-phosphate
  modified_base 11: mod_base = OTHER; note = 2'-deoxy-2'-fluoroadenosine-3'-phosphate
  modified_base 12: mod_base = OTHER; note = 2'-O-methyladenosine-3'-phosphate
  modified_base 13: mod_base = OTHER; note = 2'-O-methyladenosine-3'-phosphate
  modified_base 14: mod_base = OTHER; note = 2'-O-methylguanosine-3'-phosphate
  modified_base 15: mod_base = OTHER; note = 2'-O-methyluridine-3'-phosphate
  modified_base 16: mod_base = OTHER; note = 2'-O-methylguanosine-3'-phosphate
  modified_base 17: mod_base = OTHER; note = 2'-O-methylcytidine-3'-phosphate
  modified_base 18: mod_base = OTHER; note = 2'-O-methyladenosine-3'-phosphate
  modified_base 19: mod_base = OTHER; note = 2'-O-methyladenosine-3'-phosphate
  modified_base 20: mod_base = OTHER; note = 2'-O-methylcytidine-3'-phosphate
  modified_base 21: mod_base = OTHER; note = 2'-O-methyladenosine-3'-phosphate ((2S,4R)-1-[29-[[2-(acetylamino)-2-deoxy-beta-D-galactopyra nosyl]oxy]-14,14-bis[[3-[[3-[[5-[[2-(acetylamino)-2-deoxy-b eta-D-galactopyranosyl]oxy]-1-oxopentyl]amino]propyl]amino] -3-oxopropoxy]methyl]-1,12,19,25-tetraoxo-16-oxa-13,20,24-t riazanonacos-1-yl]-4-hydroxy-2-pyrrolidinyl)methyl ester
atatcacagtaaagtgcaaca

SEQ ID NO: 702 - RNA, 21 nt, synthetic construct
  source 1..21: mol_type = other RNA
  modified_base 1: mod_base = OTHER; note = 2'-O-methylcytidine-3'-phosphorothioate
  modified_base 2: mod_base = OTHER; note = 2'-O-methyladenosine-3'-phosphorothioate
  modified_base 3: mod_base = OTHER; note = 2'-O-methylguanosine-3'-phosphate
  modified_base 4: mod_base = OTHER; note = 2'-O-methyluridine-3'-phosphate
  modified_base 5: mod_base = OTHER; note = 2'-O-methyladenosine-3'-phosphate
  modified_base 6: mod_base = OTHER; note = 2'-O-methyladenosine-3'-phosphate
  modified_base 7: mod_base = OTHER; note = 2'-deoxy-2'-fluoroadenosine-3'-phosphate
  modified_base 8: mod_base = OTHER; note = 2'-O-methylguanosine-3'-phosphate
  modified_base 9: mod_base = OTHER; note = 2'-deoxy-2'-fluoroadenosine-3'-phosphate
  modified_base 10: mod_base = OTHER; note = 2'-deoxy-2'-fluoroguanosine-3'-phosphate
  modified_base 11: mod_base = OTHER; note = 2'-deoxy-2'-fluorocytidine-3'-phosphate
  modified_base 12: mod_base = OTHER; note = 2'-O-methyladenosine-3'-phosphate
  modified_base 13: mod_base = OTHER; note = 2'-O-methyladenosine-3'-phosphate
  modified_base 14: mod_base = OTHER; note = 2'-O-methylcytidine-3'-phosphate
  modified_base 15: mod_base = OTHER; note = 2'-O-methyladenosine-3'-phosphate
  modified_base 16: mod_base = OTHER; note = 2'-O-methyladenosine-3'-phosphate
  modified_base 17: mod_base = OTHER; note = 2'-O-methyluridine-3'-phosphate
  modified_base 18: mod_base = OTHER; note = 2'-O-methylguanosine-3'-phosphate
  modified_base 19: mod_base = OTHER; note = 2'-O-methyluridine-3'-phosphate
  modified_base 20: mod_base = OTHER; note = 2'-O-methylguanosine-3'-phosphate
  modified_base 21: mod_base = OTHER; note = 2'-O-methyladenosine-3'-phosphate ((2S,4R)-1-[29-[[2-(acetylamino)-2-deoxy-beta-D-galactopyra nosyl]oxy]-14,14-bis[[3-[[3-[[5-[[2-(acetylamino)-2-deoxy-b eta-D-galactopyranosyl]oxy]-1-oxopentyl]amino]propyl]amino] -3-oxopropoxy]methyl]-1,12,19,25-tetraoxo-16-oxa-13,20,24-t riazanonacos-1-yl]-4-hydroxy-2-pyrrolidinyl)methyl ester
cagtaaagagcaacaatgtga

SEQ ID NO: 703 - RNA, 21 nt, synthetic construct
  source 1..21: mol_type = other RNA
  modified_base 1: mod_base = OTHER; note = 2'-O-methyladenosine-3'-phosphorothioate
  modified_base 2: mod_base = OTHER; note = 2'-O-methylguanosine-3'-phosphorothioate
  modified_base 3: mod_base = OTHER; note = 2'-O-methyluridine-3'-phosphate
  modified_base 4: mod_base = OTHER; note = 2'-O-methyladenosine-3'-phosphate
  modified_base 5: mod_base = OTHER; note = 2'-O-methyladenosine-3'-phosphate
  modified_base 6: mod_base = OTHER; note = 2'-O-methyladenosine-3'-phosphate
  modified_base 7: mod_base = OTHER; note = 2'-deoxy-2'-fluoroguanosine-3'-phosphate
  modified_base 8: mod_base = OTHER; note = 2'-O-methyladenosine-3'-phosphate
  modified_base 9: mod_base = OTHER; note = 2'-deoxy-2'-fluoroguanosine-3'-phosphate
  modified_base 10: mod_base = OTHER; note = 2'-deoxy-2'-fluorocytidine-3'-phosphate
  modified_base 11: mod_base = OTHER; note = 2'-deoxy-2'-fluoroadenosine-3'-phosphate
  modified_base 12: mod_base = OTHER; note = 2'-O-methyladenosine-3'-phosphate
  modified_base 13: mod_base = OTHER; note = 2'-O-methylcytidine-3'-phosphate
  modified_base 14: mod_base = OTHER; note = 2'-O-methyladenosine-3'-phosphate
  modified_base 15: mod_base = OTHER; note = 2'-O-methyladenosine-3'-phosphate
  modified_base 16: mod_base = OTHER; note = 2'-O-methyluridine-3'-phosphate
  modified_base 17: mod_base = OTHER; note = 2'-O-methylguanosine-3'-phosphate
  modified_base 18: mod_base = OTHER; note = 2'-O-methyluridine-3'-phosphate
  modified_base 19: mod_base = OTHER; note = 2'-O-methylguanosine-3'-phosphate
  modified_base 20: mod_base = OTHER; note = 2'-O-methyluridine-3'-phosphate
  modified_base 21: mod_base = OTHER; note = 2'-O-methyladenosine-3'-phosphate ((2S,4R)-1-[29-[[2-(acetylamino)-2-deoxy-beta-D-galactopyra nosyl]oxy]-14,14-bis[[3-[[3-[[5-[[2-(acetylamino)-2-deoxy-b eta-D-galactopyranosyl]oxy]-1-oxopentyl]amino]propyl]amino] -3-oxopropoxy]methyl]-1,12,19,25-tetraoxo-16-oxa-13,20,24-t riazanonacos-1-yl]-4-hydroxy-2-pyrrolidinyl)methyl ester
agtaaagagcaacaatgtgta

SEQ ID NO: 704 - RNA, 21 nt, synthetic construct
  source 1..21: mol_type = other RNA
  modified_base 1: mod_base = OTHER; note = 2'-O-methyladenosine-3'-phosphorothioate
  modified_base 2: mod_base = OTHER; note = 2'-O-methyladenosine-3'-phosphorothioate
  modified_base 3: mod_base = OTHER; note = 2'-O-methyluridine-3'-phosphate
  modified_base 4: mod_base = OTHER; note = 2'-O-methylguanosine-3'-phosphate
  modified_base 5: mod_base = OTHER; note = 2'-O-methyluridine-3'-phosphate
  modified_base 6: mod_base = OTHER; note = 2'-O-methyladenosine-3'-phosphate
  modified_base 7: mod_base = OTHER; note = 2'-deoxy-2'-fluorouridine-3'-phosphate
  modified_base 8: mod_base = OTHER; note = 2'-O-methylguanosine-3'-phosphate
  modified_base 9: mod_base = OTHER; note = 2'-deoxy-2'-fluorocytidine-3'-phosphate
  modified_base 10: mod_base = OTHER; note = 2'-deoxy-2'-fluoroadenosine-3'-phosphate
  modified_base 11: mod_base = OTHER; note = 2'-deoxy-2'-fluorouridine-3'-phosphate
  modified_base 12: mod_base = OTHER; note = 2'-O-methyluridine-3'-phosphate
  modified_base 13: mod_base = OTHER; note = 2'-O-methylguanosine-3'-phosphate
  modified_base 14: mod_base = OTHER; note = 2'-O-methylcytidine-3'-phosphate
  modified_base 15: mod_base = OTHER; note = 2'-O-methyladenosine-3'-phosphate
  modified_base 16: mod_base = OTHER; note = 2'-O-methylguanosine-3'-phosphate
  modified_base 17: mod_base = OTHER; note = 2'-O-methyluridine-3'-phosphate
  modified_base 18: mod_base = OTHER; note = 2'-O-methylguanosine-3'-phosphate
  modified_base 19: mod_base = OTHER; note = 2'-O-methylguanosine-3'-phosphate
  modified_base 20: mod_base = OTHER; note = 2'-O-methyladenosine-3'-phosphate
  modified_base 21: mod_base = OTHER; note = 2'-O-methyladenosine-3'-phosphate ((2S,4R)-1-[29-[[2-(acetylamino)-2-deoxy-beta-D-galactopyra nosyl]oxy]-14,14-bis[[3-[[3-[[5-[[2-(acetylamino)-2-deoxy-b eta-D-galactopyranosyl]oxy]-1-oxopentyl]amino]propyl]amino] -3-oxopropoxy]methyl]-1,12,19,25-tetraoxo-16-oxa-13,20,24-t riazanonacos-1-yl]-4-hydroxy-2-pyrrolidinyl)methyl ester
aatgtatgcattgcagtggaa

SEQ ID NO: 705 - RNA, 21 nt, synthetic construct
  source 1..21: mol_type = other RNA
  modified_base 1: mod_base = OTHER; note = 2'-O-methyladenosine-3'-phosphorothioate
  modified_base 2: mod_base = OTHER; note = 2'-O-methyladenosine-3'-phosphorothioate
  modified_base 3: mod_base = OTHER; note = 2'-O-methyluridine-3'-phosphate
  modified_base 4: mod_base = OTHER; note = 2'-O-methylguanosine-3'-phosphate
  modified_base 5: mod_base = OTHER; note = 2'-O-methyluridine-3'-phosphate
  modified_base 6: mod_base = OTHER; note = 2'-O-methyladenosine-3'-phosphate
  modified_base 7: mod_base = OTHER; note = 2'-deoxy-2'-fluorouridine-3'-phosphate
  modified_base 8: mod_base = OTHER; note = 2'-O-methylguanosine-3'-phosphate
  modified_base 9: mod_base = OTHER; note = 2'-deoxy-2'-fluorocytidine-3'-phosphate
  modified_base 10: mod_base = OTHER; note = 2'-deoxy-2'-fluoroadenosine-3'-phosphate
  modified_base 11: mod_base = OTHER; note = 2'-deoxy-2'-fluorouridine-3'-phosphate
  modified_base 12: mod_base = OTHER; note = 2'-O-methyluridine-3'-phosphate
  modified_base 13: mod_base = OTHER; note = 2'-O-methylguanosine-3'-phosphate
  modified_base 14: mod_base = OTHER; note = 2'-O-methylcytidine-3'-phosphate
  modified_base 15: mod_base = OTHER; note = 2'-O-methyluridine-3'-phosphate
  modified_base 16: mod_base = OTHER; note = 2'-O-methylguanosine-3'-phosphate
  modified_base 17: mod_base = OTHER; note = 2'-O-methyluridine-3'-phosphate
  modified_base 18: mod_base = OTHER; note = 2'-O-methylguanosine-3'-phosphate
  modified_base 19: mod_base = OTHER; note = 2'-O-methylguanosine-3'-phosphate
  modified_base 20: mod_base = OTHER; note = 2'-O-methyladenosine-3'-phosphate
  modified_base 21: mod_base = OTHER; note = 2'-O-methyladenosine-3'-phosphate ((2S,4R)-1-[29-[[2-(acetylamino)-2-deoxy-beta-D-galactopyra nosyl]oxy]-14,14-bis[[3-[[3-[[5-[[2-(acetylamino)-2-deoxy-b eta-D-galactopyranosyl]oxy]-1-oxopentyl]amino]propyl]amino] -3-oxopropoxy]methyl]-1,12,19,25-tetraoxo-16-oxa-13,20,24-t riazanonacos-1-yl]-4-hydroxy-2-pyrrolidinyl)methyl ester
aatgtatgcattgctgtggaa

SEQ ID NO: 706 - RNA, 21 nt, synthetic construct
  source 1..21: mol_type = other RNA
  modified_base 1: mod_base = OTHER; note = 2'-O-methylcytidine-3'-phosphorothioate
  modified_base 2: mod_base = OTHER; note = 2'-O-methylguanosine-3'-phosphorothioate
  modified_base 3: mod_base = OTHER; note = 2'-O-methylguanosine-3'-phosphate
  modified_base 4: mod_base = OTHER; note = 2'-O-methylcytidine-3'-phosphate
  modified_base 5: mod_base = OTHER; note = 2'-O-methyladenosine-3'-phosphate
  modified_base 6: mod_base = OTHER; note = 2'-O-methyladenosine-3'-phosphate
  modified_base 7: mod_base = OTHER; note = 2'-deoxy-2'-fluoroadenosine-3'-phosphate
  modified_base 8: mod_base = OTHER; note = 2'-O-methyladenosine-3'-phosphate
  modified_base 9: mod_base = OTHER; note = 2'-deoxy-2'-fluorouridine-3'-phosphate
  modified_base 10: mod_base = OTHER; note = 2'-deoxy-2'-fluorouridine-3'-phosphate
  modified_base 11: mod_base = OTHER; note = 2'-deoxy-2'-fluorouridine-3'-phosphate
  modified_base 12: mod_base = OTHER; note = 2'-O-methylcytidine-3'-phosphate
  modified_base 13: mod_base = OTHER; note = 2'-O-methylcytidine-3'-phosphate
  modified_base 14: mod_base = OTHER; note = 2'-O-methyladenosine-3'-phosphate
  modified_base 15: mod_base = OTHER; note = 2'-O-methyladenosine-3'-phosphate
  modified_base 16: mod_base = OTHER; note = 2'-O-methylguanosine-3'-phosphate
  modified_base 17: mod_base = OTHER; note = 2'-O-methyladenosine-3'-phosphate
  modified_base 18: mod_base = OTHER; note = 2'-O-methylcytidine-3'-phosphate
  modified_base 19: mod_base = OTHER; note = 2'-O-methylcytidine-3'-phosphate
  modified_base 20: mod_base = OTHER; note = 2'-O-methyladenosine-3'-phosphate
  modified_base 21: mod_base = OTHER; note = 2'-O-methyladenosine-3'-phosphate ((2S,4R)-1-[29-[[2-(acetylamino)-2-deoxy-beta-D-galactopyra nosyl]oxy]-14,14-bis[[3-[[3-[[5-[[2-(acetylamino)-2-deoxy-b eta-D-galactopyranosyl]oxy]-1-oxopentyl]amino]propyl]amino] -3-oxopropoxy]methyl]-1,12,19,25-tetraoxo-16-oxa-13,20,24-t riazanonacos-1-yl]-4-hydroxy-2-pyrrolidinyl)methyl ester
cggcaaaatttccaagaccaa

SEQ ID NO: 707 - RNA, 21 nt, synthetic construct
  source 1..21: mol_type = other RNA
  modified_base 1: mod_base = OTHER; note = 2'-O-methylcytidine-3'-phosphorothioate
  modified_base 2: mod_base = OTHER; note = 2'-O-methylguanosine-3'-phosphorothioate
  modified_base 3: mod_base = OTHER; note = 2'-O-methylguanosine-3'-phosphate
  modified_base 4: mod_base = OTHER; note = 2'-O-methylcytidine-3'-phosphate
  modified_base 5: mod_base = OTHER; note = 2'-O-methyladenosine-3'-phosphate
  modified_base 6: mod_base = OTHER; note = 2'-O-methyladenosine-3'-phosphate
  modified_base 7: mod_base = OTHER; note = 2'-deoxy-2'-fluoroadenosine-3'-phosphate
  modified_base 8: mod_base = OTHER; note = 2'-O-methyladenosine-3'-phosphate
  modified_base 9: mod_base = OTHER; note = 2'-deoxy-2'-fluorouridine-3'-phosphate
  modified_base 10: mod_base = OTHER; note = 2'-deoxy-2'-fluorouridine-3'-phosphate
  modified_base 11: mod_base = OTHER; note = 2'-deoxy-2'-fluorouridine-3'-phosphate
  modified_base 12: mod_base = OTHER; note = 2'-O-methylcytidine-3'-phosphate
  modified_base 13: mod_base = OTHER; note = 2'-O-methylcytidine-3'-phosphate
  modified_base 14: mod_base = OTHER; note = 2'-O-methyladenosine-3'-phosphate
  modified_base 15: mod_base = OTHER; note = 2'-O-methyluridine-3'-phosphate
  modified_base 16: mod_base = OTHER; note = 2'-O-methylguanosine-3'-phosphate
  modified_base 17: mod_base = OTHER; note = 2'-O-methyladenosine-3'-phosphate
  modified_base 18: mod_base = OTHER; note = 2'-O-methylcytidine-3'-phosphate
  modified_base 19: mod_base = OTHER; note = 2'-O-methylcytidine-3'-phosphate
  modified_base 20: mod_base = OTHER; note = 2'-O-methyladenosine-3'-phosphate
  modified_base 21: mod_base = OTHER; note = 2'-O-methyladenosine-3'-phosphate ((2S,4R)-1-[29-[[2-(acetylamino)-2-deoxy-beta-D-galactopyra nosyl]oxy]-14,14-bis[[3-[[3-[[5-[[2-(acetylamino)-2-deoxy-b eta-D-galactopyranosyl]oxy]-1-oxopentyl]amino]propyl]amino] -3-oxopropoxy]methyl]-1,12,19,25-tetraoxo-16-oxa-13,20,24-t riazanonacos-1-yl]-4-hydroxy-2-pyrrolidinyl)methyl ester
cggcaaaatttccatgaccaa

SEQ ID NO: 708 - RNA, 21 nt, synthetic construct
  source 1..21: mol_type = other RNA
  modified_base 1: mod_base = OTHER; note = 2'-O-methylguanosine-3'-phosphorothioate
  modified_base 2: mod_base = OTHER; note = 2'-O-methylguanosine-3'-phosphorothioate
  modified_base 3: mod_base = OTHER; note = 2'-O-methylcytidine-3'-phosphate
  modified_base 4: mod_base = OTHER; note = 2'-O-methyladenosine-3'-phosphate
  modified_base 5: mod_base = OTHER; note = 2'-O-methyladenosine-3'-phosphate
  modified_base 6: mod_base = OTHER; note = 2'-O-methyladenosine-3'-phosphate
  modified_base 7: mod_base = OTHER; note = 2'-deoxy-2'-fluoroadenosine-3'-phosphate
  modified_base 8: mod_base = OTHER; note = 2'-O-methyluridine-3'-phosphate
  modified_base 9: mod_base = OTHER; note = 2'-deoxy-2'-fluorouridine-3'-phosphate
  modified_base 10: mod_base = OTHER; note = 2'-deoxy-2'-fluorouridine-3'-phosphate
  modified_base 11: mod_base = OTHER; note = 2'-deoxy-2'-fluorocytidine-3'-phosphate
  modified_base 12: mod_base = OTHER; note = 2'-O-methylcytidine-3'-phosphate
  modified_base 13: mod_base = OTHER; note = 2'-O-methyladenosine-3'-phosphate
  modified_base 14: mod_base = OTHER; note = 2'-O-methyladenosine-3'-phosphate
  modified_base 15: mod_base = OTHER; note = 2'-O-methylguanosine-3'-phosphate
  modified_base 16: mod_base = OTHER; note = 2'-O-methyladenosine-3'-phosphate
  modified_base 17: mod_base = OTHER; note = 2'-O-methylcytidine-3'-phosphate
  modified_base 18: mod_base = OTHER; note = 2'-O-methylcytidine-3'-phosphate
  modified_base 19: mod_base = OTHER; note = 2'-O-methyladenosine-3'-phosphate
  modified_base 20: mod_base = OTHER; note = 2'-O-methyluridine-3'-phosphate
  modified_base 21: mod_base = OTHER; note = 2'-O-methyladenosine-3'-phosphate ((2S,4R)-1-[29-[[2-(acetylamino)-2-deoxy-beta-D-galactopyra nosyl]oxy]-14,14-bis[[3-[[3-[[5-[[2-(acetylamino)-2-deoxy-b eta-D-galactopyranosyl]oxy]-1-oxopentyl]amino]propyl]amino] -3-oxopropoxy]methyl]-1,12,19,25-tetraoxo-16-oxa-13,20,24-t riazanonacos-1-yl]-4-hydroxy-2-pyrrolidinyl)methyl ester
ggcaaaatttccaagaccata

SEQ ID NO: 709 - RNA, 21 nt, synthetic construct
  source 1..21: mol_type = other RNA
  modified_base 1: mod_base = OTHER; note = 2'-O-methylguanosine-3'-phosphorothioate
  modified_base 2: mod_base = OTHER; note = 2'-O-methylguanosine-3'-phosphorothioate
  modified_base 3: mod_base = OTHER; note = 2'-O-methylcytidine-3'-phosphate
  modified_base 4: mod_base = OTHER; note = 2'-O-methyladenosine-3'-phosphate
  modified_base 5: mod_base = OTHER; note = 2'-O-methyladenosine-3'-phosphate
  modified_base 6: mod_base = OTHER; note = 2'-O-methyladenosine-3'-phosphate
  modified_base 7: mod_base = OTHER; note = 2'-deoxy-2'-fluoroadenosine-3'-phosphate
  modified_base 8: mod_base = OTHER; note = 2'-O-methyluridine-3'-phosphate
  modified_base 9: mod_base = OTHER; note = 2'-deoxy-2'-fluorouridine-3'-phosphate
  modified_base 10: mod_base = OTHER; note = 2'-deoxy-2'-fluorouridine-3'-phosphate
  modified_base 11: mod_base = OTHER; note = 2'-deoxy-2'-fluorocytidine-3'-phosphate
  modified_base 12: mod_base = OTHER; note = 2'-O-methylcytidine-3'-phosphate
  modified_base 13: mod_base = OTHER; note = 2'-O-methyladenosine-3'-phosphate
  modified_base 14: mod_base = OTHER; note = 2'-O-methyladenosine-3'-phosphate
  modified_base 15: mod_base = OTHER; note = 2'-O-methyluridine-3'-phosphate
  modified_base 16: mod_base = OTHER; note = 2'-O-methyladenosine-3'-phosphate
  modified_base 17: mod_base = OTHER; note = 2'-O-methylcytidine-3'-phosphate
  modified_base 18: mod_base = OTHER; note = 2'-O-methylcytidine-3'-phosphate
  modified_base 19: mod_base = OTHER; note = 2'-O-methyladenosine-3'-phosphate
  modified_base 20: mod_base = OTHER; note = 2'-O-methyluridine-3'-phosphate
  modified_base 21: mod_base = OTHER; note = 2'-O-methyladenosine-3'-phosphate ((2S,4R)-1-[29-[[2-(acetylamino)-2-deoxy-beta-D-galactopyra nosyl]oxy]-14,14-bis[[3-[[3-[[5-[[2-(acetylamino)-2-deoxy-b eta-D-galactopyranosyl]oxy]-1-oxopentyl]amino]propyl]amino] -3-oxopropoxy]methyl]-1,12,19,25-tetraoxo-16-oxa-13,20,24-t riazanonacos-1-yl]-4-hydroxy-2-pyrrolidinyl)methyl ester
ggcaaaatttccaataccata

SEQ ID NO: 710 - RNA, 21 nt, synthetic construct
  source 1..21: mol_type = other RNA
  modified_base 1: mod_base = OTHER; note = 2'-O-methylguanosine-3'-phosphorothioate
  modified_base 2: mod_base = OTHER; note = 2'-O-methylcytidine-3'-phosphorothioate
  modified_base 3: mod_base = OTHER; note = 2'-O-methyladenosine-3'-phosphate
  modified_base 4: mod_base = OTHER; note = 2'-O-methyladenosine-3'-phosphate
  modified_base 5: mod_base = OTHER; note = 2'-O-methyladenosine-3'-phosphate
  modified_base 6: mod_base = OTHER; note = 2'-O-methyladenosine-3'-phosphate
  modified_base 7: mod_base = OTHER; note = 2'-deoxy-2'-fluorouridine-3'-phosphate
  modified_base 8: mod_base = OTHER; note = 2'-O-methyluridine-3'-phosphate
  modified_base 9: mod_base = OTHER; note = 2'-deoxy-2'-fluorouridine-3'-phosphate
  modified_base 10: mod_base = OTHER; note = 2'-deoxy-2'-fluorocytidine-3'-phosphate
  modified_base 11: mod_base = OTHER; note = 2'-deoxy-2'-fluorocytidine-3'-phosphate
  modified_base 12: mod_base = OTHER; note = 2'-O-methyladenosine-3'-phosphate
  modified_base 13: mod_base = OTHER; note = 2'-O-methyladenosine-3'-phosphate
  modified_base 14: mod_base = OTHER; note = 2'-O-methylguanosine-3'-phosphate
  modified_base 15: mod_base = OTHER; note = 2'-O-methyladenosine-3'-phosphate
  modified_base 16: mod_base = OTHER; note = 2'-O-methylcytidine-3'-phosphate
  modified_base 17: mod_base = OTHER; note = 2'-O-methylcytidine-3'-phosphate
  modified_base 18: mod_base = OTHER; note = 2'-O-methyladenosine-3'-phosphate
  modified_base 19: mod_base = OTHER; note = 2'-O-methyluridine-3'-phosphate
  modified_base 20: mod_base = OTHER; note = 2'-O-methylguanosine-3'-phosphate
  modified_base 21: mod_base = OTHER; note = 2'-O-methyladenosine-3'-phosphate ((2S,4R)-1-[29-[[2-(acetylamino)-2-deoxy-beta-D-galactopyra nosyl]oxy]-14,14-bis[[3-[[3-[[5-[[2-(acetylamino)-2-deoxy-b eta-D-galactopyranosyl]oxy]-1-oxopentyl]amino]propyl]amino] -3-oxopropoxy]methyl]-1,12,19,25-tetraoxo-16-oxa-13,20,24-t riazanonacos-1-yl]-4-hydroxy-2-pyrrolidinyl)methyl ester
gcaaaatttccaagaccatga

SEQ ID NO: 711 - RNA, 21 nt, synthetic construct
  source 1..21: mol_type = other RNA
  modified_base 1: mod_base = OTHER; note = 2'-O-methylguanosine-3'-phosphorothioate
  modified_base 2: mod_base = OTHER; note = 2'-O-methylcytidine-3'-phosphorothioate
  modified_base 3: mod_base = OTHER; note = 2'-O-methyladenosine-3'-phosphate
  modified_base 4: mod_base = OTHER; note = 2'-O-methyladenosine-3'-phosphate
  modified_base 5: mod_base = OTHER; note = 2'-O-methyladenosine-3'-phosphate
  modified_base 6: mod_base = OTHER; note = 2'-O-methyladenosine-3'-phosphate
  modified_base 7: mod_base = OTHER; note = 2'-deoxy-2'-fluorouridine-3'-phosphate
  modified_base 8: mod_base = OTHER; note = 2'-O-methyluridine-3'-phosphate
  modified_base 9: mod_base = OTHER; note = 2'-deoxy-2'-fluorouridine-3'-phosphate
  modified_base 10: mod_base = OTHER; note = 2'-deoxy-2'-fluorocytidine-3'-phosphate
  modified_base 11: mod_base = OTHER; note = 2'-deoxy-2'-fluorocytidine-3'-phosphate
  modified_base 12: mod_base = OTHER; note = 2'-O-methyladenosine-3'-phosphate
  modified_base 13: mod_base = OTHER; note = 2'-O-methyladenosine-3'-phosphate
  modified_base 14: mod_base = OTHER; note = 2'-O-methylguanosine-3'-phosphate
  modified_base 15: mod_base = OTHER; note = 2'-O-methyluridine-3'-phosphate
  modified_base 16: mod_base = OTHER; note = 2'-O-methylcytidine-3'-phosphate
  modified_base 17: mod_base = OTHER; note = 2'-O-methylcytidine-3'-phosphate
  modified_base 18: mod_base = OTHER; note = 2'-O-methyladenosine-3'-phosphate
  modified_base 19: mod_base = OTHER; note = 2'-O-methyluridine-3'-phosphate
  modified_base 20: mod_base = OTHER; note = 2'-O-methylguanosine-3'-phosphate
  modified_base 21: mod_base = OTHER; note = 2'-O-methyladenosine-3'-phosphate ((2S,4R)-1-[29-[[2-(acetylamino)-2-deoxy-beta-D-galactopyra nosyl]oxy]-14,14-bis[[3-[[3-[[5-[[2-(acetylamino)-2-deoxy-b eta-D-galactopyranosyl]oxy]-1-oxopentyl]amino]propyl]amino] -3-oxopropoxy]methyl]-1,12,19,25-tetraoxo-16-oxa-13,20,24-t riazanonacos-1-yl]-4-hydroxy-2-pyrrolidinyl)methyl ester
gcaaaatttccaagtccatga

SEQ ID NO: 712 - RNA, 21 nt, synthetic construct
  source 1..21: mol_type = other RNA
  modified_base 1: mod_base = OTHER; note = 2'-O-methylguanosine-3'-phosphorothioate
  modified_base 2: mod_base = OTHER; note = 2'-O-methylguanosine-3'-phosphorothioate
  modified_base 3: mod_base = OTHER; note = 2'-O-methyladenosine-3'-phosphate
  modified_base 4: mod_base = OTHER; note = 2'-O-methyluridine-3'-phosphate
  modified_base 5: mod_base = OTHER; note = 2'-O-methyladenosine-3'-phosphate
  modified_base 6: mod_base = OTHER; note = 2'-O-methylcytidine-3'-phosphate
  modified_base 7: mod_base = OTHER; note = 2'-deoxy-2'-fluoroadenosine-3'-phosphate
  modified_base 8: mod_base = OTHER; note = 2'-O-methyluridine-3'-phosphate
  modified_base 9: mod_base = OTHER; note = 2'-deoxy-2'-fluorouridine-3'-phosphate
  modified_base 10: mod_base = OTHER; note = 2'-deoxy-2'-fluorocytidine-3'-phosphate
  modified_base 11: mod_base = OTHER; note = 2'-deoxy-2'-fluorocytidine-3'-phosphate
  modified_base 12: mod_base = OTHER; note = 2'-O-methyluridine-3'-phosphate
  modified_base 13: mod_base = OTHER; note = 2'-O-methyluridine-3'-phosphate
  modified_base 14: mod_base = OTHER; note = 2'-O-methylcytidine-3'-phosphate
  modified_base 15: mod_base = OTHER; note = 2'-O-methylcytidine-3'-phosphate
  modified_base 16: mod_base = OTHER; note = 2'-O-methyladenosine-3'-phosphate
  modified_base 17: mod_base = OTHER; note = 2'-O-methyladenosine-3'-phosphate
  modified_base 18: mod_base = OTHER; note = 2'-O-methyladenosine-3'-phosphate
  modified_base 19: mod_base = OTHER; note = 2'-O-methyluridine-3'-phosphate
  modified_base 20: mod_base = OTHER; note = 2'-O-methyluridine-3'-phosphate
  modified_base 21: mod_base = OTHER; note = 2'-O-methyladenosine-3'-phosphate ((2S,4R)-1-[29-[[2-(acetylamino)-2-deoxy-beta-D-galactopyra nosyl]oxy]-14,14-bis[[3-[[3-[[5-[[2-(acetylamino)-2-deoxy-b eta-D-galactopyranosyl]oxy]-1-oxopentyl]amino]propyl]amino] -3-oxopropoxy]methyl]-1,12,19,25-tetraoxo-16-oxa-13,20,24-t riazanonacos-1-yl]-4-hydroxy-2-pyrrolidinyl)methyl ester
ggatacattccttccaaatta

SEQ ID NO: 713 - RNA, 21 nt, synthetic construct
  source 1..21: mol_type = other RNA
  modified_base 1: mod_base = OTHER; note = 2'-O-methylguanosine-3'-phosphorothioate
  modified_base 2: mod_base = OTHER; note = 2'-O-methylguanosine-3'-phosphorothioate
  modified_base 3: mod_base = OTHER; note = 2'-O-methyladenosine-3'-phosphate
  modified_base 4: mod_base = OTHER; note = 2'-O-methyluridine-3'-phosphate
  modified_base 5: mod_base = OTHER; note = 2'-O-methyladenosine-3'-phosphate
  modified_base 6: mod_base = OTHER; note = 2'-O-methylcytidine-3'-phosphate
  modified_base 7: mod_base = OTHER; note = 2'-deoxy-2'-fluoroadenosine-3'-phosphate
  modified_base 8: mod_base = OTHER; note = 2'-O-methyluridine-3'-phosphate
  modified_base 9: mod_base = OTHER; note = 2'-deoxy-2'-fluorouridine-3'-phosphate
  modified_base 10: mod_base = OTHER; note = 2'-deoxy-2'-fluorocytidine-3'-phosphate
  modified_base 11: mod_base = OTHER; note = 2'-deoxy-2'-fluorocytidine-3'-phosphate
  modified_base 12: mod_base = OTHER; note = 2'-O-methyluridine-3'-phosphate
  modified_base 13: mod_base = OTHER; note = 2'-O-methyluridine-3'-phosphate
  modified_base 14: mod_base = OTHER; note = 2'-O-methylcytidine-3'-phosphate
  modified_base 15: mod_base = OTHER; note = 2'-O-methyluridine-3'-phosphate
  modified_base 16: mod_base = OTHER; note = 2'-O-methyladenosine-3'-phosphate
  modified_base 17: mod_base = OTHER; note = 2'-O-methyladenosine-3'-phosphate
  modified_base 18: mod_base = OTHER; note = 2'-O-methyladenosine-3'-phosphate
  modified_base 19: mod_base = OTHER; note = 2'-O-methyluridine-3'-phosphate
  modified_base 20: mod_base = OTHER; note = 2'-O-methyluridine-3'-phosphate
  modified_base 21: mod_base = OTHER; note = 2'-O-methyladenosine-3'-phosphate ((2S,4R)-1-[29-[[2-(acetylamino)-2-deoxy-beta-D-galactopyra nosyl]oxy]-14,14-bis[[3-[[3-[[5-[[2-(acetylamino)-2-deoxy-b eta-D-galactopyranosyl]oxy]-1-oxopentyl]amino]propyl]amino] -3-oxopropoxy]methyl]-1,12,19,25-tetraoxo-16-oxa-13,20,24-t riazanonacos-1-yl]-4-hydroxy-2-pyrrolidinyl)methyl ester
ggatacattccttctaaatta

SEQ ID NO: 714 - RNA, 21 nt, synthetic construct
  source 1..21: mol_type = other RNA
  modified_base 1: mod_base = OTHER; note = 2'-O-methyladenosine-3'-phosphorothioate
  modified_base 2: mod_base = OTHER; note = 2'-O-methylcytidine-3'-phosphorothioate
  modified_base 3: mod_base = OTHER; note = 2'-O-methyladenosine-3'-phosphate
  modified_base 4: mod_base = OTHER; note = 2'-O-methyluridine-3'-phosphate
  modified_base 5: mod_base = OTHER; note = 2'-O-methyluridine-3'-phosphate
  modified_base 6: mod_base = OTHER; note = 2'-O-methylcytidine-3'-phosphate
  modified_base 7: mod_base = OTHER; note = 2'-deoxy-2'-fluorocytidine-3'-phosphate
  modified_base 8: mod_base = OTHER; note = 2'-O-methyluridine-3'-phosphate
  modified_base 9: mod_base = OTHER; note = 2'-deoxy-2'-fluorouridine-3'-phosphate
  modified_base 10: mod_base = OTHER; note = 2'-deoxy-2'-fluorocytidine-3'-phosphate
  modified_base 11: mod_base = OTHER; note = 2'-deoxy-2'-fluorocytidine-3'-phosphate
  modified_base 12: mod_base = OTHER; note = 2'-O-methyladenosine-3'-phosphate
  modified_base 13: mod_base = OTHER; note = 2'-O-methyladenosine-3'-phosphate
  modified_base 14: mod_base = OTHER; note = 2'-O-methyladenosine-3'-phosphate
  modified_base 15: mod_base = OTHER; note = 2'-O-methyluridine-3'-phosphate
  modified_base 16: mod_base = OTHER; note = 2'-O-methyluridine-3'-phosphate
  modified_base 17: mod_base = OTHER; note = 2'-O-methyluridine-3'-phosphate
  modified_base 18: mod_base = OTHER; note = 2'-O-methylcytidine-3'-phosphate
  modified_base 19: mod_base = OTHER; note = 2'-O-methylcytidine-3'-phosphate
  modified_base 20: mod_base = OTHER; note = 2'-O-methyladenosine-3'-phosphate
  modified_base 21: mod_base = OTHER; note = 2'-O-methyladenosine-3'-phosphate ((2S,4R)-1-[29-[[2-(acetylamino)-2-deoxy-beta-D-galactopyra nosyl]oxy]-14,14-bis[[3-[[3-[[5-[[2-(acetylamino)-2-deoxy-b eta-D-galactopyranosyl]oxy]-1-oxopentyl]amino]propyl]amino] -3-oxopropoxy]methyl]-1,12,19,25-tetraoxo-16-oxa-13,20,24-t riazanonacos-1-yl]-4-hydroxy-2-pyrrolidinyl)methyl ester
acattccttccaaatttccaa

SEQ ID NO: 715 - RNA, 21 nt, synthetic construct
  source 1..21: mol_type = other RNA
  modified_base 1: mod_base = OTHER; note = 2'-O-methylcytidine-3'-phosphorothioate
  modified_base 2: mod_base = OTHER; note = 2'-O-methyladenosine-3'-phosphorothioate
  modified_base 3: mod_base = OTHER; note = 2'-O-methyluridine-3'-phosphate
  modified_base 4: mod_base = OTHER; note = 2'-O-methyluridine-3'-phosphate
  modified_base 5: mod_base = OTHER; note = 2'-O-methylcytidine-3'-phosphate
  modified_base 6: mod_base = OTHER; note = 2'-O-methylcytidine-3'-phosphate
  modified_base 7: mod_base = OTHER; note = 2'-deoxy-2'-fluorouridine-3'-phosphate
  modified_base 8: mod_base = OTHER; note = 2'-O-methyluridine-3'-phosphate
  modified_base 9: mod_base = OTHER; note = 2'-deoxy-2'-fluorocytidine-3'-phosphate
  modified_base 10: mod_base = OTHER; note = 2'-deoxy-2'-fluorocytidine-3'-phosphate
  modified_base 11: mod_base = OTHER; note = 2'-deoxy-2'-fluoroadenosine-3'-phosphate
  modified_base 12: mod_base = OTHER; note = 2'-O-methyladenosine-3'-phosphate
  modified_base 13: mod_base = OTHER; note = 2'-O-methyladenosine-3'-phosphate
  modified_base 14: mod_base = OTHER; note = 2'-O-methyluridine-3'-phosphate
  modified_base 15: mod_base = OTHER; note = 2'-O-methyluridine-3'-phosphate
  modified_base 16: mod_base = OTHER; note = 2'-O-methyluridine-3'-phosphate
  modified_base 17: mod_base = OTHER; note = 2'-O-methylcytidine-3'-phosphate
  modified_base 18: mod_base = OTHER; note = 2'-O-methylcytidine-3'-phosphate
  modified_base 19: mod_base = OTHER; note = 2'-O-methyladenosine-3'-phosphate
  modified_base 20: mod_base = OTHER; note = 2'-O-methyladenosine-3'-phosphate
  modified_base 21: mod_base = OTHER; note = 2'-O-methyladenosine-3'-phosphate ((2S,4R)-1-[29-[[2-(acetylamino)-2-deoxy-beta-D-galactopyra nosyl]oxy]-14,14-bis[[3-[[3-[[5-[[2-(acetylamino)-2-deoxy-b eta-D-galactopyranosyl]oxy]-1-oxopentyl]amino]propyl]amino] -3-oxopropoxy]methyl]-1,12,19,25-tetraoxo-16-oxa-13,20,24-t riazanonacos-1-yl]-4-hydroxy-2-pyrrolidinyl)methyl ester
cattccttccaaatttccaaa

SEQ ID NO: 716 - RNA, 21 nt, synthetic construct
  source 1..21: mol_type = other RNA
  modified_base 1: mod_base = OTHER; note = 2'-O-methyluridine-3'-phosphorothioate
  modified_base 2: mod_base = OTHER; note = 2'-O-methylcytidine-3'-phosphorothioate
  modified_base 3: mod_base = OTHER; note = 2'-O-methylcytidine-3'-phosphate
  modified_base 4: mod_base = OTHER; note = 2'-O-methyluridine-3'-phosphate
  modified_base 5: mod_base = OTHER; note = 2'-O-methyluridine-3'-phosphate
  modified_base 6: mod_base = OTHER; note = 2'-O-methylcytidine-3'-phosphate
  modified_base 7: mod_base = OTHER; note = 2'-deoxy-2'-fluorocytidine-3'-phosphate
  modified_base 8: mod_base = OTHER; note = 2'-O-methyladenosine-3'-phosphate
  modified_base 9: mod_base = OTHER; note = 2'-deoxy-2'-fluoroadenosine-3'-phosphate
  modified_base 10: mod_base = OTHER; note = 2'-deoxy-2'-fluoroadenosine-3'-phosphate
  modified_base 11: mod_base = OTHER; note = 2'-deoxy-2'-fluorouridine-3'-phosphate
  modified_base 12: mod_base = OTHER; note = 2'-O-methyluridine-3'-phosphate
  modified_base 13: mod_base = OTHER; note = 2'-O-methyluridine-3'-phosphate
  modified_base 14: mod_base = OTHER; note = 2'-O-methylcytidine-3'-phosphate
  modified_base 15: mod_base = OTHER; note = 2'-O-methylcytidine-3'-phosphate
  modified_base 16: mod_base = OTHER; note = 2'-O-methyladenosine-3'-phosphate
  modified_base 17: mod_base = OTHER; note = 2'-O-methyladenosine-3'-phosphate
  modified_base 18: mod_base = OTHER; note = 2'-O-methyladenosine-3'-phosphate
  modified_base 19: mod_base = OTHER; note = 2'-O-methylcytidine-3'-phosphate
  modified_base 20: mod_base = OTHER; note = 2'-O-methyladenosine-3'-phosphate
  modified_base 21: mod_base = OTHER; note = 2'-O-methyladenosine-3'-phosphate ((2S,4R)-1-[29-[[2-(acetylamino)-2-deoxy-beta-D-galactopyra nosyl]oxy]-14,14-bis[[3-[[3-[[5-[[2-(acetylamino)-2-deoxy-b eta-D-galactopyranosyl]oxy]-1-oxopentyl]amino]propyl]amino] -3-oxopropoxy]methyl]-1,12,19,25-tetraoxo-16-oxa-13,20,24-t riazanonacos-1-yl]-4-hydroxy-2-pyrrolidinyl)methyl ester
tccttccaaatttccaaacaa

SEQ ID NO: 717 - RNA, 21 nt, synthetic construct
  source 1..21: mol_type = other RNA
  modified_base 1: mod_base = OTHER; note = 2'-O-methyluridine-3'-phosphorothioate
  modified_base 2: mod_base = OTHER; note = 2'-O-methylcytidine-3'-phosphorothioate
  modified_base 3: mod_base = OTHER; note = 2'-O-methylcytidine-3'-phosphate
  modified_base 4: mod_base = OTHER; note = 2'-O-methyluridine-3'-phosphate
  modified_base 5: mod_base = OTHER; note = 2'-O-methyluridine-3'-phosphate
  modified_base 6: mod_base = OTHER; note = 2'-O-methylcytidine-3'-phosphate
  modified_base 7: mod_base = OTHER; note = 2'-deoxy-2'-fluorocytidine-3'-phosphate
  modified_base 8: mod_base = OTHER; note = 2'-O-methyladenosine-3'-phosphate
  modified_base 9: mod_base = OTHER; note = 2'-deoxy-2'-fluoroadenosine-3'-phosphate
  modified_base 10: mod_base = OTHER; note = 2'-deoxy-2'-fluoroadenosine-3'-phosphate
  modified_base 11: mod_base = OTHER; note = 2'-deoxy-2'-fluorouridine-3'-phosphate
  modified_base 12: mod_base = OTHER; note = 2'-O-methyluridine-3'-phosphate
  modified_base 13: mod_base = OTHER; note = 2'-O-methyluridine-3'-phosphate
  modified_base 14: mod_base = OTHER; note = 2'-O-methylcytidine-3'-phosphate
  modified_base 15: mod_base = OTHER; note = 2'-O-methyluridine-3'-phosphate
  modified_base 16: mod_base = OTHER; note = 2'-O-methyladenosine-3'-phosphate
  modified_base 17: mod_base = OTHER; note = 2'-O-methyladenosine-3'-phosphate
  modified_base 18: mod_base = OTHER; note = 2'-O-methyladenosine-3'-phosphate
  modified_base 19: mod_base = OTHER; note = 2'-O-methylcytidine-3'-phosphate
  modified_base 20: mod_base = OTHER; note = 2'-O-methyladenosine-3'-phosphate
  modified_base 21: mod_base = OTHER; note = 2'-O-methyladenosine-3'-phosphate ((2S,4R)-1-[29-[[2-(acetylamino)-2-deoxy-beta-D-galactopyra nosyl]oxy]-14,14-bis[[3-[[3-[[5-[[2-(acetylamino)-2-deoxy-b eta-D-galactopyranosyl]oxy]-1-oxopentyl]amino]propyl]amino] -3-oxopropoxy]methyl]-1,12,19,25-tetraoxo-16-oxa-13,20,24-t riazanonacos-1-yl]-4-hydroxy-2-pyrrolidinyl)methyl ester
tccttccaaatttctaaacaa

SEQ ID NO: 718 - RNA, 21 nt, synthetic construct
  source 1..21: mol_type = other RNA
  modified_base 1: mod_base = OTHER; note = 2'-O-methylcytidine-3'-phosphorothioate
  modified_base 2: mod_base = OTHER; note = 2'-O-methylcytidine-3'-phosphorothioate
  modified_base 3: mod_base = OTHER; note = 2'-O-methyluridine-3'-phosphate
  modified_base 4: mod_base = OTHER; note = 2'-O-methyluridine-3'-phosphate
  modified_base 5: mod_base = OTHER; note = 2'-O-methylcytidine-3'-phosphate
  modified_base 6: mod_base = OTHER; note = 2'-O-methylcytidine-3'-phosphate
  modified_base 7: mod_base = OTHER; note = 2'-deoxy-2'-fluoroadenosine-3'-phosphate
  modified_base 8: mod_base = OTHER; note = 2'-O-methyladenosine-3'-phosphate
  modified_base 9: mod_base = OTHER; note = 2'-deoxy-2'-fluoroadenosine-3'-phosphate
  modified_base 10: mod_base = OTHER; note = 2'-deoxy-2'-fluorouridine-3'-phosphate
  modified_base 11: mod_base = OTHER; note = 2'-deoxy-2'-fluorouridine-3'-phosphate
  modified_base 12: mod_base = OTHER; note = 2'-O-methyluridine-3'-phosphate
  modified_base 13: mod_base = OTHER; note = 2'-O-methylcytidine-3'-phosphate
  modified_base 14: mod_base = OTHER; note = 2'-O-methylcytidine-3'-phosphate
  modified_base 15: mod_base = OTHER; note = 2'-O-methyladenosine-3'-phosphate
  modified_base 16: mod_base = OTHER; note = 2'-O-methyladenosine-3'-phosphate
  modified_base 17: mod_base = OTHER; note = 2'-O-methyladenosine-3'-phosphate
  modified_base 18: mod_base = OTHER; note = 2'-O-methylcytidine-3'-phosphate
  modified_base 19: mod_base = OTHER; note = 2'-O-methyladenosine-3'-phosphate
  modified_base 20: mod_base = OTHER; note = 2'-O-methyladenosine-3'-phosphate
  modified_base 21: mod_base = OTHER; note = 2'-O-methyladenosine-3'-phosphate ((2S,4R)-1-[29-[[2-(acetylamino)-2-deoxy-beta-D-galactopyra nosyl]oxy]-14,14-bis[[3-[[3-[[5-[[2-(acetylamino)-2-deoxy-b eta-D-galactopyranosyl]oxy]-1-oxopentyl]amino]propyl]amino] -3-oxopropoxy]methyl]-1,12,19,25-tetraoxo-16-oxa-13,20,24-t riazanonacos-1-yl]-4-hydroxy-2-pyrrolidinyl)methyl ester
ccttccaaatttccaaacaaa

SEQ ID NO: 719 - RNA, 21 nt, synthetic construct
  source 1..21: mol_type = other RNA
  modified_base 1: mod_base = OTHER; note = 2'-O-methylcytidine-3'-phosphorothioate
  modified_base 2: mod_base = OTHER; note = 2'-O-methylcytidine-3'-phosphorothioate
  modified_base 3: mod_base = OTHER; note = 2'-O-methyluridine-3'-phosphate
  modified_base 4: mod_base = OTHER; note = 2'-O-methyluridine-3'-phosphate
  modified_base 5: mod_base = OTHER; note = 2'-O-methylcytidine-3'-phosphate
  modified_base 6: mod_base = OTHER; note = 2'-O-methylcytidine-3'-phosphate
  modified_base 7: mod_base = OTHER; note = 2'-deoxy-2'-fluoroadenosine-3'-phosphate
  modified_base 8: mod_base = OTHER; note = 2'-O-methyladenosine-3'-phosphate
  modified_base 9: mod_base = OTHER; note = 2'-deoxy-2'-fluoroadenosine-3'-phosphate
  modified_base 10: mod_base = OTHER; note = 2'-deoxy-2'-fluorouridine-3'-phosphate
  modified_base 11: mod_base = OTHER; note = 2'-deoxy-2'-fluorouridine-3'-phosphate
  modified_base 12: mod_base = OTHER; note = 2'-O-methyluridine-3'-phosphate
  modified_base 13: mod_base = OTHER; note = 2'-O-methylcytidine-3'-phosphate
  modified_base 14: mod_base = OTHER; note = 2'-O-methylcytidine-3'-phosphate
  modified_base 15: mod_base = OTHER; note = 2'-O-methyluridine-3'-phosphate
  modified_base 16: mod_base = OTHER; note = 2'-O-methyladenosine-3'-phosphate
  modified_base 17: mod_base = OTHER; note = 2'-O-methyladenosine-3'-phosphate
  modified_base 18: mod_base = OTHER; note = 2'-O-methylcytidine-3'-phosphate
  modified_base 19: mod_base = OTHER; note = 2'-O-methyladenosine-3'-phosphate
  modified_base 20: mod_base = OTHER; note = 2'-O-methyladenosine-3'-phosphate
  modified_base 21: mod_base = OTHER; note = 2'-O-methyladenosine-3'-phosphate ((2S,4R)-1-[29-[[2-(acetylamino)-2-deoxy-beta-D-galactopyra nosyl]oxy]-14,14-bis[[3-[[3-[[5-[[2-(acetylamino)-2-deoxy-b eta-D-galactopyranosyl]oxy]-1-oxopentyl]amino]propyl]amino] -3-oxopropoxy]methyl]-1,12,19,25-tetraoxo-16-oxa-13,20,24-t riazanonacos-1-yl]-4-hydroxy-2-pyrrolidinyl)methyl ester
ccttccaaatttcctaacaaa

SEQ ID NO: 720 - RNA, 21 nt, synthetic construct
  source 1..21: mol_type = other RNA
  modified_base 1: mod_base = OTHER; note = 2'-O-methylcytidine-3'-phosphorothioate
  modified_base 2: mod_base = OTHER; note = 2'-O-methyluridine-3'-phosphorothioate
  modified_base 3: mod_base = OTHER; note = 2'-O-methyluridine-3'-phosphate
  modified_base 4: mod_base = OTHER; note = 2'-O-methylcytidine-3'-phosphate
  modified_base 5: mod_base = OTHER; note = 2'-O-methylcytidine-3'-phosphate
  modified_base 6: mod_base = OTHER; note = 2'-O-methyladenosine-3'-phosphate
  modified_base 7: mod_base = OTHER; note = 2'-deoxy-2'-fluoroadenosine-3'-phosphate
  modified_base 8: mod_base = OTHER; note = 2'-O-methyladenosine-3'-phosphate
  modified_base 9: mod_base = OTHER; note = 2'-deoxy-2'-fluorouridine-3'-phosphate
  modified_base 10: mod_base = OTHER; note = 2'-deoxy-2'-fluorouridine-3'-phosphate
  modified_base 11: mod_base = OTHER; note = 2'-deoxy-2'-fluorouridine-3'-phosphate
  modified_base 12: mod_base = OTHER; note = 2'-O-methylcytidine-3'-phosphate
  modified_base 13: mod_base = OTHER; note = 2'-O-methylcytidine-3'-phosphate
  modified_base 14: mod_base = OTHER; note = 2'-O-methyladenosine-3'-phosphate
  modified_base 15: mod_base = OTHER; note = 2'-O-methyladenosine-3'-phosphate
  modified_base 16: mod_base = OTHER; note = 2'-O-methyladenosine-3'-phosphate
  modified_base 17: mod_base = OTHER; note = 2'-O-methylcytidine-3'-phosphate
  modified_base 18: mod_base = OTHER; note = 2'-O-methyladenosine-3'-phosphate
  modified_base 19: mod_base = OTHER; note = 2'-O-methyladenosine-3'-phosphate
  modified_base 20: mod_base = OTHER; note = 2'-O-methylguanosine-3'-phosphate
  modified_base 21: mod_base = OTHER; note = 2'-O-methyladenosine-3'-phosphate ((2S,4R)-1-[29-[[2-(acetylamino)-2-deoxy-beta-D-galactopyra nosyl]oxy]-14,14-bis[[3-[[3-[[5-[[2-(acetylamino)-2-deoxy-b eta-D-galactopyranosyl]oxy]-1-oxopentyl]amino]propyl]amino] -3-oxopropoxy]methyl]-1,12,19,25-tetraoxo-16-oxa-13,20,24-t riazanonacos-1-yl]-4-hydroxy-2-pyrrolidinyl)methyl ester
cttccaaatttccaaacaaga

SEQ ID NO: 721 - RNA, 21 nt, synthetic construct
  source 1..21: mol_type = other RNA
  modified_base 1: mod_base = OTHER; note = 2'-O-methyluridine-3'-phosphorothioate
  modified_base 2: mod_base = OTHER; note = 2'-O-methyluridine-3'-phosphorothioate
  modified_base 3: mod_base = OTHER; note = 2'-O-methylcytidine-3'-phosphate
  modified_base 4: mod_base = OTHER; note = 2'-O-methylcytidine-3'-phosphate
  modified_base 5: mod_base = OTHER; note = 2'-O-methyladenosine-3'-phosphate
  modified_base 6: mod_base = OTHER; note = 2'-O-methyladenosine-3'-phosphate
  modified_base 7: mod_base = OTHER; note = 2'-deoxy-2'-fluoroadenosine-3'-phosphate
  modified_base 8: mod_base = OTHER; note = 2'-O-methyluridine-3'-phosphate
  modified_base 9: mod_base = OTHER; note = 2'-deoxy-2'-fluorouridine-3'-phosphate
  modified_base 10: mod_base = OTHER; note = 2'-deoxy-2'-fluorouridine-3'-phosphate
  modified_base 11: mod_base = OTHER; note = 2'-deoxy-2'-fluorocytidine-3'-phosphate
  modified_base 12: mod_base = OTHER; note = 2'-O-methylcytidine-3'-phosphate
  modified_base 13: mod_base = OTHER; note = 2'-O-methyladenosine-3'-phosphate
  modified_base 14: mod_base = OTHER; note = 2'-O-methyladenosine-3'-phosphate
  modified_base 15: mod_base = OTHER; note = 2'-O-methyladenosine-3'-phosphate
  modified_base 16: mod_base = OTHER; note = 2'-O-methylcytidine-3'-phosphate
  modified_base 17: mod_base = OTHER; note = 2'-O-methyladenosine-3'-phosphate
  modified_base 18: mod_base = OTHER; note = 2'-O-methyladenosine-3'-phosphate
  modified_base 19: mod_base = OTHER; note = 2'-O-methylguanosine-3'-phosphate
  modified_base 20: mod_base = OTHER; note = 2'-O-methyladenosine-3'-phosphate
  modified_base 21: mod_base = OTHER; note = 2'-O-methyladenosine-3'-phosphate ((2S,4R)-1-[29-[[2-(acetylamino)-2-deoxy-beta-D-galactopyra nosyl]oxy]-14,14-bis[[3-[[3-[[5-[[2-(acetylamino)-2-deoxy-b eta-D-galactopyranosyl]oxy]-1-oxopentyl]amino]propyl]amino] -3-oxopropoxy]methyl]-1,12,19,25-tetraoxo-16-oxa-13,20,24-t riazanonacos-1-yl]-4-hydroxy-2-pyrrolidinyl)methyl ester
ttccaaatttccaaacaagaa

SEQ ID NO: 722 - RNA, 21 nt, synthetic construct
  source 1..21: mol_type = other RNA
  modified_base 1: mod_base = OTHER; note = 2'-O-methyluridine-3'-phosphorothioate
  modified_base 2: mod_base = OTHER; note = 2'-O-methyluridine-3'-phosphorothioate
  modified_base 3: mod_base = OTHER; note = 2'-O-methylcytidine-3'-phosphate
  modified_base 4: mod_base = OTHER; note = 2'-O-methylcytidine-3'-phosphate
  modified_base 5: mod_base = OTHER; note = 2'-O-methyladenosine-3'-phosphate
  modified_base 6: mod_base = OTHER; note = 2'-O-methyladenosine-3'-phosphate
  modified_base 7: mod_base = OTHER; note = 2'-deoxy-2'-fluoroadenosine-3'-phosphate
  modified_base 8: mod_base = OTHER; note = 2'-O-methyluridine-3'-phosphate
  modified_base 9: mod_base = OTHER; note = 2'-deoxy-2'-fluorouridine-3'-phosphate
  modified_base 10: mod_base = OTHER; note = 2'-deoxy-2'-fluorouridine-3'-phosphate
  modified_base 11: mod_base = OTHER; note = 2'-deoxy-2'-fluorocytidine-3'-phosphate
  modified_base 12: mod_base = OTHER; note = 2'-O-methylcytidine-3'-phosphate
  modified_base 13: mod_base = OTHER; note = 2'-O-methyladenosine-3'-phosphate
  modified_base 14: mod_base = OTHER; note = 2'-O-methyladenosine-3'-phosphate
  modified_base 15: mod_base = OTHER; note = 2'-O-methyluridine-3'-phosphate
  modified_base 16: mod_base = OTHER; note = 2'-O-methylcytidine-3'-phosphate
  modified_base 17: mod_base = OTHER; note = 2'-O-methyladenosine-3'-phosphate
  modified_base 18: mod_base = OTHER; note = 2'-O-methyladenosine-3'-phosphate
  modified_base 19: mod_base = OTHER; note = 2'-O-methylguanosine-3'-phosphate
  modified_base 20: mod_base = OTHER; note = 2'-O-methyladenosine-3'-phosphate
  modified_base 21: mod_base = OTHER; note = 2'-O-methyladenosine-3'-phosphate ((2S,4R)-1-[29-[[2-(acetylamino)-2-deoxy-beta-D-galactopyra nosyl]oxy]-14,14-bis[[3-[[3-[[5-[[2-(acetylamino)-2-deoxy-b eta-D-galactopyranosyl]oxy]-1-oxopentyl]amino]propyl]amino] -3-oxopropoxy]methyl]-1,12,19,25-tetraoxo-16-oxa-13,20,24-t riazanonacos-1-yl]-4-hydroxy-2-pyrrolidinyl)methyl ester
ttccaaatttccaatcaagaa

SEQ ID NO: 723 - RNA, 21 nt, synthetic construct
  source 1..21: mol_type = other RNA
  modified_base 1: mod_base = OTHER; note = 2'-O-methylcytidine-3'-phosphorothioate
  modified_base 2: mod_base = OTHER; note = 2'-O-methylcytidine-3'-phosphorothioate
  modified_base 3: mod_base = OTHER; note = 2'-O-methyladenosine-3'-phosphate
  modified_base 4: mod_base = OTHER; note = 2'-O-methyladenosine-3'-phosphate
  modified_base 5: mod_base = OTHER; note = 2'-O-methyladenosine-3'-phosphate
  modified_base 6: mod_base = OTHER; note = 2'-O-methyluridine-3'-phosphate
  modified_base 7: mod_base = OTHER; note = 2'-deoxy-2'-fluorouridine-3'-phosphate
  modified_base 8: mod_base = OTHER; note = 2'-O-methyluridine-3'-phosphate
  modified_base 9: mod_base = OTHER; note = 2'-deoxy-2'-fluorocytidine-3'-phosphate
  modified_base 10: mod_base = OTHER; note = 2'-deoxy-2'-fluorocytidine-3'-phosphate
  modified_base 11: mod_base = OTHER; note = 2'-deoxy-2'-fluoroadenosine-3'-phosphate
  modified_base 12: mod_base = OTHER; note = 2'-O-methyladenosine-3'-phosphate
  modified_base 13: mod_base = OTHER; note = 2'-O-methyladenosine-3'-phosphate
  modified_base 14: mod_base = OTHER; note = 2'-O-methylcytidine-3'-phosphate
  modified_base 15: mod_base = OTHER; note = 2'-O-methyladenosine-3'-phosphate
  modified_base 16: mod_base = OTHER; note = 2'-O-methyladenosine-3'-phosphate
  modified_base 17: mod_base = OTHER; note = 2'-O-methylguanosine-3'-phosphate
  modified_base 18: mod_base = OTHER; note = 2'-O-methyladenosine-3'-phosphate
  modified_base 19: mod_base = OTHER; note = 2'-O-methyladenosine-3'-phosphate
  modified_base 20: mod_base = OTHER; note = 2'-O-methylcytidine-3'-phosphate
  modified_base 21: mod_base = OTHER; note = 2'-O-methyladenosine-3'-phosphate ((2S,4R)-1-[29-[[2-(acetylamino)-2-deoxy-beta-D-galactopyra nosyl]oxy]-14,14-bis[[3-[[3-[[5-[[2-(acetylamino)-2-deoxy-b eta-D-galactopyranosyl]oxy]-1-oxopentyl]amino]propyl]amino] -3-oxopropoxy]methyl]-1,12,19,25-tetraoxo-16-oxa-13,20,24-t riazanonacos-1-yl]-4-hydroxy-2-pyrrolidinyl)methyl ester
ccaaatttccaaacaagaaca

SEQ ID NO: 724 - RNA, 21 nt, synthetic construct
  source 1..21: mol_type = other RNA
  modified_base 1: mod_base = OTHER; note = 2'-O-methylcytidine-3'-phosphorothioate
  modified_base 2: mod_base = OTHER; note = 2'-O-methylcytidine-3'-phosphorothioate
  modified_base 3: mod_base = OTHER; note = 2'-O-methyladenosine-3'-phosphate
  modified_base 4: mod_base = OTHER; note = 2'-O-methyladenosine-3'-phosphate
  modified_base 5: mod_base = OTHER; note = 2'-O-methyladenosine-3'-phosphate
  modified_base 6: mod_base = OTHER; note = 2'-O-methyluridine-3'-phosphate
  modified_base 7: mod_base = OTHER; note = 2'-deoxy-2'-fluorouridine-3'-phosphate
  modified_base 8: mod_base = OTHER; note = 2'-O-methyluridine-3'-phosphate
  modified_base 9: mod_base = OTHER; note = 2'-deoxy-2'-fluorocytidine-3'-phosphate
  modified_base 10: mod_base = OTHER; note = 2'-deoxy-2'-fluorocytidine-3'-phosphate
  modified_base 11: mod_base = OTHER; note = 2'-deoxy-2'-fluoroadenosine-3'-phosphate
  modified_base 12: mod_base = OTHER; note = 2'-O-methyladenosine-3'-phosphate
  modified_base 13: mod_base = OTHER; note = 2'-O-methyladenosine-3'-phosphate
  modified_base 14: mod_base = OTHER; note = 2'-O-methylcytidine-3'-phosphate
  modified_base 15: mod_base = OTHER; note = 2'-O-methyluridine-3'-phosphate
  modified_base 16: mod_base = OTHER; note = 2'-O-methyladenosine-3'-phosphate
  modified_base 17: mod_base = OTHER; note = 2'-O-methylguanosine-3'-phosphate
  modified_base 18: mod_base = OTHER; note = 2'-O-methyladenosine-3'-phosphate
  modified_base 19: mod_base = OTHER; note = 2'-O-methyladenosine-3'-phosphate
  modified_base 20: mod_base = OTHER; note = 2'-O-methylcytidine-3'-phosphate
  modified_base 21: mod_base = OTHER; note = 2'-O-methyladenosine-3'-phosphate ((2S,4R)-1-[29-[[2-(acetylamino)-2-deoxy-beta-D-galactopyra nosyl]oxy]-14,14-bis[[3-[[3-[[5-[[2-(acetylamino)-2-deoxy-b eta-D-galactopyranosyl]oxy]-1-oxopentyl]amino]propyl]amino] -3-oxopropoxy]methyl]-1,12,19,25-tetraoxo-16-oxa-13,20,24-t riazanonacos-1-yl]-4-hydroxy-2-pyrrolidinyl)methyl ester
ccaaatttccaaactagaaca

SEQ ID NO: 725 - RNA, 21 nt, synthetic construct
  source 1..21: mol_type = other RNA
  modified_base 1: mod_base = OTHER; note = 2'-O-methylcytidine-3'-phosphorothioate
  modified_base 2: mod_base = OTHER; note = 2'-O-methyladenosine-3'-phosphorothioate
  modified_base 3: mod_base = OTHER; note = 2'-O-methyladenosine-3'-phosphate
  modified_base 4: mod_base = OTHER; note = 2'-O-methyladenosine-3'-phosphate
  modified_base 5: mod_base = OTHER; note = 2'-O-methylcytidine-3'-phosphate
  modified_base 6: mod_base = OTHER; note = 2'-O-methyladenosine-3'-phosphate
  modified_base 7: mod_base = OTHER; note = 2'-deoxy-2'-fluoroadenosine-3'-phosphate
  modified_base 8: mod_base = OTHER; note = 2'-O-methylguanosine-3'-phosphate
  modified_base 9: mod_base = OTHER; note = 2'-deoxy-2'-fluoroadenosine-3'-phosphate
  modified_base 10: mod_base = OTHER; note = 2'-deoxy-2'-fluoroadenosine-3'-phosphate
  modified_base 11: mod_base = OTHER; note = 2'-deoxy-2'-fluorocytidine-3'-phosphate
  modified_base 12: mod_base = OTHER; note = 2'-O-methylcytidine-3'-phosphate
  modified_base 13: mod_base = OTHER; note = 2'-O-methyluridine-3'-phosphate
  modified_base 14: mod_base = OTHER; note = 2'-O-methylguanosine-3'-phosphate
  modified_base 15: mod_base = OTHER; note = 2'-O-methyladenosine-3'-phosphate
  modified_base 16: mod_base = OTHER; note = 2'-O-methyladenosine-3'-phosphate
  modified_base 17: mod_base = OTHER; note = 2'-O-methylguanosine-3'-phosphate
  modified_base 18: mod_base = OTHER; note = 2'-O-methyladenosine-3'-phosphate
  modified_base 19: mod_base = OTHER; note = 2'-O-methyladenosine-3'-phosphate
  modified_base 20: mod_base = OTHER; note = 2'-O-methylguanosine-3'-phosphate
  modified_base 21: mod_base = OTHER; note = 2'-O-methyladenosine-3'-phosphate ((2S,4R)-1-[29-[[2-(acetylamino)-2-deoxy-beta-D-galactopyra nosyl]oxy]-14,14-bis[[3-[[3-[[5-[[2-(acetylamino)-2-deoxy-b eta-D-galactopyranosyl]oxy]-1-oxopentyl]amino]propyl]amino] -3-oxopropoxy]methyl]-1,12,19,25-tetraoxo-16-oxa-13,20,24-t riazanonacos-1-yl]-4-hydroxy-2-pyrrolidinyl)methyl ester
caaacaagaacctgaagaaga

SEQ ID NO: 726 - RNA, 21 nt, synthetic construct
  source 1..21: mol_type = other RNA
  modified_base 1: mod_base = OTHER; note = 2'-O-methyladenosine-3'-phosphorothioate
  modified_base 2: mod_base = OTHER; note = 2'-O-methyladenosine-3'-phosphorothioate
  modified_base 3: mod_base = OTHER; note = 2'-O-methyladenosine-3'-phosphate
  modified_base 4: mod_base = OTHER; note = 2'-O-methylcytidine-3'-phosphate
  modified_base 5: mod_base = OTHER; note = 2'-O-methyladenosine-3'-phosphate
  modified_base 6: mod_base = OTHER; note = 2'-O-methyladenosine-3'-phosphate
  modified_base 7: mod_base = OTHER; note = 2'-deoxy-2'-fluoroguanosine-3'-phosphate
  modified_base 8: mod_base = OTHER; note = 2'-O-methyladenosine-3'-phosphate
  modified_base 9: mod_base = OTHER; note = 2'-deoxy-2'-fluoroadenosine-3'-phosphate
  modified_base 10: mod_base = OTHER; note = 2'-deoxy-2'-fluorocytidine-3'-phosphate
  modified_base 11: mod_base = OTHER; note = 2'-deoxy-2'-fluorocytidine-3'-phosphate
  modified_base 12: mod_base = OTHER; note = 2'-O-methyluridine-3'-phosphate
  modified_base 13: mod_base = OTHER; note = 2'-O-methylguanosine-3'-phosphate
  modified_base 14: mod_base = OTHER; note = 2'-O-methyladenosine-3'-phosphate
  modified_base 15: mod_base = OTHER; note = 2'-O-methyladenosine-3'-phosphate
  modified_base 16: mod_base = OTHER; note = 2'-O-methylguanosine-3'-phosphate
  modified_base 17: mod_base = OTHER; note = 2'-O-methyladenosine-3'-phosphate
  modified_base 18: mod_base = OTHER; note = 2'-O-methyladenosine-3'-phosphate
  modified_base 19: mod_base = OTHER; note = 2'-O-methylguanosine-3'-phosphate
  modified_base 20: mod_base = OTHER; note = 2'-O-methyladenosine-3'-phosphate
  modified_base 21: mod_base = OTHER; note = 2'-O-methyladenosine-3'-phosphate ((2S,4R)-1-[29-[[2-(acetylamino)-2-deoxy-beta-D-galactopyra nosyl]oxy]-14,14-bis[[3-[[3-[[5-[[2-(acetylamino)-2-deoxy-b eta-D-galactopyranosyl]oxy]-1-oxopentyl]amino]propyl]amino] -3-oxopropoxy]methyl]-1,12,19,25-tetraoxo-16-oxa-13,20,24-t riazanonacos-1-yl]-4-hydroxy-2-pyrrolidinyl)methyl ester
aaacaagaacctgaagaagaa

SEQ ID NO: 727 - RNA, 21 nt, synthetic construct
  source 1..21: mol_type = other RNA
  modified_base 1: mod_base = OTHER; note = 2'-O-methyladenosine-3'-phosphorothioate
  modified_base 2: mod_base = OTHER; note = 2'-O-methyladenosine-3'-phosphorothioate
  modified_base 3: mod_base = OTHER; note = 2'-O-methyladenosine-3'-phosphate
  modified_base 4: mod_base = OTHER; note = 2'-O-methylcytidine-3'-phosphate
  modified_base 5: mod_base = OTHER; note = 2'-O-methyladenosine-3'-phosphate
  modified_base 6: mod_base = OTHER; note = 2'-O-methyladenosine-3'-phosphate
  modified_base 7: mod_base = OTHER; note = 2'-deoxy-2'-fluoroguanosine-3'-phosphate
  modified_base 8: mod_base = OTHER; note = 2'-O-methyladenosine-3'-phosphate
  modified_base 9: mod_base = OTHER; note = 2'-deoxy-2'-fluoroadenosine-3'-phosphate
  modified_base 10: mod_base = OTHER; note = 2'-deoxy-2'-fluorocytidine-3'-phosphate
  modified_base 11: mod_base = OTHER; note = 2'-deoxy-2'-fluorocytidine-3'-phosphate
  modified_base 12: mod_base = OTHER; note = 2'-O-methyluridine-3'-phosphate
  modified_base 13: mod_base = OTHER; note = 2'-O-methylguanosine-3'-phosphate
  modified_base 14: mod_base = OTHER; note = 2'-O-methyladenosine-3'-phosphate
  modified_base 15: mod_base = OTHER; note = 2'-O-methyluridine-3'-phosphate
  modified_base 16: mod_base = OTHER; note = 2'-O-methylguanosine-3'-phosphate
  modified_base 17: mod_base = OTHER; note = 2'-O-methyladenosine-3'-phosphate
  modified_base 18: mod_base = OTHER; note = 2'-O-methyladenosine-3'-phosphate
  modified_base 19: mod_base = OTHER; note = 2'-O-methylguanosine-3'-phosphate
  modified_base 20: mod_base = OTHER; note = 2'-O-methyladenosine-3'-phosphate
  modified_base 21: mod_base = OTHER; note = 2'-O-methyladenosine-3'-phosphate ((2S,4R)-1-[29-[[2-(acetylamino)-2-deoxy-beta-D-galactopyra nosyl]oxy]-14,14-bis[[3-[[3-[[5-[[2-(acetylamino)-2-deoxy-b eta-D-galactopyranosyl]oxy]-1-oxopentyl]amino]propyl]amino] -3-oxopropoxy]methyl]-1,12,19,25-tetraoxo-16-oxa-13,20,24-t riazanonacos-1-yl]-4-hydroxy-2-pyrrolidinyl)methyl ester
aaacaagaacctgatgaagaa

SEQ ID NO: 728 - RNA, 21 nt, synthetic construct
  source 1..21: mol_type = other RNA
  modified_base 1: mod_base = OTHER; note = 2'-O-methyladenosine-3'-phosphorothioate
  modified_base 2: mod_base = OTHER; note = 2'-O-methyladenosine-3'-phosphorothioate
  modified_base 3: mod_base = OTHER; note = 2'-O-methylcytidine-3'-phosphate
  modified_base 4: mod_base = OTHER; note = 2'-O-methyladenosine-3'-phosphate
  modified_base 5: mod_base = OTHER; note = 2'-O-methyladenosine-3'-phosphate
  modified_base 6: mod_base = OTHER; note = 2'-O-methylguanosine-3'-phosphate
  modified_base 7: mod_base = OTHER; note = 2'-deoxy-2'-fluoroadenosine-3'-phosphate
  modified_base 8: mod_base = OTHER; note = 2'-O-methyladenosine-3'-phosphate
  modified_base 9: mod_base = OTHER; note = 2'-deoxy-2'-fluorocytidine-3'-phosphate
  modified_base 10: mod_base = OTHER; note = 2'-deoxy-2'-fluorocytidine-3'-phosphate
  modified_base 11: mod_base = OTHER; note = 2'-deoxy-2'-fluorouridine-3'-phosphate
  modified_base 12: mod_base = OTHER; note = 2'-O-methylguanosine-3'-phosphate
  modified_base 13: mod_base = OTHER; note = 2'-O-methyladenosine-3'-phosphate
  modified_base 14: mod_base = OTHER; note = 2'-O-methyladenosine-3'-phosphate
  modified_base 15: mod_base = OTHER; note = 2'-O-methylguanosine-3'-phosphate
  modified_base 16: mod_base = OTHER; note = 2'-O-methyladenosine-3'-phosphate
  modified_base 17: mod_base = OTHER; note = 2'-O-methyladenosine-3'-phosphate
  modified_base 18: mod_base = OTHER; note = 2'-O-methylguanosine-3'-phosphate
  modified_base 19: mod_base = OTHER; note = 2'-O-methyladenosine-3'-phosphate
  modified_base 20: mod_base = OTHER; note = 2'-O-methyladenosine-3'-phosphate
  modified_base 21: mod_base = OTHER; note = 2'-O-methyladenosine-3'-phosphate ((2S,4R)-1-[29-[[2-(acetylamino)-2-deoxy-beta-D-galactopyra nosyl]oxy]-14,14-bis[[3-[[3-[[5-[[2-(acetylamino)-2-deoxy-b eta-D-galactopyranosyl]oxy]-1-oxopentyl]amino]propyl]amino] -3-oxopropoxy]methyl]-1,12,19,25-tetraoxo-16-oxa-13,20,24-t riazanonacos-1-yl]-4-hydroxy-2-pyrrolidinyl)methyl ester
aacaagaacctgaagaagaaa

SEQ ID NO: 729 - RNA, 21 nt, synthetic construct
  source 1..21: mol_type = other RNA
  modified_base 1: mod_base = OTHER; note = 2'-O-methyladenosine-3'-phosphorothioate
  modified_base 2: mod_base = OTHER; note = 2'-O-methyladenosine-3'-phosphorothioate
  modified_base 3: mod_base = OTHER; note = 2'-O-methylcytidine-3'-phosphate
  modified_base 4: mod_base = OTHER; note = 2'-O-methyladenosine-3'-phosphate
  modified_base 5: mod_base = OTHER; note = 2'-O-methyladenosine-3'-phosphate
  modified_base 6: mod_base = OTHER; note = 2'-O-methylguanosine-3'-phosphate
  modified_base 7: mod_base = OTHER; note = 2'-deoxy-2'-fluoroadenosine-3'-phosphate
  modified_base 8: mod_base = OTHER; note = 2'-O-methyladenosine-3'-phosphate
  modified_base 9: mod_base = OTHER; note = 2'-deoxy-2'-fluorocytidine-3'-phosphate
  modified_base 10: mod_base = OTHER; note = 2'-deoxy-2'-fluorocytidine-3'-phosphate
  modified_base 11: mod_base = OTHER; note = 2'-deoxy-2'-fluorouridine-3'-phosphate
  modified_base 12: mod_base = OTHER; note = 2'-O-methylguanosine-3'-phosphate
  modified_base 13: mod_base = OTHER; note = 2'-O-methyladenosine-3'-phosphate
  modified_base 14: mod_base = OTHER; note = 2'-O-methyladenosine-3'-phosphate
  modified_base 15: mod_base = OTHER; note = 2'-O-methyluridine-3'-phosphate
  modified_base 16: mod_base = OTHER; note = 2'-O-methyladenosine-3'-phosphate
  modified_base 17: mod_base = OTHER; note = 2'-O-methyladenosine-3'-phosphate
  modified_base 18: mod_base = OTHER; note = 2'-O-methylguanosine-3'-phosphate
  modified_base 19: mod_base = OTHER; note = 2'-O-methyladenosine-3'-phosphate
  modified_base 20: mod_base = OTHER; note = 2'-O-methyladenosine-3'-phosphate
  modified_base 21: mod_base = OTHER; note = 2'-O-methyladenosine-3'-phosphate ((2S,4R)-1-[29-[[2-(acetylamino)-2-deoxy-beta-D-galactopyra nosyl]oxy]-14,14-bis[[3-[[3-[[5-[[2-(acetylamino)-2-deoxy-b eta-D-galactopyranosyl]oxy]-1-oxopentyl]amino]propyl]amino] -3-oxopropoxy]methyl]-1,12,19,25-tetraoxo-16-oxa-13,20,24-t riazanonacos-1-yl]-4-hydroxy-2-pyrrolidinyl)methyl ester
aacaagaacctgaataagaaa

SEQ ID NO: 730 - RNA, 21 nt, synthetic construct
  source 1..21: mol_type = other RNA
  modified_base 1: mod_base = OTHER; note = 2'-O-methylcytidine-3'-phosphorothioate
  modified_base 2: mod_base = OTHER; note = 2'-O-methyladenosine-3'-phosphorothioate
  modified_base 3: mod_base = OTHER; note = 2'-O-methyladenosine-3'-phosphate
  modified_base 4: mod_base = OTHER; note = 2'-O-methylguanosine-3'-phosphate
  modified_base 5: mod_base = OTHER; note = 2'-O-methyladenosine-3'-phosphate
  modified_base 6: mod_base = OTHER; note = 2'-O-methyladenosine-3'-phosphate
  modified_base 7: mod_base = OTHER; note = 2'-deoxy-2'-fluorocytidine-3'-phosphate
  modified_base 8: mod_base = OTHER; note = 2'-O-methylcytidine-3'-phosphate
  modified_base 9: mod_base = OTHER; note = 2'-deoxy-2'-fluorouridine-3'-phosphate
  modified_base 10: mod_base = OTHER; note = 2'-deoxy-2'-fluoroguanosine-3'-phosphate
  modified_base 11: mod_base = OTHER; note = 2'-deoxy-2'-fluoroadenosine-3'-phosphate
  modified_base 12: mod_base = OTHER; note = 2'-O-methyladenosine-3'-phosphate
  modified_base 13: mod_base = OTHER; note = 2'-O-methylguanosine-3'-phosphate
  modified_base 14: mod_base = OTHER; note = 2'-O-methyladenosine-3'-phosphate
  modified_base 15: mod_base = OTHER; note = 2'-O-methyladenosine-3'-phosphate
  modified_base 16: mod_base = OTHER; note = 2'-O-methylguanosine-3'-phosphate
  modified_base 17: mod_base = OTHER; note = 2'-O-methyladenosine-3'-phosphate
  modified_base 18: mod_base = OTHER; note = 2'-O-methyladenosine-3'-phosphate
  modified_base 19: mod_base = OTHER; note = 2'-O-methyluridine-3'-phosphate
  modified_base 20: mod_base = OTHER; note = 2'-O-methyluridine-3'-phosphate
  modified_base 21: mod_base = OTHER; note = 2'-O-methyladenosine-3'-phosphate ((2S,4R)-1-[29-[[2-(acetylamino)-2-deoxy-beta-D-galactopyra nosyl]oxy]-14,14-bis[[3-[[3-[[5-[[2-(acetylamino)-2-deoxy-b eta-D-galactopyranosyl]oxy]-1-oxopentyl]amino]propyl]amino] -3-oxopropoxy]methyl]-1,12,19,25-tetraoxo-16-oxa-13,20,24-t riazanonacos-1-yl]-4-hydroxy-2-pyrrolidinyl)methyl ester
caagaacctgaagaagaatta

SEQ ID NO: 731 - RNA, 21 nt, synthetic construct
  source 1..21: mol_type = other RNA
  modified_base 1: mod_base = OTHER; note = 2'-O-methylcytidine-3'-phosphorothioate
  modified_base 2: mod_base = OTHER; note = 2'-O-methyladenosine-3'-phosphorothioate
  modified_base 3: mod_base = OTHER; note = 2'-O-methyladenosine-3'-phosphate
  modified_base 4: mod_base = OTHER; note = 2'-O-methylguanosine-3'-phosphate
  modified_base 5: mod_base = OTHER; note = 2'-O-methyladenosine-3'-phosphate
  modified_base 6: mod_base = OTHER; note = 2'-O-methyladenosine-3'-phosphate
  modified_base 7: mod_base = OTHER; note = 2'-deoxy-2'-fluorocytidine-3'-phosphate
  modified_base 8: mod_base = OTHER; note = 2'-O-methylcytidine-3'-phosphate
  modified_base 9: mod_base = OTHER; note = 2'-deoxy-2'-fluorouridine-3'-phosphate
  modified_base 10: mod_base = OTHER; note = 2'-deoxy-2'-fluoroguanosine-3'-phosphate
  modified_base 11: mod_base = OTHER; note = 2'-deoxy-2'-fluoroadenosine-3'-phosphate
  modified_base 12: mod_base = OTHER; note = 2'-O-methyladenosine-3'-phosphate
  modified_base 13: mod_base = OTHER; note = 2'-O-methylguanosine-3'-phosphate
  modified_base 14: mod_base = OTHER; note = 2'-O-methyladenosine-3'-phosphate
  modified_base 15: mod_base = OTHER; note = 2'-O-methyluridine-3'-phosphate
  modified_base 16: mod_base = OTHER; note = 2'-O-methylguanosine-3'-phosphate
  modified_base 17: mod_base = OTHER; note = 2'-O-methyladenosine-3'-phosphate
  modified_base 18: mod_base = OTHER; note = 2'-O-methyladenosine-3'-phosphate
  modified_base 19: mod_base = OTHER; note = 2'-O-methyluridine-3'-phosphate
  modified_base 20: mod_base = OTHER; note = 2'-O-methyluridine-3'-phosphate
  modified_base 21: mod_base = OTHER; note = 2'-O-methyladenosine-3'-phosphate ((2S,4R)-1-[29-[[2-(acetylamino)-2-deoxy-beta-D-galactopyra nosyl]oxy]-14,14-bis[[3-[[3-[[5-[[2-(acetylamino)-2-deoxy-b eta-D-galactopyranosyl]oxy]-1-oxopentyl]amino]propyl]amino] -3-oxopropoxy]methyl]-1,12,19,25-tetraoxo-16-oxa-13,20,24-t riazanonacos-1-yl]-4-hydroxy-2-pyrrolidinyl)methyl ester
caagaacctgaagatgaatta

SEQ ID NO: 732 - RNA, 21 nt, synthetic construct
  source 1..21: mol_type = other RNA
  modified_base 1: mod_base = OTHER; note = 2'-O-methyladenosine-3'-phosphorothioate
  modified_base 2: mod_base = OTHER; note = 2'-O-methylguanosine-3'-phosphorothioate
  modified_base 3: mod_base = OTHER; note = 2'-O-methyladenosine-3'-phosphate
  modified_base 4: mod_base = OTHER; note = 2'-O-methyladenosine-3'-phosphate
  modified_base 5: mod_base = OTHER; note = 2'-O-methylcytidine-3'-phosphate
  modified_base 6: mod_base = OTHER; note = 2'-O-methylcytidine-3'-phosphate
  modified_base 7: mod_base = OTHER; note = 2'-deoxy-2'-fluorouridine-3'-phosphate
  modified_base 8: mod_base = OTHER; note = 2'-O-methylguanosine-3'-phosphate
  modified_base 9: mod_base = OTHER; note = 2'-deoxy-2'-fluoroadenosine-3'-phosphate
  modified_base 10: mod_base = OTHER; note = 2'-deoxy-2'-fluoroadenosine-3'-phosphate
  modified_base 11: mod_base = OTHER; note = 2'-deoxy-2'-fluoroguanosine-3'-phosphate
  modified_base 12: mod_base = OTHER; note = 2'-O-methyladenosine-3'-phosphate
  modified_base 13: mod_base = OTHER; note = 2'-O-methyladenosine-3'-phosphate
  modified_base 14: mod_base = OTHER; note = 2'-O-methylguanosine-3'-phosphate
  modified_base 15: mod_base = OTHER; note = 2'-O-methyladenosine-3'-phosphate
  modified_base 16: mod_base = OTHER; note = 2'-O-methyladenosine-3'-phosphate
  modified_base 17: mod_base = OTHER; note = 2'-O-methyluridine-3'-phosphate
  modified_base 18: mod_base = OTHER; note = 2'-O-methyluridine-3'-phosphate
  modified_base 19: mod_base = OTHER; note = 2'-O-methyladenosine-3'-phosphate
  modified_base 20: mod_base = OTHER; note = 2'-O-methylcytidine-3'-phosphate
  modified_base 21: mod_base = OTHER; note = 2'-O-methyladenosine-3'-phosphate ((2S,4R)-1-[29-[[2-(acetylamino)-2-deoxy-beta-D-galactopyra nosyl]oxy]-14,14-bis[[3-[[3-[[5-[[2-(acetylamino)-2-deoxy-b eta-D-galactopyranosyl]oxy]-1-oxopentyl]amino]propyl]amino] -3-oxopropoxy]methyl]-1,12,19,25-tetraoxo-16-oxa-13,20,24-t riazanonacos-1-yl]-4-hydroxy-2-pyrrolidinyl)methyl ester
agaacctgaagaagaattaca

SEQ ID NO: 733 - RNA, 21 nt, synthetic construct
  source 1..21: mol_type = other RNA
  modified_base 1: mod_base = OTHER; note = 2'-O-methylguanosine-3'-phosphorothioate
  modified_base 2: mod_base = OTHER; note = 2'-O-methyladenosine-3'-phosphorothioate
  modified_base 3: mod_base = OTHER; note = 2'-O-methyladenosine-3'-phosphate
  modified_base 4: mod_base = OTHER; note = 2'-O-methylcytidine-3'-phosphate
  modified_base 5: mod_base = OTHER; note = 2'-O-methylcytidine-3'-phosphate
  modified_base 6: mod_base = OTHER; note = 2'-O-methyluridine-3'-phosphate
  modified_base 7: mod_base = OTHER; note = 2'-deoxy-2'-fluoroguanosine-3'-phosphate
  modified_base 8: mod_base = OTHER; note = 2'-O-methyladenosine-3'-phosphate
  modified_base 9: mod_base = OTHER; note = 2'-deoxy-2'-fluoroadenosine-3'-phosphate
  modified_base 10: mod_base = OTHER; note = 2'-deoxy-2'-fluoroguanosine-3'-phosphate
  modified_base 11: mod_base = OTHER; note = 2'-deoxy-2'-fluoroadenosine-3'-phosphate
  modified_base 12: mod_base = OTHER; note = 2'-O-methyladenosine-3'-phosphate
  modified_base 13: mod_base = OTHER; note = 2'-O-methylguanosine-3'-phosphate
  modified_base 14: mod_base = OTHER; note = 2'-O-methyladenosine-3'-phosphate
  modified_base 15: mod_base = OTHER; note = 2'-O-methyladenosine-3'-phosphate
  modified_base 16: mod_base = OTHER; note = 2'-O-methyluridine-3'-phosphate
  modified_base 17: mod_base = OTHER; note = 2'-O-methyluridine-3'-phosphate
  modified_base 18: mod_base = OTHER; note = 2'-O-methyladenosine-3'-phosphate
  modified_base 19: mod_base = OTHER; note = 2'-O-methylcytidine-3'-phosphate
  modified_base 20: mod_base = OTHER; note = 2'-O-methyluridine-3'-phosphate
  modified_base 21: mod_base = OTHER; note = 2'-O-methyladenosine-3'-phosphate ((2S,4R)-1-[29-[[2-(acetylamino)-2-deoxy-beta-D-galactopyra nosyl]oxy]-14,14-bis[[3-[[3-[[5-[[2-(acetylamino)-2-deoxy-b eta-D-galactopyranosyl]oxy]-1-oxopentyl]amino]propyl]amino] -3-oxopropoxy]methyl]-1,12,19,25-tetraoxo-16-oxa-13,20,24-t riazanonacos-1-yl]-4-hydroxy-2-pyrrolidinyl)methyl ester
gaacctgaagaagaattacta

SEQ ID NO: 734 - RNA, 21 nt, synthetic construct
  source 1..21: mol_type = other RNA
  modified_base 1: mod_base = OTHER; note = 2'-O-methyladenosine-3'-phosphorothioate
  modified_base 2: mod_base = OTHER; note = 2'-O-methyladenosine-3'-phosphorothioate
  modified_base 3: mod_base = OTHER; note = 2'-O-methylcytidine-3'-phosphate
  modified_base 4: mod_base = OTHER; note = 2'-O-methylcytidine-3'-phosphate
  modified_base 5: mod_base = OTHER; note = 2'-O-methyluridine-3'-phosphate
  modified_base 6: mod_base = OTHER; note = 2'-O-methylguanosine-3'-phosphate
  modified_base 7: mod_base = OTHER; note = 2'-deoxy-2'-fluoroadenosine-3'-phosphate
  modified_base 8: mod_base = OTHER; note = 2'-O-methyladenosine-3'-phosphate
  modified_base 9: mod_base = OTHER; note = 2'-deoxy-2'-fluoroguanosine-3'-phosphate
  modified_base 10: mod_base = OTHER; note = 2'-deoxy-2'-fluoroadenosine-3'-phosphate
  modified_base 11: mod_base = OTHER; note = 2'-deoxy-2'-fluoroadenosine-3'-phosphate
  modified_base 12: mod_base = OTHER; note = 2'-O-methylguanosine-3'-phosphate
  modified_base 13: mod_base = OTHER; note = 2'-O-methyladenosine-3'-phosphate
  modified_base 14: mod_base = OTHER; note = 2'-O-methyladenosine-3'-phosphate
  modified_base 15: mod_base = OTHER; note = 2'-O-methyluridine-3'-phosphate
  modified_base 16: mod_base = OTHER; note = 2'-O-methyluridine-3'-phosphate
  modified_base 17: mod_base = OTHER; note = 2'-O-methyladenosine-3'-phosphate
  modified_base 18: mod_base = OTHER; note = 2'-O-methylcytidine-3'-phosphate
  modified_base 19: mod_base = OTHER; note = 2'-O-methyluridine-3'-phosphate
  modified_base 20: mod_base = OTHER; note = 2'-O-methylguanosine-3'-phosphate
  modified_base 21: mod_base = OTHER; note = 2'-O-methyladenosine-3'-phosphate ((2S,4R)-1-[29-[[2-(acetylamino)-2-deoxy-beta-D-galactopyra nosyl]oxy]-14,14-bis[[3-[[3-[[5-[[2-(acetylamino)-2-deoxy-b eta-D-galactopyranosyl]oxy]-1-oxopentyl]amino]propyl]amino] -3-oxopropoxy]methyl]-1,12,19,25-tetraoxo-16-oxa-13,20,24-t riazanonacos-1-yl]-4-hydroxy-2-pyrrolidinyl)methyl ester
aacctgaagaagaattactga

SEQ ID NO: 735 - RNA, 21 nt, synthetic construct
  source 1..21: mol_type = other RNA
  modified_base 1: mod_base = OTHER; note = 2'-O-methylcytidine-3'-phosphorothioate
  modified_base 2: mod_base = OTHER; note = 2'-O-methyladenosine-3'-phosphorothioate
  modified_base 3: mod_base = OTHER; note = 2'-O-methylcytidine-3'-phosphate
  modified_base 4: mod_base = OTHER; note = 2'-O-methylcytidine-3'-phosphate
  modified_base 5: mod_base = OTHER; note = 2'-O-methyluridine-3'-phosphate
  modified_base 6: mod_base = OTHER; note = 2'-O-methylcytidine-3'-phosphate
  modified_base 7: mod_base = OTHER; note = 2'-deoxy-2'-fluorocytidine-3'-phosphate
  modified_base 8: mod_base = OTHER; note = 2'-O-methyladenosine-3'-phosphate
  modified_base 9: mod_base = OTHER; note = 2'-deoxy-2'-fluorocytidine-3'-phosphate
  modified_base 10: mod_base = OTHER; note = 2'-deoxy-2'-fluorocytidine-3'-phosphate
  modified_base 11: mod_base = OTHER; note = 2'-deoxy-2'-fluoroadenosine-3'-phosphate
  modified_base 12: mod_base = OTHER; note = 2'-O-methyluridine-3'-phosphate
  modified_base 13: mod_base = OTHER; note = 2'-O-methylcytidine-3'-phosphate
  modified_base 14: mod_base = OTHER; note = 2'-O-methyluridine-3'-phosphate
  modified_base 15: mod_base = OTHER; note = 2'-O-methyluridine-3'-phosphate
  modified_base 16: mod_base = OTHER; note = 2'-O-methylcytidine-3'-phosphate
  modified_base 17: mod_base = OTHER; note = 2'-O-methyluridine-3'-phosphate
  modified_base 18: mod_base = OTHER; note = 2'-O-methylguanosine-3'-phosphate
  modified_base 19: mod_base = OTHER; note = 2'-O-methylguanosine-3'-phosphate
  modified_base 20: mod_base = OTHER; note = 2'-O-methyluridine-3'-phosphate
  modified_base 21: mod_base = OTHER; note = 2'-O-methyladenosine-3'-phosphate ((2S,4R)-1-[29-[[2-(acetylamino)-2-deoxy-beta-D-galactopyra nosyl]oxy]-14,14-bis[[3-[[3-[[5-[[2-(acetylamino)-2-deoxy-b eta-D-galactopyranosyl]oxy]-1-oxopentyl]amino]propyl]amino] -3-oxopropoxy]methyl]-1,12,19,25-tetraoxo-16-oxa-13,20,24-t riazanonacos-1-yl]-4-hydroxy-2-pyrrolidinyl)methyl ester
cacctccaccatcttctggta

SEQ ID NO: 736 - RNA, 21 nt, synthetic construct
  source 1..21: mol_type = other RNA
  modified_base 1: mod_base = OTHER; note = 2'-O-methylcytidine-3'-phosphorothioate
  modified_base 2: mod_base = OTHER; note = 2'-O-methylcytidine-3'-phosphorothioate
  modified_base 3: mod_base = OTHER; note = 2'-O-methyluridine-3'-phosphate
  modified_base 4: mod_base = OTHER; note = 2'-O-methylcytidine-3'-phosphate
  modified_base 5: mod_base = OTHER; note = 2'-O-methylcytidine-3'-phosphate
  modified_base 6: mod_base = OTHER; note = 2'-O-methyladenosine-3'-phosphate
  modified_base 7: mod_base = OTHER; note = 2'-deoxy-2'-fluorocytidine-3'-phosphate
  modified_base 8: mod_base = OTHER; note = 2'-O-methylcytidine-3'-phosphate
  modified_base 9: mod_base = OTHER; note = 2'-deoxy-2'-fluoroadenosine-3'-phosphate
  modified_base 10: mod_base = OTHER; note = 2'-deoxy-2'-fluorouridine-3'-phosphate
  modified_base 11: mod_base = OTHER; note = 2'-deoxy-2'-fluorocytidine-3'-phosphate
  modified_base 12: mod_base = OTHER; note = 2'-O-methyluridine-3'-phosphate
  modified_base 13: mod_base = OTHER; note = 2'-O-methyluridine-3'-phosphate
  modified_base 14: mod_base = OTHER; note = 2'-O-methylcytidine-3'-phosphate
  modified_base 15: mod_base = OTHER; note = 2'-O-methyluridine-3'-phosphate
  modified_base 16: mod_base = OTHER; note = 2'-O-methylguanosine-3'-phosphate
  modified_base 17: mod_base = OTHER; note = 2'-O-methylguanosine-3'-phosphate
  modified_base 18: mod_base = OTHER; note = 2'-O-methyluridine-3'-phosphate
  modified_base 19: mod_base = OTHER; note = 2'-O-methylcytidine-3'-phosphate
  modified_base 20: mod_base = OTHER; note = 2'-O-methylcytidine-3'-phosphate
  modified_base 21: mod_base = OTHER; note = 2'-O-methyladenosine-3'-phosphate ((2S,4R)-1-[29-[[2-(acetylamino)-2-deoxy-beta-D-galactopyra nosyl]oxy]-14,14-bis[[3-[[3-[[5-[[2-(acetylamino)-2-deoxy-b eta-D-galactopyranosyl]oxy]-1-oxopentyl]amino]propyl]amino] -3-oxopropoxy]methyl]-1,12,19,25-tetraoxo-16-oxa-13,20,24-t riazanonacos-1-yl]-4-hydroxy-2-pyrrolidinyl)methyl ester
cctccaccatcttctggtcca

SEQ ID NO: 737 - RNA, 21 nt, synthetic construct
  source 1..21: mol_type = other RNA
  modified_base 1: mod_base = OTHER; note = 2'-O-methylcytidine-3'-phosphorothioate
  modified_base 2: mod_base = OTHER; note = 2'-O-methylcytidine-3'-phosphorothioate
  modified_base 3: mod_base = OTHER; note = 2'-O-methyluridine-3'-phosphate
  modified_base 4: mod_base = OTHER; note = 2'-O-methylcytidine-3'-phosphate
  modified_base 5: mod_base = OTHER; note = 2'-O-methylcytidine-3'-phosphate
  modified_base 6: mod_base = OTHER; note = 2'-O-methyladenosine-3'-phosphate
  modified_base 7: mod_base = OTHER; note = 2'-deoxy-2'-fluorocytidine-3'-phosphate
  modified_base 8: mod_base = OTHER; note = 2'-O-methylcytidine-3'-phosphate
  modified_base 9: mod_base = OTHER; note = 2'-deoxy-2'-fluoroadenosine-3'-phosphate
  modified_base 10: mod_base = OTHER; note = 2'-deoxy-2'-fluorouridine-3'-phosphate
  modified_base 11: mod_base = OTHER; note = 2'-deoxy-2'-fluorocytidine-3'-phosphate
  modified_base 12: mod_base = OTHER; note = 2'-O-methyluridine-3'-phosphate
  modified_base 13: mod_base = OTHER; note = 2'-O-methyluridine-3'-phosphate
  modified_base 14: mod_base = OTHER; note = 2'-O-methylcytidine-3'-phosphate
  modified_base 15: mod_base = OTHER; note = 2'-O-methyluridine-3'-phosphate
  modified_base 16: mod_base = OTHER; note = 2'-O-methyluridine-3'-phosphate
  modified_base 17: mod_base = OTHER; note = 2'-O-methylguanosine-3'-phosphate
  modified_base 18: mod_base = OTHER; note = 2'-O-methyluridine-3'-phosphate
  modified_base 19: mod_base = OTHER; note = 2'-O-methylcytidine-3'-phosphate
  modified_base 20: mod_base = OTHER; note = 2'-O-methylcytidine-3'-phosphate
  modified_base 21: mod_base = OTHER; note = 2'-O-methyladenosine-3'-phosphate ((2S,4R)-1-[29-[[2-(acetylamino)-2-deoxy-beta-D-galactopyra nosyl]oxy]-14,14-bis[[3-[[3-[[5-[[2-(acetylamino)-2-deoxy-b eta-D-galactopyranosyl]oxy]-1-oxopentyl]amino]propyl]amino] -3-oxopropoxy]methyl]-1,12,19,25-tetraoxo-16-oxa-13,20,24-t riazanonacos-1-yl]-4-hydroxy-2-pyrrolidinyl)methyl ester
cctccaccatcttcttgtcca

SEQ ID NO: 738 - RNA, 21 nt, synthetic construct
  source 1..21: mol_type = other RNA
  modified_base 1: mod_base = OTHER; note = 2'-O-methylcytidine-3'-phosphorothioate
  modified_base 2: mod_base = OTHER; note = 2'-O-methyluridine-3'-phosphorothioate
  modified_base 3: mod_base = OTHER; note = 2'-O-methylcytidine-3'-phosphate
  modified_base 4: mod_base = OTHER; note = 2'-O-methylcytidine-3'-phosphate
  modified_base 5: mod_base = OTHER; note = 2'-O-methyladenosine-3'-phosphate
  modified_base 6: mod_base = OTHER; note = 2'-O-methylcytidine-3'-phosphate
  modified_base 7: mod_base = OTHER; note = 2'-deoxy-2'-fluorocytidine-3'-phosphate
  modified_base 8: mod_base = OTHER; note = 2'-O-methyladenosine-3'-phosphate
  modified_base 9: mod_base = OTHER; note = 2'-deoxy-2'-fluorouridine-3'-phosphate
  modified_base 10: mod_base = OTHER; note = 2'-deoxy-2'-fluorocytidine-3'-phosphate
  modified_base 11: mod_base = OTHER; note = 2'-deoxy-2'-fluorouridine-3'-phosphate
  modified_base 12: mod_base = OTHER; note = 2'-O-methyluridine-3'-phosphate
  modified_base 13: mod_base = OTHER; note = 2'-O-methylcytidine-3'-phosphate
  modified_base 14: mod_base = OTHER; note = 2'-O-methyluridine-3'-phosphate
  modified_base 15: mod_base = OTHER; note = 2'-O-methylguanosine-3'-phosphate
  modified_base 16: mod_base = OTHER; note = 2'-O-methylguanosine-3'-phosphate
  modified_base 17: mod_base = OTHER; note = 2'-O-methyluridine-3'-phosphate
  modified_base 18: mod_base = OTHER; note = 2'-O-methylcytidine-3'-phosphate
  modified_base 19: mod_base = OTHER; note = 2'-O-methylcytidine-3'-phosphate
  modified_base 20: mod_base = OTHER; note = 2'-O-methylcytidine-3'-phosphate
  modified_base 21: mod_base = OTHER; note = 2'-O-methyladenosine-3'-phosphate ((2S,4R)-1-[29-[[2-(acetylamino)-2-deoxy-beta-D-galactopyra nosyl]oxy]-14,14-bis[[3-[[3-[[5-[[2-(acetylamino)-2-deoxy-b eta-D-galactopyranosyl]oxy]-1-oxopentyl]amino]propyl]amino] -3-oxopropoxy]methyl]-1,12,19,25-tetraoxo-16-oxa-13,20,24-t riazanonacos-1-yl]-4-hydroxy-2-pyrrolidinyl)methyl ester
ctccaccatcttctggtccca

SEQ ID NO: 739 - RNA, 21 nt, synthetic construct
  source 1..21: mol_type = other RNA
  modified_base 1: mod_base = OTHER; note = 2'-O-methylcytidine-3'-phosphorothioate
  modified_base 2: mod_base = OTHER; note = 2'-O-methyluridine-3'-phosphorothioate
  modified_base 3: mod_base = OTHER; note = 2'-O-methylcytidine-3'-phosphate
  modified_base 4: mod_base = OTHER; note = 2'-O-methylcytidine-3'-phosphate
  modified_base 5: mod_base = OTHER; note = 2'-O-methyladenosine-3'-phosphate
  modified_base 6: mod_base = OTHER; note = 2'-O-methylcytidine-3'-phosphate
  modified_base 7: mod_base = OTHER; note = 2'-deoxy-2'-fluorocytidine-3'-phosphate
  modified_base 8: mod_base = OTHER; note = 2'-O-methyladenosine-3'-phosphate
  modified_base 9: mod_base = OTHER; note = 2'-deoxy-2'-fluorouridine-3'-phosphate
  modified_base 10: mod_base = OTHER; note = 2'-deoxy-2'-fluorocytidine-3'-phosphate
  modified_base 11: mod_base = OTHER; note = 2'-deoxy-2'-fluorouridine-3'-phosphate
  modified_base 12: mod_base = OTHER; note = 2'-O-methyluridine-3'-phosphate
  modified_base 13: mod_base = OTHER; note = 2'-O-methylcytidine-3'-phosphate
  modified_base 14: mod_base = OTHER; note = 2'-O-methyluridine-3'-phosphate
  modified_base 15: mod_base = OTHER; note = 2'-O-methyluridine-3'-phosphate
  modified_base 16: mod_base = OTHER; note = 2'-O-methylguanosine-3'-phosphate
  modified_base 17: mod_base = OTHER; note = 2'-O-methyluridine-3'-phosphate
  modified_base 18: mod_base = OTHER; note = 2'-O-methylcytidine-3'-phosphate
  modified_base 19: mod_base = OTHER; note = 2'-O-methylcytidine-3'-phosphate
  modified_base 20: mod_base = OTHER; note = 2'-O-methylcytidine-3'-phosphate
  modified_base 21: mod_base = OTHER; note = 2'-O-methyladenosine-3'-phosphate ((2S,4R)-1-[29-[[2-(acetylamino)-2-deoxy-beta-D-galactopyra nosyl]oxy]-14,14-bis[[3-[[3-[[5-[[2-(acetylamino)-2-deoxy-b eta-D-galactopyranosyl]oxy]-1-oxopentyl]amino]propyl]amino] -3-oxopropoxy]methyl]-1,12,19,25-tetraoxo-16-oxa-13,20,24-t riazanonacos-1-yl]-4-hydroxy-2-pyrrolidinyl)methyl ester
ctccaccatcttcttgtccca

SEQ ID NO: 740 - RNA, 21 nt, synthetic construct
  source 1..21: mol_type = other RNA
  modified_base 1: mod_base = OTHER; note = 2'-O-methylcytidine-3'-phosphorothioate
  modified_base 2: mod_base = OTHER; note = 2'-O-methyluridine-3'-phosphorothioate
  modified_base 3: mod_base = OTHER; note = 2'-O-methylguanosine-3'-phosphate
  modified_base 4: mod_base = OTHER; note = 2'-O-methyladenosine-3'-phosphate
  modified_base 5: mod_base = OTHER; note = 2'-O-methyladenosine-3'-phosphate
  modified_base 6: mod_base = OTHER; note = 2'-O-methylguanosine-3'-phosphate
  modified_base 7: mod_base = OTHER; note = 2'-deoxy-2'-fluoroguanosine-3'-phosphate
  modified_base 8: mod_base = OTHER; note = 2'-O-methylguanosine-3'-phosphate
  modified_base 9: mod_base = OTHER; note = 2'-deoxy-2'-fluoroadenosine-3'-phosphate
  modified_base 10: mod_base = OTHER; note = 2'-deoxy-2'-fluoroadenosine-3'-phosphate
  modified_base 11: mod_base = OTHER; note = 2'-deoxy-2'-fluorocytidine-3'-phosphate
  modified_base 12: mod_base = OTHER; note = 2'-O-methyladenosine-3'-phosphate
  modified_base 13: mod_base = OTHER; note = 2'-O-methylguanosine-3'-phosphate
  modified_base 14: mod_base = OTHER; note = 2'-O-methylguanosine-3'-phosphate
  modified_base 15: mod_base = OTHER; note = 2'-O-methyluridine-3'-phosphate
  modified_base 16: mod_base = OTHER; note = 2'-O-methylguanosine-3'-phosphate
  modified_base 17: mod_base = OTHER; note = 2'-O-methyladenosine-3'-phosphate
  modified_base 18: mod_base = OTHER; note = 2'-O-methyladenosine-3'-phosphate
  modified_base 19: mod_base = OTHER; note = 2'-O-methyladenosine-3'-phosphate
  modified_base 20: mod_base = OTHER; note = 2'-O-methyladenosine-3'-phosphate
  modified_base 21: mod_base = OTHER; note = 2'-O-methyladenosine-3'-phosphate ((2S,4R)-1-[29-[[2-(acetylamino)-2-deoxy-beta-D-galactopyra nosyl]oxy]-14,14-bis[[3-[[3-[[5-[[2-(acetylamino)-2-deoxy-b eta-D-galactopyranosyl]oxy]-1-oxopentyl]amino]propyl]amino] -3-oxopropoxy]methyl]-1,12,19,25-tetraoxo-16-oxa-13,20,24-t riazanonacos-1-yl]-4-hydroxy-2-pyrrolidinyl)methyl ester
ctgaagggaacaggtgaaaaa

SEQ ID NO: 741 - RNA, 21 nt, synthetic construct
  source 1..21: mol_type = other RNA
  modified_base 1: mod_base = OTHER; note = 2'-O-methylcytidine-3'-phosphorothioate
  modified_base 2: mod_base = OTHER; note = 2'-O-methyluridine-3'-phosphorothioate
  modified_base 3: mod_base = OTHER; note = 2'-O-methylguanosine-3'-phosphate
  modified_base 4: mod_base = OTHER; note = 2'-O-methyladenosine-3'-phosphate
  modified_base 5: mod_base = OTHER; note = 2'-O-methyladenosine-3'-phosphate
  modified_base 6: mod_base = OTHER; note = 2'-O-methylguanosine-3'-phosphate
  modified_base 7: mod_base = OTHER; note = 2'-deoxy-2'-fluoroguanosine-3'-phosphate
  modified_base 8: mod_base = OTHER; note = 2'-O-methylguanosine-3'-phosphate
  modified_base 9: mod_base = OTHER; note = 2'-deoxy-2'-fluoroadenosine-3'-phosphate
  modified_base 10: mod_base = OTHER; note = 2'-deoxy-2'-fluoroadenosine-3'-phosphate
  modified_base 11: mod_base = OTHER; note = 2'-deoxy-2'-fluorocytidine-3'-phosphate
  modified_base 12: mod_base = OTHER; note = 2'-O-methyladenosine-3'-phosphate
  modified_base 13: mod_base = OTHER; note = 2'-O-methylguanosine-3'-phosphate
  modified_base 14: mod_base = OTHER; note = 2'-O-methylguanosine-3'-phosphate
  modified_base 15: mod_base = OTHER; note = 2'-O-methyluridine-3'-phosphate
  modified_base 16: mod_base = OTHER; note = 2'-O-methyluridine-3'-phosphate
  modified_base 17: mod_base = OTHER; note = 2'-O-methyladenosine-3'-phosphate
  modified_base 18: mod_base = OTHER; note = 2'-O-methyladenosine-3'-phosphate
  modified_base 19: mod_base = OTHER; note = 2'-O-methyladenosine-3'-phosphate
  modified_base 20: mod_base = OTHER; note = 2'-O-methyladenosine-3'-phosphate
  modified_base 21: mod_base = OTHER; note = 2'-O-methyladenosine-3'-phosphate ((2S,4R)-1-[29-[[2-(acetylamino)-2-deoxy-beta-D-galactopyra nosyl]oxy]-14,14-bis[[3-[[3-[[5-[[2-(acetylamino)-2-deoxy-b eta-D-galactopyranosyl]oxy]-1-oxopentyl]amino]propyl]amino] -3-oxopropoxy]methyl]-1,12,19,25-tetraoxo-16-oxa-13,20,24-t riazanonacos-1-yl]-4-hydroxy-2-pyrrolidinyl)methyl ester
ctgaagggaacaggttaaaaa

SEQ ID NO: 742 - RNA, 21 nt, synthetic construct
  source 1..21: mol_type = other RNA
  modified_base 1: mod_base = OTHER; note = 2'-O-methyluridine-3'-phosphorothioate
  modified_base 2: mod_base = OTHER; note = 2'-O-methyladenosine-3'-phosphorothioate
  modified_base 3: mod_base = OTHER; note = 2'-O-methyladenosine-3'-phosphate
  modified_base 4: mod_base = OTHER; note = 2'-O-methylcytidine-3'-phosphate
  modified_base 5: mod_base = OTHER; note = 2'-O-methyladenosine-3'-phosphate
  modified_base 6: mod_base = OTHER; note = 2'-O-methylguanosine-3'-phosphate
  modified_base 7: mod_base = OTHER; note = 2'-deoxy-2'-fluoroguanosine-3'-phosphate
  modified_base 8: mod_base = OTHER; note = 2'-O-methyladenosine-3'-phosphate
  modified_base 9: mod_base = OTHER; note = 2'-deoxy-2'-fluorocytidine-3'-phosphate
  modified_base 10: mod_base = OTHER; note = 2'-deoxy-2'-fluoroadenosine-3'-phosphate
  modified_base 11: mod_base = OTHER; note = 2'-deoxy-2'-fluorocytidine-3'-phosphate
  modified_base 12: mod_base = OTHER; note = 2'-O-methylcytidine-3'-phosphate
  modified_base 13: mod_base = OTHER; note = 2'-O-methyladenosine-3'-phosphate
  modified_base 14: mod_base = OTHER; note = 2'-O-methylguanosine-3'-phosphate
  modified_base 15: mod_base = OTHER; note = 2'-O-methyladenosine-3'-phosphate
  modified_base 16: mod_base = OTHER; note = 2'-O-methyladenosine-3'-phosphate
  modified_base 17: mod_base = OTHER; note = 2'-O-methyladenosine-3'-phosphate
  modified_base 18: mod_base = OTHER; note = 2'-O-methyladenosine-3'-phosphate
  modified_base 19: mod_base = OTHER; note = 2'-O-methylcytidine-3'-phosphate
  modified_base 20: mod_base = OTHER; note = 2'-O-methyluridine-3'-phosphate
  modified_base 21: mod_base = OTHER; note = 2'-O-methyladenosine-3'-phosphate ((2S,4R)-1-[29-[[2-(acetylamino)-2-deoxy-beta-D-galactopyra nosyl]oxy]-14,14-bis[[3-[[3-[[5-[[2-(acetylamino)-2-deoxy-b eta-D-galactopyranosyl]oxy]-1-oxopentyl]amino]propyl]amino] -3-oxopropoxy]methyl]-1,12,19,25-tetraoxo-16-oxa-13,20,24-t riazanonacos-1-yl]-4-hydroxy-2-pyrrolidinyl)methyl ester
taacaggacaccagaaaacta

SEQ ID NO: 743 - RNA, 21 nt, synthetic construct
  source 1..21: mol_type = other RNA
  modified_base 1: mod_base = OTHER; note = 2'-O-methyladenosine-3'-phosphorothioate
  modified_base 2: mod_base = OTHER; note = 2'-O-methyladenosine-3'-phosphorothioate
  modified_base 3: mod_base = OTHER; note = 2'-O-methylcytidine-3'-phosphate
  modified_base 4: mod_base = OTHER; note = 2'-O-methyladenosine-3'-phosphate
  modified_base 5: mod_base = OTHER; note = 2'-O-methylguanosine-3'-phosphate
  modified_base 6: mod_base = OTHER; note = 2'-O-methylguanosine-3'-phosphate
  modified_base 7: mod_base = OTHER; note = 2'-deoxy-2'-fluoroadenosine-3'-phosphate
  modified_base 8: mod_base = OTHER; note = 2'-O-methylcytidine-3'-phosphate
  modified_base 9: mod_base = OTHER; note = 2'-deoxy-2'-fluoroadenosine-3'-phosphate
  modified_base 10: mod_base = OTHER; note = 2'-deoxy-2'-fluorocytidine-3'-phosphate
  modified_base 11: mod_base = OTHER; note = 2'-deoxy-2'-fluorocytidine-3'-phosphate
  modified_base 12: mod_base = OTHER; note = 2'-O-methyladenosine-3'-phosphate
  modified_base 13: mod_base = OTHER; note = 2'-O-methylguanosine-3'-phosphate
  modified_base 14: mod_base = OTHER; note = 2'-O-methyladenosine-3'-phosphate
  modified_base 15: mod_base = OTHER; note = 2'-O-methyladenosine-3'-phosphate
  modified_base 16: mod_base = OTHER; note = 2'-O-methyladenosine-3'-phosphate
  modified_base 17: mod_base = OTHER; note = 2'-O-methyladenosine-3'-phosphate
  modified_base 18: mod_base = OTHER; note = 2'-O-methylcytidine-3'-phosphate
  modified_base 19: mod_base = OTHER; note = 2'-O-methyluridine-3'-phosphate
  modified_base 20: mod_base = OTHER; note = 2'-O-methyluridine-3'-phosphate
  modified_base 21: mod_base = OTHER; note = 2'-O-methyladenosine-3'-phosphate ((2S,4R)-1-[29-[[2-(acetylamino)-2-deoxy-beta-D-galactopyra nosyl]oxy]-14,14-bis[[3-[[3-[[5-[[2-(acetylamino)-2-deoxy-b eta-D-galactopyranosyl]oxy]-1-oxopentyl]amino]propyl]amino] -3-oxopropoxy]methyl]-1,12,19,25-tetraoxo-16-oxa-13,20,24-t riazanonacos-1-yl]-4-hydroxy-2-pyrrolidinyl)methyl ester
aacaggacaccagaaaactta

SEQ ID NO: 744 - RNA, 21 nt, synthetic construct
  source 1..21: mol_type = other RNA
  modified_base 1: mod_base = OTHER; note = 2'-O-methylcytidine-3'-phosphorothioate
  modified_base 2: mod_base = OTHER; note = 2'-O-methylcytidine-3'-phosphorothioate
  modified_base 3: mod_base = OTHER; note = 2'-O-methyluridine-3'-phosphate
  modified_base 4: mod_base = OTHER; note = 2'-O-methylguanosine-3'-phosphate
  modified_base 5: mod_base = OTHER; note = 2'-O-methylcytidine-3'-phosphate
  modified_base 6: mod_base = OTHER; note = 2'-O-methyladenosine-3'-phosphate
  modified_base 7: mod_base = OTHER; note = 2'-deoxy-2'-fluoroadenosine-3'-phosphate
  modified_base 8: mod_base = OTHER; note = 2'-O-methyladenosine-3'-phosphate
  modified_base 9: mod_base = OTHER; note = 2'-deoxy-2'-fluoroadenosine-3'-phosphate
  modified_base 10: mod_base = OTHER; note = 2'-deoxy-2'-fluoroadenosine-3'-phosphate
  modified_base 11: mod_base = OTHER; note = 2'-deoxy-2'-fluorouridine-3'-phosphate
  modified_base 12: mod_base = OTHER; note = 2'-O-methyluridine-3'-phosphate
  modified_base 13: mod_base = OTHER; note = 2'-O-methyluridine-3'-phosphate
  modified_base 14: mod_base = OTHER; note = 2'-O-methylguanosine-3'-phosphate
  modified_base 15: mod_base = OTHER; note = 2'-O-methyluridine-3'-phosphate
  modified_base 16: mod_base = OTHER; note = 2'-O-methyladenosine-3'-phosphate
  modified_base 17: mod_base = OTHER; note = 2'-O-methyluridine-3'-phosphate
  modified_base 18: mod_base = OTHER; note = 2'-O-methylguanosine-3'-phosphate
  modified_base 19: mod_base = OTHER; note = 2'-O-methyladenosine-3'-phosphate
  modified_base 20: mod_base = OTHER; note = 2'-O-methyladenosine-3'-phosphate
  modified_base 21: mod_base = OTHER; note = 2'-O-methyladenosine-3'-phosphate ((2S,4R)-1-[29-[[2-(acetylamino)-2-deoxy-beta-D-galactopyra nosyl]oxy]-14,14-bis[[3-[[3-[[5-[[2-(acetylamino)-2-deoxy-b eta-D-galactopyranosyl]oxy]-1-oxopentyl]amino]propyl]amino] -3-oxopropoxy]methyl]-1,12,19,25-tetraoxo-16-oxa-13,20,24-t riazanonacos-1-yl]-4-hydroxy-2-pyrrolidinyl)methyl ester
cctgcaaaaatttgtatgaaa

SEQ ID NO: 745 - RNA, 21 nt, synthetic construct
  source 1..21: mol_type = other RNA
  modified_base 1: mod_base = OTHER; note = 2'-O-methylcytidine-3'-phosphorothioate
  modified_base 2: mod_base = OTHER; note = 2'-O-methylcytidine-3'-phosphorothioate
  modified_base 3: mod_base = OTHER; note = 2'-O-methyluridine-3'-phosphate
  modified_base 4: mod_base = OTHER; note = 2'-O-methylguanosine-3'-phosphate
  modified_base 5: mod_base = OTHER; note = 2'-O-methylcytidine-3'-phosphate
  modified_base 6: mod_base = OTHER; note = 2'-O-methyladenosine-3'-phosphate
  modified_base 7: mod_base = OTHER; note = 2'-deoxy-2'-fluoroadenosine-3'-phosphate
  modified_base 8: mod_base = OTHER; note = 2'-O-methyladenosine-3'-phosphate
  modified_base 9: mod_base = OTHER; note = 2'-deoxy-2'-fluoroadenosine-3'-phosphate
  modified_base 10: mod_base = OTHER; note = 2'-deoxy-2'-fluoroadenosine-3'-phosphate
  modified_base 11: mod_base = OTHER; note = 2'-deoxy-2'-fluorouridine-3'-phosphate
  modified_base 12: mod_base = OTHER; note = 2'-O-methyluridine-3'-phosphate
  modified_base 13: mod_base = OTHER; note = 2'-O-methyluridine-3'-phosphate
  modified_base 14: mod_base = OTHER; note = 2'-O-methylguanosine-3'-phosphate
  modified_base 15: mod_base = OTHER; note = 2'-O-methylguanosine-3'-phosphate
  modified_base 16: mod_base = OTHER; note = 2'-O-methyladenosine-3'-phosphate
  modified_base 17: mod_base = OTHER; note = 2'-O-methyluridine-3'-phosphate
  modified_base 18: mod_base = OTHER; note = 2'-O-methylguanosine-3'-phosphate
  modified_base 19: mod_base = OTHER; note = 2'-O-methyladenosine-3'-phosphate
  modified_base 20: mod_base = OTHER; note = 2'-O-methyladenosine-3'-phosphate
  modified_base 21: mod_base = OTHER; note = 2'-O-methyladenosine-3'-phosphate ((2S,4R)-1-[29-[[2-(acetylamino)-2-deoxy-beta-D-galactopyra nosyl]oxy]-14,14-bis[[3-[[3-[[5-[[2-(acetylamino)-2-deoxy-b eta-D-galactopyranosyl]oxy]-1-oxopentyl]amino]propyl]amino] -3-oxopropoxy]methyl]-1,12,19,25-tetraoxo-16-oxa-13,20,24-t riazanonacos-1-yl]-4-hydroxy-2-pyrrolidinyl)methyl ester
cctgcaaaaatttggatgaaa

SEQ ID NO: 746 - RNA, 21 nt, synthetic construct
  source 1..21: mol_type = other RNA
  modified_base 1: mod_base = OTHER; note = 2'-O-methylcytidine-3'-phosphorothioate
  modified_base 2: mod_base = OTHER; note = 2'-O-methyluridine-3'-phosphorothioate
  modified_base 3: mod_base = OTHER; note = 2'-O-methylguanosine-3'-phosphate
  modified_base 4: mod_base = OTHER; note = 2'-O-methylcytidine-3'-phosphate
  modified_base 5: mod_base = OTHER; note = 2'-O-methyladenosine-3'-phosphate
  modified_base 6: mod_base = OTHER; note = 2'-O-methyladenosine-3'-phosphate
  modified_base 7: mod_base = OTHER; note = 2'-deoxy-2'-fluoroadenosine-3'-phosphate
  modified_base 8: mod_base = OTHER; note = 2'-O-methyladenosine-3'-phosphate
  modified_base 9: mod_base = OTHER; note = 2'-deoxy-2'-fluoroadenosine-3'-phosphate
  modified_base 10: mod_base = OTHER; note = 2'-deoxy-2'-fluorouridine-3'-phosphate
  modified_base 11: mod_base = OTHER; note = 2'-deoxy-2'-fluorouridine-3'-phosphate
  modified_base 12: mod_base = OTHER; note = 2'-O-methyluridine-3'-phosphate
  modified_base 13: mod_base = OTHER; note = 2'-O-methylguanosine-3'-phosphate
  modified_base 14: mod_base = OTHER; note = 2'-O-methylguanosine-3'-phosphate
  modified_base 15: mod_base = OTHER; note = 2'-O-methyladenosine-3'-phosphate
  modified_base 16: mod_base = OTHER; note = 2'-O-methyluridine-3'-phosphate
  modified_base 17: mod_base = OTHER; note = 2'-O-methylguanosine-3'-phosphate
  modified_base 18: mod_base = OTHER; note = 2'-O-methyladenosine-3'-phosphate
  modified_base 19: mod_base = OTHER; note = 2'-O-methyladenosine-3'-phosphate
  modified_base 20: mod_base = OTHER; note = 2'-O-methyladenosine-3'-phosphate
  modified_base 21: mod_base = OTHER; note = 2'-O-methyladenosine-3'-phosphate ((2S,4R)-1-[29-[[2-(acetylamino)-2-deoxy-beta-D-galactopyra nosyl]oxy]-14,14-bis[[3-[[3-[[5-[[2-(acetylamino)-2-deoxy-b eta-D-galactopyranosyl]oxy]-1-oxopentyl]amino]propyl]amino] -3-oxopropoxy]methyl]-1,12,19,25-tetraoxo-16-oxa-13,20,24-t riazanonacos-1-yl]-4-hydroxy-2-pyrrolidinyl)methyl ester
ctgcaaaaatttggatgaaaa

SEQ ID NO: 747 - RNA, 21 nt, synthetic construct
  source 1..21: mol_type = other RNA
  modified_base 1: mod_base = OTHER; note = 2'-O-methylcytidine-3'-phosphorothioate
  modified_base 2: mod_base = OTHER; note = 2'-O-methyluridine-3'-phosphorothioate
  modified_base 3: mod_base = OTHER; note = 2'-O-methylguanosine-3'-phosphate
  modified_base 4: mod_base = OTHER; note = 2'-O-methylcytidine-3'-phosphate
  modified_base 5: mod_base = OTHER; note = 2'-O-methyladenosine-3'-phosphate
  modified_base 6: mod_base = OTHER; note = 2'-O-methyladenosine-3'-phosphate
  modified_base 7: mod_base = OTHER; note = 2'-deoxy-2'-fluoroadenosine-3'-phosphate
  modified_base 8: mod_base = OTHER; note = 2'-O-methyladenosine-3'-phosphate
  modified_base 9: mod_base = OTHER; note = 2'-deoxy-2'-fluoroadenosine-3'-phosphate
  modified_base 10: mod_base = OTHER; note = 2'-deoxy-2'-fluorouridine-3'-phosphate
  modified_base 11: mod_base = OTHER; note = 2'-deoxy-2'-fluorouridine-3'-phosphate
  modified_base 12: mod_base = OTHER; note = 2'-O-methyluridine-3'-phosphate
  modified_base 13: mod_base = OTHER; note = 2'-O-methylguanosine-3'-phosphate
  modified_base 14: mod_base = OTHER; note = 2'-O-methylguanosine-3'-phosphate
  modified_base 15: mod_base = OTHER; note = 2'-O-methyluridine-3'-phosphate
  modified_base 16: mod_base = OTHER; note = 2'-O-methyluridine-3'-phosphate
  modified_base 17: mod_base = OTHER; note = 2'-O-methylguanosine-3'-phosphate
  modified_base 18: mod_base = OTHER; note = 2'-O-methyladenosine-3'-phosphate
  modified_base 19: mod_base = OTHER; note = 2'-O-methyladenosine-3'-phosphate
  modified_base 20: mod_base = OTHER; note = 2'-O-methyladenosine-3'-phosphate
  modified_base 21: mod_base = OTHER; note = 2'-O-methyladenosine-3'-phosphate ((2S,4R)-1-[29-[[2-(acetylamino)-2-deoxy-beta-D-galactopyra nosyl]oxy]-14,14-bis[[3-[[3-[[5-[[2-(acetylamino)-2-deoxy-b eta-D-galactopyranosyl]oxy]-1-oxopentyl]amino]propyl]amino] -3-oxopropoxy]methyl]-1,12,19,25-tetraoxo-16-oxa-13,20,24-t riazanonacos-1-yl]-4-hydroxy-2-pyrrolidinyl)methyl ester
ctgcaaaaatttggttgaaaa

SEQ ID NO: 748 - RNA, 21 nt, synthetic construct
  source 1..21: mol_type = other RNA
  modified_base 1: mod_base = OTHER; note = 2'-O-methyluridine-3'-phosphorothioate
  modified_base 2: mod_base = OTHER; note = 2'-O-methylguanosine-3'-phosphorothioate
  modified_base 3: mod_base = OTHER; note = 2'-O-methylcytidine-3'-phosphate
  modified_base 4: mod_base = OTHER; note = 2'-O-methyladenosine-3'-phosphate
  modified_base 5: mod_base = OTHER; note = 2'-O-methyladenosine-3'-phosphate
  modified_base 6: mod_base = OTHER; note = 2'-O-methyladenosine-3'-phosphate
  modified_base 7: mod_base = OTHER; note = 2'-deoxy-2'-fluoroadenosine-3'-phosphate
  modified_base 8: mod_base = OTHER; note = 2'-O-methyladenosine-3'-phosphate
  modified_base 9: mod_base = OTHER; note = 2'-deoxy-2'-fluorouridine-3'-phosphate
  modified_base 10: mod_base = OTHER; note = 2'-deoxy-2'-fluorouridine-3'-phosphate
  modified_base 11: mod_base = OTHER; note = 2'-deoxy-2'-fluorouridine-3'-phosphate
  modified_base 12: mod_base = OTHER; note = 2'-O-methylguanosine-3'-phosphate
  modified_base 13: mod_base = OTHER; note = 2'-O-methylguanosine-3'-phosphate
  modified_base 14: mod_base = OTHER; note = 2'-O-methyladenosine-3'-phosphate
  modified_base 15: mod_base = OTHER; note = 2'-O-methyluridine-3'-phosphate
  modified_base 16: mod_base = OTHER; note = 2'-O-methylguanosine-3'-phosphate
  modified_base 17: mod_base = OTHER; note = 2'-O-methyladenosine-3'-phosphate
  modified_base 18: mod_base = OTHER; note = 2'-O-methyladenosine-3'-phosphate
  modified_base 19: mod_base = OTHER; note = 2'-O-methyladenosine-3'-phosphate
  modified_base 20: mod_base = OTHER; note = 2'-O-methyladenosine-3'-phosphate
  modified_base 21: mod_base = OTHER; note = 2'-O-methyladenosine-3'-phosphate ((2S,4R)-1-[29-[[2-(acetylamino)-2-deoxy-beta-D-galactopyra nosyl]oxy]-14,14-bis[[3-[[3-[[5-[[2-(acetylamino)-2-deoxy-b eta-D-galactopyranosyl]oxy]-1-oxopentyl]amino]propyl]amino] -3-oxopropoxy]methyl]-1,12,19,25-tetraoxo-16-oxa-13,20,24-t riazanonacos-1-yl]-4-hydroxy-2-pyrrolidinyl)methyl ester
tgcaaaaatttggatgaaaaa

SEQ ID NO: 749 - RNA, 21 nt, synthetic construct
  source 1..21: mol_type = other RNA
  modified_base 1: mod_base = OTHER; note = 2'-O-methyluridine-3'-phosphorothioate
  modified_base 2: mod_base = OTHER; note = 2'-O-methylguanosine-3'-phosphorothioate
  modified_base 3: mod_base = OTHER; note = 2'-O-methylcytidine-3'-phosphate
  modified_base 4: mod_base = OTHER; note = 2'-O-methyladenosine-3'-phosphate
  modified_base 5: mod_base = OTHER; note = 2'-O-methyladenosine-3'-phosphate
  modified_base 6: mod_base = OTHER; note = 2'-O-methyladenosine-3'-phosphate
  modified_base 7: mod_base = OTHER; note = 2'-deoxy-2'-fluoroadenosine-3'-phosphate
  modified_base 8: mod_base = OTHER; note = 2'-O-methyladenosine-3'-phosphate
  modified_base 9: mod_base = OTHER; note = 2'-deoxy-2'-fluorouridine-3'-phosphate
  modified_base 10: mod_base = OTHER; note = 2'-deoxy-2'-fluorouridine-3'-phosphate
  modified_base 11: mod_base = OTHER; note = 2'-deoxy-2'-fluorouridine-3'-phosphate
  modified_base 12: mod_base = OTHER; note = 2'-O-methylguanosine-3'-phosphate
  modified_base 13: mod_base = OTHER; note = 2'-O-methylguanosine-3'-phosphate
  modified_base 14: mod_base = OTHER; note = 2'-O-methyladenosine-3'-phosphate
  modified_base 15: mod_base = OTHER; note = 2'-O-methyluridine-3'-phosphate
  modified_base 16: mod_base = OTHER; note = 2'-O-methyluridine-3'-phosphate
  modified_base 17: mod_base = OTHER; note = 2'-O-methyladenosine-3'-phosphate
  modified_base 18: mod_base = OTHER; note = 2'-O-methyladenosine-3'-phosphate
  modified_base 19: mod_base = OTHER; note = 2'-O-methyladenosine-3'-phosphate
  modified_base 20: mod_base = OTHER; note = 2'-O-methyladenosine-3'-phosphate
  modified_base 21: mod_base = OTHER; note = 2'-O-methyladenosine-3'-phosphate ((2S,4R)-1-[29-[[2-(acetylamino)-2-deoxy-beta-D-galactopyra nosyl]oxy]-14,14-bis[[3-[[3-[[5-[[2-(acetylamino)-2-deoxy-b eta-D-galactopyranosyl]oxy]-1-oxopentyl]amino]propyl]amino] -3-oxopropoxy]methyl]-1,12,19,25-tetraoxo-16-oxa-13,20,24-t riazanonacos-1-yl]-4-hydroxy-2-pyrrolidinyl)methyl ester
tgcaaaaatttggattaaaaa

SEQ ID NO: 750 - RNA, 21 nt, synthetic construct
  source 1..21: mol_type = other RNA
  modified_base 1: mod_base = OTHER; note = 2'-O-methyladenosine-3'-phosphorothioate
  modified_base 2: mod_base = OTHER; note = 2'-O-methyladenosine-3'-phosphorothioate
  modified_base 3: mod_base = OTHER; note = 2'-O-methyladenosine-3'-phosphate
  modified_base 4: mod_base = OTHER; note = 2'-O-methyladenosine-3'-phosphate
  modified_base 5: mod_base = OTHER; note = 2'-O-methyladenosine-3'-phosphate
  modified_base 6: mod_base = OTHER; note = 2'-O-methyluridine-3'-phosphate
  modified_base 7: mod_base = OTHER; note = 2'-deoxy-2'-fluorouridine-3'-phosphate
  modified_base 8: mod_base = OTHER; note = 2'-O-methyluridine-3'-phosphate
  modified_base 9: mod_base = OTHER; note = 2'-deoxy-2'-fluoroguanosine-3'-phosphate
  modified_base 10: mod_base = OTHER; note = 2'-deoxy-2'-fluoroguanosine-3'-phosphate
  modified_base 11: mod_base = OTHER; note = 2'-deoxy-2'-fluoroadenosine-3'-phosphate
  modified_base 12: mod_base = OTHER; note = 2'-O-methyluridine-3'-phosphate
  modified_base 13: mod_base = OTHER; note = 2'-O-methylguanosine-3'-phosphate
  modified_base 14: mod_base = OTHER; note = 2'-O-methyladenosine-3'-phosphate
  modified_base 15: mod_base = OTHER; note = 2'-O-methyladenosine-3'-phosphate
  modified_base 16: mod_base = OTHER; note = 2'-O-methyladenosine-3'-phosphate
  modified_base 17: mod_base = OTHER; note = 2'-O-methyladenosine-3'-phosphate
  modified_base 18: mod_base = OTHER; note = 2'-O-methylcytidine-3'-phosphate
  modified_base 19: mod_base = OTHER; note = 2'-O-methyluridine-3'-phosphate
  modified_base 20: mod_base = OTHER; note = 2'-O-methyladenosine-3'-phosphate
  modified_base 21: mod_base = OTHER; note = 2'-O-methyladenosine-3'-phosphate ((2S,4R)-1-[29-[[2-(acetylamino)-2-deoxy-beta-D-galactopyra nosyl]oxy]-14,14-bis[[3-[[3-[[5-[[2-(acetylamino)-2-deoxy-b eta-D-galactopyranosyl]oxy]-1-oxopentyl]amino]propyl]amino] -3-oxopropoxy]methyl]-1,12,19,25-tetraoxo-16-oxa-13,20,24-t riazanonacos-1-yl]-4-hydroxy-2-pyrrolidinyl)methyl ester
aaaaatttggatgaaaactaa

SEQ ID NO: 751 - RNA, 21 nt, synthetic construct
  source 1..21: mol_type = other RNA
  modified_base 1: mod_base = OTHER; note = 2'-O-methyladenosine-3'-phosphorothioate
  modified_base 2: mod_base = OTHER; note = 2'-O-methyladenosine-3'-phosphorothioate
  modified_base 3: mod_base = OTHER; note = 2'-O-methyluridine-3'-phosphate
  modified_base 4: mod_base = OTHER; note = 2'-O-methyluridine-3'-phosphate
  modified_base 5: mod_base = OTHER; note = 2'-O-methyluridine-3'-phosphate
  modified_base 6: mod_base = OTHER; note = 2'-O-methylguanosine-3'-phosphate
  modified_base 7: mod_base = OTHER; note = 2'-deoxy-2'-fluoroguanosine-3'-phosphate
  modified_base 8: mod_base = OTHER; note = 2'-O-methyladenosine-3'-phosphate
  modified_base 9: mod_base = OTHER; note = 2'-deoxy-2'-fluorouridine-3'-phosphate
  modified_base 10: mod_base = OTHER; note = 2'-deoxy-2'-fluoroguanosine-3'-phosphate
  modified_base 11: mod_base = OTHER; note = 2'-deoxy-2'-fluoroadenosine-3'-phosphate
  modified_base 12: mod_base = OTHER; note = 2'-O-methyladenosine-3'-phosphate
  modified_base 13: mod_base = OTHER; note = 2'-O-methyladenosine-3'-phosphate
  modified_base 14: mod_base = OTHER; note = 2'-O-methyladenosine-3'-phosphate
  modified_base 15: mod_base = OTHER; note = 2'-O-methylcytidine-3'-phosphate
  modified_base 16: mod_base = OTHER; note = 2'-O-methyluridine-3'-phosphate
  modified_base 17: mod_base = OTHER; note = 2'-O-methyladenosine-3'-phosphate
  modified_base 18: mod_base = OTHER; note = 2'-O-methylcytidine-3'-phosphate
  modified_base 19: mod_base = OTHER; note = 2'-O-methyluridine-3'-phosphate
  modified_base 20: mod_base = OTHER; note = 2'-O-methylguanosine-3'-phosphate
  modified_base 21: mod_base = OTHER; note = 2'-O-methyladenosine-3'-phosphate ((2S,4R)-1-[29-[[2-(acetylamino)-2-deoxy-beta-D-galactopyra nosyl]oxy]-14,14-bis[[3-[[3-[[5-[[2-(acetylamino)-2-deoxy-b eta-D-galactopyranosyl]oxy]-1-oxopentyl]amino]propyl]amino] -3-oxopropoxy]methyl]-1,12,19,25-tetraoxo-16-oxa-13,20,24-t riazanonacos-1-yl]-4-hydroxy-2-pyrrolidinyl)methyl ester
aatttggatgaaaactactga

SEQ ID NO: 752 - RNA, 21 nt, synthetic construct
  source 1..21: mol_type = other RNA
  modified_base 1: mod_base = OTHER; note = 2'-O-methylcytidine-3'-phosphorothioate
  modified_base 2: mod_base = OTHER; note = 2'-O-methylguanosine-3'-phosphorothioate
  modified_base 3: mod_base = OTHER; note = 2'-O-methylguanosine-3'-phosphate
  modified_base 4: mod_base = OTHER; note = 2'-O-methyluridine-3'-phosphate
  modified_base 5: mod_base = OTHER; note = 2'-O-methylguanosine-3'-phosphate
  modified_base 6: mod_base = OTHER; note = 2'-O-methylguanosine-3'-phosphate
  modified_base 7: mod_base = OTHER; note = 2'-deoxy-2'-fluoroguanosine-3'-phosphate
  modified_base 8: mod_base = OTHER; note = 2'-O-methyladenosine-3'-phosphate
  modified_base 9: mod_base = OTHER; note = 2'-deoxy-2'-fluoroguanosine-3'-phosphate
  modified_base 10: mod_base = OTHER; note = 2'-deoxy-2'-fluorouridine-3'-phosphate
  modified_base 11: mod_base = OTHER; note = 2'-deoxy-2'-fluoroadenosine-3'-phosphate
  modified_base 12: mod_base = OTHER; note = 2'-O-methylcytidine-3'-phosphate
  modified_base 13: mod_base = OTHER; note = 2'-O-methyluridine-3'-phosphate
  modified_base 14: mod_base = OTHER; note = 2'-O-methylguanosine-3'-phosphate
  modified_base 15: mod_base = OTHER; note = 2'-O-methyluridine-3'-phosphate
  modified_base 16: mod_base = OTHER; note = 2'-O-methyladenosine-3'-phosphate
  modified_base 17: mod_base = OTHER; note = 2'-O-methyladenosine-3'-phosphate
  modified_base 18: mod_base = OTHER; note = 2'-O-methylguanosine-3'-phosphate
  modified_base 19: mod_base = OTHER; note = 2'-O-methyladenosine-3'-phosphate
  modified_base 20: mod_base = OTHER; note = 2'-O-methyluridine-3'-phosphate
  modified_base 21: mod_base = OTHER; note = 2'-O-methyladenosine-3'-phosphate ((2S,4R)-1-[29-[[2-(acetylamino)-2-deoxy-beta-D-galactopyra nosyl]oxy]-14,14-bis[[3-[[3-[[5-[[2-(acetylamino)-2-deoxy-b eta-D-galactopyranosyl]oxy]-1-oxopentyl]amino]propyl]amino] -3-oxopropoxy]methyl]-1,12,19,25-tetraoxo-16-oxa-13,20,24-t riazanonacos-1-yl]-4-hydroxy-2-pyrrolidinyl)methyl ester
cggtgggagtactgtaagata

SEQ ID NO: 753 - RNA, 21 nt, synthetic construct
  source 1..21: mol_type = other RNA
  modified_base 1: mod_base = OTHER; note = 2'-O-methylguanosine-3'-phosphorothioate
  modified_base 2: mod_base = OTHER; note = 2'-O-methyluridine-3'-phosphorothioate
  modified_base 3: mod_base = OTHER; note = 2'-O-methylguanosine-3'-phosphate
  modified_base 4: mod_base = OTHER; note = 2'-O-methylguanosine-3'-phosphate
  modified_base 5: mod_base = OTHER; note = 2'-O-methylguanosine-3'-phosphate
  modified_base 6: mod_base = OTHER; note = 2'-O-methyladenosine-3'-phosphate
  modified_base 7: mod_base = OTHER; note = 2'-deoxy-2'-fluoroguanosine-3'-phosphate
  modified_base 8: mod_base = OTHER; note = 2'-O-methyluridine-3'-phosphate
  modified_base 9: mod_base = OTHER; note = 2'-deoxy-2'-fluoroadenosine-3'-phosphate
  modified_base 10: mod_base = OTHER; note = 2'-deoxy-2'-fluorocytidine-3'-phosphate
  modified_base 11: mod_base = OTHER; note = 2'-deoxy-2'-fluorouridine-3'-phosphate
  modified_base 12: mod_base = OTHER; note = 2'-O-methylguanosine-3'-phosphate
  modified_base 13: mod_base = OTHER; note = 2'-O-methyluridine-3'-phosphate
  modified_base 14: mod_base = OTHER; note = 2'-O-methyladenosine-3'-phosphate
  modified_base 15: mod_base = OTHER; note = 2'-O-methyladenosine-3'-phosphate
  modified_base 16: mod_base = OTHER; note = 2'-O-methylguanosine-3'-phosphate
  modified_base 17: mod_base = OTHER; note = 2'-O-methyladenosine-3'-phosphate
  modified_base 18: mod_base = OTHER; note = 2'-O-methyluridine-3'-phosphate
  modified_base 19: mod_base = OTHER; note = 2'-O-methyladenosine-3'-phosphate
  modified_base 20: mod_base = OTHER; note = 2'-O-methylcytidine-3'-phosphate
  modified_base 21: mod_base = OTHER; note = 2'-O-methyladenosine-3'-phosphate ((2S,4R)-1-[29-[[2-(acetylamino)-2-deoxy-beta-D-galactopyra nosyl]oxy]-14,14-bis[[3-[[3-[[5-[[2-(acetylamino)-2-deoxy-b eta-D-galactopyranosyl]oxy]-1-oxopentyl]amino]propyl]amino] -3-oxopropoxy]methyl]-1,12,19,25-tetraoxo-16-oxa-13,20,24-t riazanonacos-1-yl]-4-hydroxy-2-pyrrolidinyl)methyl ester
gtgggagtactgtaagataca

SEQ ID NO: 754 - RNA, 21 nt, synthetic construct
  source 1..21: mol_type = other RNA
  modified_base 1: mod_base = OTHER; note = 2'-O-methylguanosine-3'-phosphorothioate
  modified_base 2: mod_base = OTHER; note = 2'-O-methyluridine-3'-phosphorothioate
  modified_base 3: mod_base = OTHER; note = 2'-O-methylguanosine-3'-phosphate
  modified_base 4: mod_base = OTHER; note = 2'-O-methylguanosine-3'-phosphate
  modified_base 5: mod_base = OTHER; note = 2'-O-methylguanosine-3'-phosphate
  modified_base 6: mod_base = OTHER; note = 2'-O-methyladenosine-3'-phosphate
  modified_base 7: mod_base = OTHER; note = 2'-deoxy-2'-fluoroguanosine-3'-phosphate
  modified_base 8: mod_base = OTHER; note = 2'-O-methyluridine-3'-phosphate
  modified_base 9: mod_base = OTHER; note = 2'-deoxy-2'-fluoroadenosine-3'-phosphate
  modified_base 10: mod_base = OTHER; note = 2'-deoxy-2'-fluorocytidine-3'-phosphate
  modified_base 11: mod_base = OTHER; note = 2'-deoxy-2'-fluorouridine-3'-phosphate
  modified_base 12: mod_base = OTHER; note = 2'-O-methylguanosine-3'-phosphate
  modified_base 13: mod_base = OTHER; note = 2'-O-methyluridine-3'-phosphate
  modified_base 14: mod_base = OTHER; note = 2'-O-methyladenosine-3'-phosphate
  modified_base 15: mod_base = OTHER; note = 2'-O-methyluridine-3'-phosphate
  modified_base 16: mod_base = OTHER; note = 2'-O-methylguanosine-3'-phosphate
  modified_base 17: mod_base = OTHER; note = 2'-O-methyladenosine-3'-phosphate
  modified_base 18: mod_base = OTHER; note = 2'-O-methyluridine-3'-phosphate
  modified_base 19: mod_base = OTHER; note = 2'-O-methyladenosine-3'-phosphate
  modified_base 20: mod_base = OTHER; note = 2'-O-methylcytidine-3'-phosphate
  modified_base 21: mod_base = OTHER; note = 2'-O-methyladenosine-3'-phosphate ((2S,4R)-1-[29-[[2-(acetylamino)-2-deoxy-beta-D-galactopyra nosyl]oxy]-14,14-bis[[3-[[3-[[5-[[2-(acetylamino)-2-deoxy-b eta-D-galactopyranosyl]oxy]-1-oxopentyl]amino]propyl]amino] -3-oxopropoxy]methyl]-1,12,19,25-tetraoxo-16-oxa-13,20,24-t riazanonacos-1-yl]-4-hydroxy-2-pyrrolidinyl)methyl ester
gtgggagtactgtatgataca

SEQ ID NO: 755 - RNA, 21 nt, synthetic construct
  source 1..21: mol_type = other RNA
  modified_base 1: mod_base = OTHER; note = 2'-O-methyluridine-3'-phosphorothioate
  modified_base 2: mod_base = OTHER; note = 2'-O-methylguanosine-3'-phosphorothioate
  modified_base 3: mod_base = OTHER; note = 2'-O-methylguanosine-3'-phosphate
  modified_base 4: mod_base = OTHER; note = 2'-O-methylguanosine-3'-phosphate
  modified_base 5: mod_base = OTHER; note = 2'-O-methyladenosine-3'-phosphate
  modified_base 6: mod_base = OTHER; note = 2'-O-methylguanosine-3'-phosphate
  modified_base 7: mod_base = OTHER; note = 2'-deoxy-2'-fluorouridine-3'-phosphate
  modified_base 8: mod_base = OTHER; note = 2'-O-methyladenosine-3'-phosphate
  modified_base 9: mod_base = OTHER; note = 2'-deoxy-2'-fluorocytidine-3'-phosphate
  modified_base 10: mod_base = OTHER; note = 2'-deoxy-2'-fluorouridine-3'-phosphate
  modified_base 11: mod_base = OTHER; note = 2'-deoxy-2'-fluoroguanosine-3'-phosphate
  modified_base 12: mod_base = OTHER; note = 2'-O-methyluridine-3'-phosphate
  modified_base 13: mod_base = OTHER; note = 2'-O-methyladenosine-3'-phosphate
  modified_base 14: mod_base = OTHER; note = 2'-O-methyladenosine-3'-phosphate
  modified_base 15: mod_base = OTHER; note = 2'-O-methylguanosine-3'-phosphate
  modified_base 16: mod_base = OTHER; note = 2'-O-methyladenosine-3'-phosphate
  modified_base 17: mod_base = OTHER; note = 2'-O-methyluridine-3'-phosphate
  modified_base 18: mod_base = OTHER; note = 2'-O-methyladenosine-3'-phosphate
  modified_base 19: mod_base = OTHER; note = 2'-O-methylcytidine-3'-phosphate
  modified_base 20: mod_base = OTHER; note = 2'-O-methylcytidine-3'-phosphate
  modified_base 21: mod_base = OTHER; note = 2'-O-methyladenosine-3'-phosphate ((2S,4R)-1-[29-[[2-(acetylamino)-2-deoxy-beta-D-galactopyra nosyl]oxy]-14,14-bis[[3-[[3-[[5-[[2-(acetylamino)-2-deoxy-b eta-D-galactopyranosyl]oxy]-1-oxopentyl]amino]propyl]amino] -3-oxopropoxy]methyl]-1,12,19,25-tetraoxo-16-oxa-13,20,24-t riazanonacos-1-yl]-4-hydroxy-2-pyrrolidinyl)methyl ester
tgggagtactgtaagatacca

SEQ ID NO: 756 - RNA, 21 nt, synthetic construct
  source 1..21: mol_type = other RNA
  modified_base 1: mod_base = OTHER; note = 2'-O-methyluridine-3'-phosphorothioate
  modified_base 2: mod_base = OTHER; note = 2'-O-methylguanosine-3'-phosphorothioate
  modified_base 3: mod_base = OTHER; note = 2'-O-methylguanosine-3'-phosphate
  modified_base 4: mod_base = OTHER; note = 2'-O-methylguanosine-3'-phosphate
  modified_base 5: mod_base = OTHER; note = 2'-O-methyladenosine-3'-phosphate
  modified_base 6: mod_base = OTHER; note = 2'-O-methylguanosine-3'-phosphate
  modified_base 7: mod_base = OTHER; note = 2'-deoxy-2'-fluorouridine-3'-phosphate
  modified_base 8: mod_base = OTHER; note = 2'-O-methyladenosine-3'-phosphate
  modified_base 9: mod_base = OTHER; note = 2'-deoxy-2'-fluorocytidine-3'-phosphate
  modified_base 10: mod_base = OTHER; note = 2'-deoxy-2'-fluorouridine-3'-phosphate
  modified_base 11: mod_base = OTHER; note = 2'-deoxy-2'-fluoroguanosine-3'-phosphate
  modified_base 12: mod_base = OTHER; note = 2'-O-methyluridine-3'-phosphate
  modified_base 13: mod_base = OTHER; note = 2'-O-methyladenosine-3'-phosphate
  modified_base 14: mod_base = OTHER; note = 2'-O-methyladenosine-3'-phosphate
  modified_base 15: mod_base = OTHER; note = 2'-O-methyluridine-3'-phosphate
  modified_base 16: mod_base = OTHER; note = 2'-O-methyladenosine-3'-phosphate
  modified_base 17: mod_base = OTHER; note = 2'-O-methyluridine-3'-phosphate
  modified_base 18: mod_base = OTHER; note = 2'-O-methyladenosine-3'-phosphate
  modified_base 19: mod_base = OTHER; note = 2'-O-methylcytidine-3'-phosphate
  modified_base 20: mod_base = OTHER; note = 2'-O-methylcytidine-3'-phosphate
  modified_base 21: mod_base = OTHER; note = 2'-O-methyladenosine-3'-phosphate ((2S,4R)-1-[29-[[2-(acetylamino)-2-deoxy-beta-D-galactopyra nosyl]oxy]-14,14-bis[[3-[[3-[[5-[[2-(acetylamino)-2-deoxy-b eta-D-galactopyranosyl]oxy]-1-oxopentyl]amino]propyl]amino] -3-oxopropoxy]methyl]-1,12,19,25-tetraoxo-16-oxa-13,20,24-t riazanonacos-1-yl]-4-hydroxy-2-pyrrolidinyl)methyl ester
tgggagtactgtaatatacca

SEQ ID NO: 757 - RNA, 21 nt, synthetic construct
  source 1..21: mol_type = other RNA
  modified_base 1: mod_base = OTHER; note = 2'-O-methylguanosine-3'-phosphorothioate
  modified_base 2: mod_base = OTHER; note = 2'-O-methylguanosine-3'-phosphorothioate
  modified_base 3: mod_base = OTHER; note = 2'-O-methyladenosine-3'-phosphate
  modified_base 4: mod_base = OTHER; note = 2'-O-methylguanosine-3'-phosphate
  modified_base 5: mod_base = OTHER; note = 2'-O-methyluridine-3'-phosphate
  modified_base 6: mod_base = OTHER; note = 2'-O-methyladenosine-3'-phosphate
  modified_base 7: mod_base = OTHER; note = 2'-deoxy-2'-fluorocytidine-3'-phosphate
  modified_base 8: mod_base = OTHER; note = 2'-O-methyluridine-3'-phosphate
  modified_base 9: mod_base = OTHER; note = 2'-deoxy-2'-fluoroguanosine-3'-phosphate
  modified_base 10: mod_base = OTHER; note = 2'-deoxy-2'-fluorouridine-3'-phosphate
  modified_base 11: mod_base = OTHER; note = 2'-deoxy-2'-fluoroadenosine-3'-phosphate
  modified_base 12: mod_base = OTHER; note = 2'-O-methyladenosine-3'-phosphate
  modified_base 13: mod_base = OTHER; note = 2'-O-methylguanosine-3'-phosphate
  modified_base 14: mod_base = OTHER; note = 2'-O-methyladenosine-3'-phosphate
  modified_base 15: mod_base = OTHER; note = 2'-O-methyluridine-3'-phosphate
  modified_base 16: mod_base = OTHER; note = 2'-O-methyladenosine-3'-phosphate
  modified_base 17: mod_base = OTHER; note = 2'-O-methylcytidine-3'-phosphate
  modified_base 18: mod_base = OTHER; note = 2'-O-methylcytidine-3'-phosphate
  modified_base 19: mod_base = OTHER; note = 2'-O-methylguanosine-3'-phosphate
  modified_base 20: mod_base = OTHER; note = 2'-O-methyluridine-3'-phosphate
  modified_base 21: mod_base = OTHER; note = 2'-O-methyladenosine-3'-phosphate ((2S,4R)-1-[29-[[2-(acetylamino)-2-deoxy-beta-D-galactopyra nosyl]oxy]-14,14-bis[[3-[[3-[[5-[[2-(acetylamino)-2-deoxy-b eta-D-galactopyranosyl]oxy]-1-oxopentyl]amino]propyl]amino] -3-oxopropoxy]methyl]-1,12,19,25-tetraoxo-16-oxa-13,20,24-t riazanonacos-1-yl]-4-hydroxy-2-pyrrolidinyl)methyl ester
ggagtactgtaagataccgta

SEQ ID NO: 758 - RNA, 21 nt, synthetic construct
  source 1..21: mol_type = other RNA
  modified_base 1: mod_base = OTHER; note = 2'-O-methylcytidine-3'-phosphorothioate
  modified_base 2: mod_base = OTHER; note = 2'-O-methyluridine-3'-phosphorothioate
  modified_base 3: mod_base = OTHER; note = 2'-O-methylguanosine-3'-phosphate
  modified_base 4: mod_base = OTHER; note = 2'-O-methyluridine-3'-phosphate
  modified_base 5: mod_base = OTHER; note = 2'-O-methyladenosine-3'-phosphate
  modified_base 6: mod_base = OTHER; note = 2'-O-methyladenosine-3'-phosphate
  modified_base 7: mod_base = OTHER; note = 2'-deoxy-2'-fluoroguanosine-3'-phosphate
  modified_base 8: mod_base = OTHER; note = 2'-O-methyladenosine-3'-phosphate
  modified_base 9: mod_base = OTHER; note = 2'-deoxy-2'-fluorouridine-3'-phosphate
  modified_base 10: mod_base = OTHER; note = 2'-deoxy-2'-fluoroadenosine-3'-phosphate
  modified_base 11: mod_base = OTHER; note = 2'-deoxy-2'-fluorocytidine-3'-phosphate
  modified_base 12: mod_base = OTHER; note = 2'-O-methylcytidine-3'-phosphate
  modified_base 13: mod_base = OTHER; note = 2'-O-methylguanosine-3'-phosphate
  modified_base 14: mod_base = OTHER; note = 2'-O-methyluridine-3'-phosphate
  modified_base 15: mod_base = OTHER; note = 2'-O-methylcytidine-3'-phosphate
  modified_base 16: mod_base = OTHER; note = 2'-O-methylcytidine-3'-phosphate
  modified_base 17: mod_base = OTHER; note = 2'-O-methyluridine-3'-phosphate
  modified_base 18: mod_base = OTHER; note = 2'-O-methylguanosine-3'-phosphate
  modified_base 19: mod_base = OTHER; note = 2'-O-methyluridine-3'-phosphate
  modified_base 20: mod_base = OTHER; note = 2'-O-methylguanosine-3'-phosphate
  modified_base 21: mod_base = OTHER; note = 2'-O-methyladenosine-3'-phosphate ((2S,4R)-1-[29-[[2-(acetylamino)-2-deoxy-beta-D-galactopyra nosyl]oxy]-14,14-bis[[3-[[3-[[5-[[2-(acetylamino)-2-deoxy-b eta-D-galactopyranosyl]oxy]-1-oxopentyl]amino]propyl]amino] -3-oxopropoxy]methyl]-1,12,19,25-tetraoxo-16-oxa-13,20,24-t riazanonacos-1-yl]-4-hydroxy-2-pyrrolidinyl)methyl ester
ctgtaagataccgtcctgtga

SEQ ID NO: 759 - RNA, 21 nt, synthetic construct
  source 1..21: mol_type = other RNA
  modified_base 1: mod_base = OTHER; note = 2'-O-methylcytidine-3'-phosphorothioate
  modified_base 2: mod_base = OTHER; note = 2'-O-methyladenosine-3'-phosphorothioate
  modified_base 3: mod_base = OTHER; note = 2'-O-methylcytidine-3'-phosphate
  modified_base 4: mod_base = OTHER; note = 2'-O-methylcytidine-3'-phosphate
  modified_base 5: mod_base = OTHER; note = 2'-O-methyladenosine-3'-phosphate
  modified_base 6: mod_base = OTHER; note = 2'-O-methylcytidine-3'-phosphate
  modified_base 7: mod_base = OTHER; note = 2'-deoxy-2'-fluorocytidine-3'-phosphate
  modified_base 8: mod_base = OTHER; note = 2'-O-methyladenosine-3'-phosphate
  modified_base 9: mod_base = OTHER; note = 2'-deoxy-2'-fluorocytidine-3'-phosphate
  modified_base 10: mod_base = OTHER; note = 2'-deoxy-2'-fluorocytidine-3'-phosphate
  modified_base 11: mod_base = OTHER; note = 2'-deoxy-2'-fluoroadenosine-3'-phosphate
  modified_base 12: mod_base = OTHER; note = 2'-O-methylcytidine-3'-phosphate
  modified_base 13: mod_base = OTHER; note = 2'-O-methyladenosine-3'-phosphate
  modified_base 14: mod_base = OTHER; note = 2'-O-methylguanosine-3'-phosphate
  modified_base 15: mod_base = OTHER; note = 2'-O-methylguanosine-3'-phosphate
  modified_base 16: mod_base = OTHER; note = 2'-O-methyladenosine-3'-phosphate
  modified_base 17: mod_base = OTHER; note = 2'-O-methyladenosine-3'-phosphate
  modified_base 18: mod_base = OTHER; note = 2'-O-methyladenosine-3'-phosphate
  modified_base 19: mod_base = OTHER; note = 2'-O-methylguanosine-3'-phosphate
  modified_base 20: mod_base = OTHER; note = 2'-O-methyladenosine-3'-phosphate
  modified_base 21: mod_base = OTHER; note = 2'-O-methyladenosine-3'-phosphate ((2S,4R)-1-[29-[[2-(acetylamino)-2-deoxy-beta-D-galactopyra nosyl]oxy]-14,14-bis[[3-[[3-[[5-[[2-(acetylamino)-2-deoxy-b eta-D-galactopyranosyl]oxy]-1-oxopentyl]amino]propyl]amino] -3-oxopropoxy]methyl]-1,12,19,25-tetraoxo-16-oxa-13,20,24-t riazanonacos-1-yl]-4-hydroxy-2-pyrrolidinyl)methyl ester
caccaccaccacaggaaagaa

SEQ ID NO: 760 - RNA, 21 nt, synthetic construct
  source 1..21: mol_type = other RNA
  modified_base 1: mod_base = OTHER; note = 2'-O-methylcytidine-3'-phosphorothioate
  modified_base 2: mod_base = OTHER; note = 2'-O-methyladenosine-3'-phosphorothioate
  modified_base 3: mod_base = OTHER; note = 2'-O-methylcytidine-3'-phosphate
  modified_base 4: mod_base = OTHER; note = 2'-O-methylcytidine-3'-phosphate
  modified_base 5: mod_base = OTHER; note = 2'-O-methyladenosine-3'-phosphate
  modified_base 6: mod_base = OTHER; note = 2'-O-methylcytidine-3'-phosphate
  modified_base 7: mod_base = OTHER; note = 2'-deoxy-2'-fluorocytidine-3'-phosphate
  modified_base 8: mod_base = OTHER; note = 2'-O-methyladenosine-3'-phosphate
  modified_base 9: mod_base = OTHER; note = 2'-deoxy-2'-fluorocytidine-3'-phosphate
  modified_base 10: mod_base = OTHER; note = 2'-deoxy-2'-fluorocytidine-3'-phosphate
  modified_base 11: mod_base = OTHER; note = 2'-deoxy-2'-fluoroadenosine-3'-phosphate
  modified_base 12: mod_base = OTHER; note = 2'-O-methylcytidine-3'-phosphate
  modified_base 13: mod_base = OTHER; note = 2'-O-methyladenosine-3'-phosphate
  modified_base 14: mod_base = OTHER; note = 2'-O-methylguanosine-3'-phosphate
  modified_base 15: mod_base = OTHER; note = 2'-O-methyluridine-3'-phosphate
  modified_base 16: mod_base = OTHER; note = 2'-O-methyladenosine-3'-phosphate
  modified_base 17: mod_base = OTHER; note = 2'-O-methyladenosine-3'-phosphate
  modified_base 18: mod_base = OTHER; note = 2'-O-methyladenosine-3'-phosphate
  modified_base 19: mod_base = OTHER; note = 2'-O-methylguanosine-3'-phosphate
  modified_base 20: mod_base = OTHER; note = 2'-O-methyladenosine-3'-phosphate
  modified_base 21: mod_base = OTHER; note = 2'-O-methyladenosine-3'-phosphate ((2S,4R)-1-[29-[[2-(acetylamino)-2-deoxy-beta-D-galactopyra nosyl]oxy]-14,14-bis[[3-[[3-[[5-[[2-(acetylamino)-2-deoxy-b eta-D-galactopyranosyl]oxy]-1-oxopentyl]amino]propyl]amino] -3-oxopropoxy]methyl]-1,12,19,25-tetraoxo-16-oxa-13,20,24-t riazanonacos-1-yl]-4-hydroxy-2-pyrrolidinyl)methyl ester
caccaccaccacagtaaagaa

SEQ ID NO: 761 - RNA, 21 nt, synthetic construct
  source 1..21: mol_type = other RNA
  modified_base 1: mod_base = OTHER; note = 2'-O-methylcytidine-3'-phosphorothioate
  modified_base 2: mod_base = OTHER; note = 2'-O-methyladenosine-3'-phosphorothioate
  modified_base 3: mod_base = OTHER; note = 2'-O-methylcytidine-3'-phosphate
  modified_base 4: mod_base = OTHER; note = 2'-O-methylcytidine-3'-phosphate
  modified_base 5: mod_base = OTHER; note = 2'-O-methyladenosine-3'-phosphate
  modified_base 6: mod_base = OTHER; note = 2'-O-methylcytidine-3'-phosphate
  modified_base 7: mod_base = OTHER; note = 2'-deoxy-2'-fluoroadenosine-3'-phosphate
  modified_base 8: mod_base = OTHER; note = 2'-O-methylguanosine-3'-phosphate
  modified_base 9: mod_base = OTHER; note = 2'-deoxy-2'-fluoroguanosine-3'-phosphate
  modified_base 10: mod_base = OTHER; note = 2'-deoxy-2'-fluoroadenosine-3'-phosphate
  modified_base 11: mod_base = OTHER; note = 2'-deoxy-2'-fluoroadenosine-3'-phosphate
  modified_base 12: mod_base = OTHER; note = 2'-O-methyladenosine-3'-phosphate
  modified_base 13: mod_base = OTHER; note = 2'-O-methylguanosine-3'-phosphate
  modified_base 14: mod_base = OTHER; note = 2'-O-methyladenosine-3'-phosphate
  modified_base 15: mod_base = OTHER; note = 2'-O-methyladenosine-3'-phosphate
  modified_base 16: mod_base = OTHER; note = 2'-O-methylguanosine-3'-phosphate
  modified_base 17: mod_base = OTHER; note = 2'-O-methyluridine-3'-phosphate
  modified_base 18: mod_base = OTHER; note = 2'-O-methylguanosine-3'-phosphate
  modified_base 19: mod_base = OTHER; note = 2'-O-methyluridine-3'-phosphate
  modified_base 20: mod_base = OTHER; note = 2'-O-methylcytidine-3'-phosphate
  modified_base 21: mod_base = OTHER; note = 2'-O-methyladenosine-3'-phosphate ((2S,4R)-1-[29-[[2-(acetylamino)-2-deoxy-beta-D-galactopyra nosyl]oxy]-14,14-bis[[3-[[3-[[5-[[2-(acetylamino)-2-deoxy-b eta-D-galactopyranosyl]oxy]-1-oxopentyl]amino]propyl]amino] -3-oxopropoxy]methyl]-1,12,19,25-tetraoxo-16-oxa-13,20,24-t riazanonacos-1-yl]-4-hydroxy-2-pyrrolidinyl)methyl ester
caccacaggaaagaagtgtca

SEQ ID NO: 762 - RNA, 21 nt, synthetic construct
  source 1..21: mol_type = other RNA
  modified_base 1: mod_base = OTHER; note = 2'-O-methylcytidine-3'-phosphorothioate
  modified_base 2: mod_base = OTHER; note = 2'-O-methyladenosine-3'-phosphorothioate
  modified_base 3: mod_base = OTHER; note = 2'-O-methylcytidine-3'-phosphate
  modified_base 4: mod_base = OTHER; note = 2'-O-methylcytidine-3'-phosphate
  modified_base 5: mod_base = OTHER; note = 2'-O-methyladenosine-3'-phosphate
  modified_base 6: mod_base = OTHER; note = 2'-O-methylcytidine-3'-phosphate
  modified_base 7: mod_base = OTHER; note = 2'-deoxy-2'-fluoroadenosine-3'-phosphate
  modified_base 8: mod_base = OTHER; note = 2'-O-methylguanosine-3'-phosphate
  modified_base 9: mod_base = OTHER; note = 2'-deoxy-2'-fluoroguanosine-3'-phosphate
  modified_base 10: mod_base = OTHER; note = 2'-deoxy-2'-fluoroadenosine-3'-phosphate
  modified_base 11: mod_base = OTHER; note = 2'-deoxy-2'-fluoroadenosine-3'-phosphate
  modified_base 12: mod_base = OTHER; note = 2'-O-methyladenosine-3'-phosphate
  modified_base 13: mod_base = OTHER; note = 2'-O-methylguanosine-3'-phosphate
  modified_base 14: mod_base = OTHER; note = 2'-O-methyladenosine-3'-phosphate
  modified_base 15: mod_base = OTHER; note = 2'-O-methyluridine-3'-phosphate
  modified_base 16: mod_base = OTHER; note = 2'-O-methylguanosine-3'-phosphate
  modified_base 17: mod_base = OTHER; note = 2'-O-methyluridine-3'-phosphate
  modified_base 18: mod_base = OTHER; note = 2'-O-methylguanosine-3'-phosphate
  modified_base 19: mod_base = OTHER; note = 2'-O-methyluridine-3'-phosphate
  modified_base 20: mod_base = OTHER; note = 2'-O-methylcytidine-3'-phosphate
  modified_base 21: mod_base = OTHER; note = 2'-O-methyladenosine-3'-phosphate ((2S,4R)-1-[29-[[2-(acetylamino)-2-deoxy-beta-D-galactopyra nosyl]oxy]-14,14-bis[[3-[[3-[[5-[[2-(acetylamino)-2-deoxy-b eta-D-galactopyranosyl]oxy]-1-oxopentyl]amino]propyl]amino] -3-oxopropoxy]methyl]-1,12,19,25-tetraoxo-16-oxa-13,20,24-t riazanonacos-1-yl]-4-hydroxy-2-pyrrolidinyl)methyl ester
caccacaggaaagatgtgtca

SEQ ID NO: 763 - RNA, 21 nt, synthetic construct
  source 1..21: mol_type = other RNA
  modified_base 1: mod_base = OTHER; note = 2'-O-methylcytidine-3'-phosphorothioate
  modified_base 2: mod_base = OTHER; note = 2'-O-methylcytidine-3'-phosphorothioate
  modified_base 3: mod_base = OTHER; note = 2'-O-methyladenosine-3'-phosphate
  modified_base 4: mod_base = OTHER; note = 2'-O-methylcytidine-3'-phosphate
  modified_base 5: mod_base = OTHER; note = 2'-O-methyladenosine-3'-phosphate
  modified_base 6: mod_base = OTHER; note = 2'-O-methylguanosine-3'-phosphate
  modified_base 7: mod_base = OTHER; note = 2'-deoxy-2'-fluoroguanosine-3'-phosphate
  modified_base 8: mod_base = OTHER; note = 2'-O-methyladenosine-3'-phosphate
  modified_base 9: mod_base = OTHER; note = 2'-deoxy-2'-fluoroadenosine-3'-phosphate
  modified_base 10: mod_base = OTHER; note = 2'-deoxy-2'-fluoroadenosine-3'-phosphate
  modified_base 11: mod_base = OTHER; note = 2'-deoxy-2'-fluoroguanosine-3'-phosphate
  modified_base 12: mod_base = OTHER; note = 2'-O-methyladenosine-3'-phosphate
  modified_base 13: mod_base = OTHER; note = 2'-O-methyladenosine-3'-phosphate
  modified_base 14: mod_base = OTHER; note = 2'-O-methylguanosine-3'-phosphate
  modified_base 15: mod_base = OTHER; note = 2'-O-methyluridine-3'-phosphate
  modified_base 16: mod_base = OTHER; note = 2'-O-methylguanosine-3'-phosphate
  modified_base 17: mod_base = OTHER; note = 2'-O-methyluridine-3'-phosphate
  modified_base 18: mod_base = OTHER; note = 2'-O-methylcytidine-3'-phosphate
  modified_base 19: mod_base = OTHER; note = 2'-O-methyladenosine-3'-phosphate
  modified_base 20: mod_base = OTHER; note = 2'-O-methylguanosine-3'-phosphate
  modified_base 21: mod_base = OTHER; note = 2'-O-methyladenosine-3'-phosphate ((2S,4R)-1-[29-[[2-(acetylamino)-2-deoxy-beta-D-galactopyra nosyl]oxy]-14,14-bis[[3-[[3-[[5-[[2-(acetylamino)-2-deoxy-b eta-D-galactopyranosyl]oxy]-1-oxopentyl]amino]propyl]amino] -3-oxopropoxy]methyl]-1,12,19,25-tetraoxo-16-oxa-13,20,24-t riazanonacos-1-yl]-4-hydroxy-2-pyrrolidinyl)methyl ester
ccacaggaaagaagtgtcaga

SEQ ID NO: 764 - RNA, 21 nt, synthetic construct
  source 1..21: mol_type = other RNA
  modified_base 1: mod_base = OTHER; note = 2'-O-methylcytidine-3'-phosphorothioate
  modified_base 2: mod_base = OTHER; note = 2'-O-methyladenosine-3'-phosphorothioate
  modified_base 3: mod_base = OTHER; note = 2'-O-methylcytidine-3'-phosphate
  modified_base 4: mod_base = OTHER; note = 2'-O-methyladenosine-3'-phosphate
  modified_base 5: mod_base = OTHER; note = 2'-O-methylguanosine-3'-phosphate
  modified_base 6: mod_base = OTHER; note = 2'-O-methylguanosine-3'-phosphate
  modified_base 7: mod_base = OTHER; note = 2'-deoxy-2'-fluoroadenosine-3'-phosphate
  modified_base 8: mod_base = OTHER; note = 2'-O-methyladenosine-3'-phosphate
  modified_base 9: mod_base = OTHER; note = 2'-deoxy-2'-fluoroadenosine-3'-phosphate
  modified_base 10: mod_base = OTHER; note = 2'-deoxy-2'-fluoroguanosine-3'-phosphate
  modified_base 11: mod_base = OTHER; note = 2'-deoxy-2'-fluoroadenosine-3'-phosphate
  modified_base 12: mod_base = OTHER; note = 2'-O-methyladenosine-3'-phosphate
  modified_base 13: mod_base = OTHER; note = 2'-O-methylguanosine-3'-phosphate
  modified_base 14: mod_base = OTHER; note = 2'-O-methyluridine-3'-phosphate
  modified_base 15: mod_base = OTHER; note = 2'-O-methylguanosine-3'-phosphate
  modified_base 16: mod_base = OTHER; note = 2'-O-methyluridine-3'-phosphate
  modified_base 17: mod_base = OTHER; note = 2'-O-methylcytidine-3'-phosphate
  modified_base 18: mod_base = OTHER; note = 2'-O-methyladenosine-3'-phosphate
  modified_base 19: mod_base = OTHER; note = 2'-O-methylguanosine-3'-phosphate
  modified_base 20: mod_base = OTHER; note = 2'-O-methyluridine-3'-phosphate
  modified_base 21: mod_base = OTHER; note = 2'-O-methyladenosine-3'-phosphate ((2S,4R)-1-[29-[[2-(acetylamino)-2-deoxy-beta-D-galactopyra nosyl]oxy]-14,14-bis[[3-[[3-[[5-[[2-(acetylamino)-2-deoxy-b eta-D-galactopyranosyl]oxy]-1-oxopentyl]amino]propyl]amino] -3-oxopropoxy]methyl]-1,12,19,25-tetraoxo-16-oxa-13,20,24-t riazanonacos-1-yl]-4-hydroxy-2-pyrrolidinyl)methyl ester
cacaggaaagaagtgtcagta

SEQ ID NO: 765 - RNA, 21 nt, synthetic construct
  source 1..21: mol_type = other RNA
  modified_base 1: mod_base = OTHER; note = 2'-O-methylcytidine-3'-phosphorothioate
  modified_base 2: mod_base = OTHER; note = 2'-O-methyladenosine-3'-phosphorothioate
  modified_base 3: mod_base = OTHER; note = 2'-O-methylcytidine-3'-phosphate
  modified_base 4: mod_base = OTHER; note = 2'-O-methyladenosine-3'-phosphate
  modified_base 5: mod_base = OTHER; note = 2'-O-methylguanosine-3'-phosphate
  modified_base 6: mod_base = OTHER; note = 2'-O-methylguanosine-3'-phosphate
  modified_base 7: mod_base = OTHER; note = 2'-deoxy-2'-fluoroadenosine-3'-phosphate
  modified_base 8: mod_base = OTHER; note = 2'-O-methyladenosine-3'-phosphate
  modified_base 9: mod_base = OTHER; note = 2'-deoxy-2'-fluoroadenosine-3'-phosphate
  modified_base 10: mod_base = OTHER; note = 2'-deoxy-2'-fluoroguanosine-3'-phosphate
  modified_base 11: mod_base = OTHER; note = 2'-deoxy-2'-fluoroadenosine-3'-phosphate
  modified_base 12: mod_base = OTHER; note = 2'-O-methyladenosine-3'-phosphate
  modified_base 13: mod_base = OTHER; note = 2'-O-methylguanosine-3'-phosphate
  modified_base 14: mod_base = OTHER; note = 2'-O-methyluridine-3'-phosphate
  modified_base 15: mod_base = OTHER; note = 2'-O-methyluridine-3'-phosphate
  modified_base 16: mod_base = OTHER; note = 2'-O-methyluridine-3'-phosphate
  modified_base 17: mod_base = OTHER; note = 2'-O-methylcytidine-3'-phosphate
  modified_base 18: mod_base = OTHER; note = 2'-O-methyladenosine-3'-phosphate
  modified_base 19: mod_base = OTHER; note = 2'-O-methylguanosine-3'-phosphate
  modified_base 20: mod_base = OTHER; note = 2'-O-methyluridine-3'-phosphate
  modified_base 21: mod_base = OTHER; note = 2'-O-methyladenosine-3'-phosphate ((2S,4R)-1-[29-[[2-(acetylamino)-2-deoxy-beta-D-galactopyra nosyl]oxy]-14,14-bis[[3-[[3-[[5-[[2-(acetylamino)-2-deoxy-b eta-D-galactopyranosyl]oxy]-1-oxopentyl]amino]propyl]amino] -3-oxopropoxy]methyl]-1,12,19,25-tetraoxo-16-oxa-13,20,24-t riazanonacos-1-yl]-4-hydroxy-2-pyrrolidinyl)methyl ester
cacaggaaagaagtttcagta

SEQ ID NO: 766 - RNA, 21 nt, synthetic construct
  source 1..21: mol_type = other RNA
  modified_base 1: mod_base = OTHER; note = 2'-O-methyladenosine-3'-phosphorothioate
  modified_base 2: mod_base = OTHER; note = 2'-O-methylguanosine-3'-phosphorothioate
  modified_base 3: mod_base = OTHER; note = 2'-O-methylguanosine-3'-phosphate
  modified_base 4: mod_base = OTHER; note = 2'-O-methyladenosine-3'-phosphate
  modified_base 5: mod_base = OTHER; note = 2'-O-methyladenosine-3'-phosphate
  modified_base 6: mod_base = OTHER; note = 2'-O-methyladenosine-3'-phosphate
  modified_base 7: mod_base = OTHER; note = 2'-deoxy-2'-fluoroguanosine-3'-phosphate
  modified_base 8: mod_base = OTHER; note = 2'-O-methyladenosine-3'-phosphate
  modified_base 9: mod_base = OTHER; note = 2'-deoxy-2'-fluoroadenosine-3'-phosphate
  modified_base 10: mod_base = OTHER; note = 2'-deoxy-2'-fluoroguanosine-3'-phosphate
  modified_base 11: mod_base = OTHER; note = 2'-deoxy-2'-fluorouridine-3'-phosphate
  modified_base 12: mod_base = OTHER; note = 2'-O-methylguanosine-3'-phosphate
  modified_base 13: mod_base = OTHER; note = 2'-O-methyluridine-3'-phosphate
  modified_base 14: mod_base = OTHER; note = 2'-O-methylcytidine-3'-phosphate
  modified_base 15: mod_base = OTHER; note = 2'-O-methyladenosine-3'-phosphate
  modified_base 16: mod_base = OTHER; note = 2'-O-methylguanosine-3'-phosphate
  modified_base 17: mod_base = OTHER; note = 2'-O-methyluridine-3'-phosphate
  modified_base 18: mod_base = OTHER; note = 2'-O-methylcytidine-3'-phosphate
  modified_base 19: mod_base = OTHER; note = 2'-O-methyluridine-3'-phosphate
  modified_base 20: mod_base = OTHER; note = 2'-O-methyluridine-3'-phosphate
  modified_base 21: mod_base = OTHER; note = 2'-O-methyladenosine-3'-phosphate ((2S,4R)-1-[29-[[2-(acetylamino)-2-deoxy-beta-D-galactopyra nosyl]oxy]-14,14-bis[[3-[[3-[[5-[[2-(acetylamino)-2-deoxy-b eta-D-galactopyranosyl]oxy]-1-oxopentyl]amino]propyl]amino] -3-oxopropoxy]methyl]-1,12,19,25-tetraoxo-16-oxa-13,20,24-t riazanonacos-1-yl]-4-hydroxy-2-pyrrolidinyl)methyl ester
aggaaagaagtgtcagtctta

SEQ ID NO: 767 - RNA, 21 nt, synthetic construct
  source 1..21: mol_type = other RNA
  modified_base 1: mod_base = OTHER; note = 2'-O-methyladenosine-3'-phosphorothioate
  modified_base 2: mod_base = OTHER; note = 2'-O-methylguanosine-3'-phosphorothioate
  modified_base 3: mod_base = OTHER; note = 2'-O-methylguanosine-3'-phosphate
  modified_base 4: mod_base = OTHER; note = 2'-O-methyladenosine-3'-phosphate
  modified_base 5: mod_base = OTHER; note = 2'-O-methyladenosine-3'-phosphate
  modified_base 6: mod_base = OTHER; note = 2'-O-methyladenosine-3'-phosphate
  modified_base 7: mod_base = OTHER; note = 2'-deoxy-2'-fluoroguanosine-3'-phosphate
  modified_base 8: mod_base = OTHER; note = 2'-O-methyladenosine-3'-phosphate
  modified_base 9: mod_base = OTHER; note = 2'-deoxy-2'-fluoroadenosine-3'-phosphate
  modified_base 10: mod_base = OTHER; note = 2'-deoxy-2'-fluoroguanosine-3'-phosphate
  modified_base 11: mod_base = OTHER; note = 2'-deoxy-2'-fluorouridine-3'-phosphate
  modified_base 12: mod_base = OTHER; note = 2'-O-methylguanosine-3'-phosphate
  modified_base 13: mod_base = OTHER; note = 2'-O-methyluridine-3'-phosphate
  modified_base 14: mod_base = OTHER; note = 2'-O-methylcytidine-3'-phosphate
  modified_base 15: mod_base = OTHER; note = 2'-O-methyluridine-3'-phosphate
  modified_base 16: mod_base = OTHER; note = 2'-O-methylguanosine-3'-phosphate
  modified_base 17: mod_base = OTHER; note = 2'-O-methyluridine-3'-phosphate
  modified_base 18: mod_base = OTHER; note = 2'-O-methylcytidine-3'-phosphate
  modified_base 19: mod_base = OTHER; note = 2'-O-methyluridine-3'-phosphate
  modified_base 20: mod_base = OTHER; note = 2'-O-methyluridine-3'-phosphate
  modified_base 21: mod_base = OTHER; note = 2'-O-methyladenosine-3'-phosphate ((2S,4R)-1-[29-[[2-(acetylamino)-2-deoxy-beta-D-galactopyra nosyl]oxy]-14,14-bis[[3-[[3-[[5-[[2-(acetylamino)-2-deoxy-b eta-D-galactopyranosyl]oxy]-1-oxopentyl]amino]propyl]amino] -3-oxopropoxy]methyl]-1,12,19,25-tetraoxo-16-oxa-13,20,24-t riazanonacos-1-yl]-4-hydroxy-2-pyrrolidinyl)methyl ester
aggaaagaagtgtctgtctta

SEQ ID NO: 768 - RNA, 21 nt, synthetic construct
  source 1..21: mol_type = other RNA
  modified_base 1: mod_base = OTHER; note = 2'-O-methylguanosine-3'-phosphorothioate
  modified_base 2: mod_base = OTHER; note = 2'-O-methylguanosine-3'-phosphorothioate
  modified_base 3: mod_base = OTHER; note = 2'-O-methyladenosine-3'-phosphate
  modified_base 4: mod_base = OTHER; note = 2'-O-methyladenosine-3'-phosphate
  modified_base 5: mod_base = OTHER; note = 2'-O-methyladenosine-3'-phosphate
  modified_base 6: mod_base = OTHER; note = 2'-O-methylguanosine-3'-phosphate
  modified_base 7: mod_base = OTHER; note = 2'-deoxy-2'-fluoroadenosine-3'-phosphate
  modified_base 8: mod_base = OTHER; note = 2'-O-methyladenosine-3'-phosphate
  modified_base 9: mod_base = OTHER; note = 2'-deoxy-2'-fluoroguanosine-3'-phosphate
  modified_base 10: mod_base = OTHER; note = 2'-deoxy-2'-fluorouridine-3'-phosphate
  modified_base 11: mod_base = OTHER; note = 2'-deoxy-2'-fluoroguanosine-3'-phosphate
  modified_base 12: mod_base = OTHER; note = 2'-O-methyluridine-3'-phosphate
  modified_base 13: mod_base = OTHER; note = 2'-O-methylcytidine-3'-phosphate
  modified_base 14: mod_base = OTHER; note = 2'-O-methyladenosine-3'-phosphate
  modified_base 15: mod_base = OTHER; note = 2'-O-methylguanosine-3'-phosphate
  modified_base 16: mod_base = OTHER; note = 2'-O-methyluridine-3'-phosphate
  modified_base 17: mod_base = OTHER; note = 2'-O-methylcytidine-3'-phosphate
  modified_base 18: mod_base = OTHER; note = 2'-O-methyluridine-3'-phosphate
  modified_base 19: mod_base = OTHER; note = 2'-O-methyluridine-3'-phosphate
  modified_base 20: mod_base = OTHER; note = 2'-O-methylguanosine-3'-phosphate
  modified_base 21: mod_base = OTHER; note = 2'-O-methyladenosine-3'-phosphate ((2S,4R)-1-[29-[[2-(acetylamino)-2-deoxy-beta-D-galactopyra nosyl]oxy]-14,14-bis[[3-[[3-[[5-[[2-(acetylamino)-2-deoxy-b eta-D-galactopyranosyl]oxy]-1-oxopentyl]amino]propyl]amino] -3-oxopropoxy]methyl]-1,12,19,25-tetraoxo-16-oxa-13,20,24-t riazanonacos-1-yl]-4-hydroxy-2-pyrrolidinyl)methyl ester
ggaaagaagtgtcagtcttga

SEQ ID NO: 769 - RNA, 21 nt, synthetic construct
  source 1..21: mol_type = other RNA
  modified_base 1: mod_base = OTHER; note = 2'-O-methylguanosine-3'-phosphorothioate
  modified_base 2: mod_base = OTHER; note = 2'-O-methyladenosine-3'-phosphorothioate
  modified_base 3: mod_base = OTHER; note = 2'-O-methyladenosine-3'-phosphate
  modified_base 4: mod_base = OTHER; note = 2'-O-methyladenosine-3'-phosphate
  modified_base 5: mod_base = OTHER; note = 2'-O-methylguanosine-3'-phosphate
  modified_base 6: mod_base = OTHER; note = 2'-O-methyladenosine-3'-phosphate
  modified_base 7: mod_base = OTHER; note = 2'-deoxy-2'-fluoroadenosine-3'-phosphate
  modified_base 8: mod_base = OTHER; note = 2'-O-methylguanosine-3'-phosphate
  modified_base 9: mod_base = OTHER; note = 2'-deoxy-2'-fluorouridine-3'-phosphate
  modified_base 10: mod_base = OTHER; note = 2'-deoxy-2'-fluoroguanosine-3'-phosphate
  modified_base 11: mod_base = OTHER; note = 2'-deoxy-2'-fluorouridine-3'-phosphate
  modified_base 12: mod_base = OTHER; note = 2'-O-methylcytidine-3'-phosphate
  modified_base 13: mod_base = OTHER; note = 2'-O-methyladenosine-3'-phosphate
  modified_base 14: mod_base = OTHER; note = 2'-O-methylguanosine-3'-phosphate
  modified_base 15: mod_base = OTHER; note = 2'-O-methyluridine-3'-phosphate
  modified_base 16: mod_base = OTHER; note = 2'-O-methylcytidine-3'-phosphate
  modified_base 17: mod_base = OTHER; note = 2'-O-methyluridine-3'-phosphate
  modified_base 18: mod_base = OTHER; note = 2'-O-methyluridine-3'-phosphate
  modified_base 19: mod_base = OTHER; note = 2'-O-methylguanosine-3'-phosphate
  modified_base 20: mod_base = OTHER; note = 2'-O-methylguanosine-3'-phosphate
  modified_base 21: mod_base = OTHER; note = 2'-O-methyladenosine-3'-phosphate ((2S,4R)-1-[29-[[2-(acetylamino)-2-deoxy-beta-D-galactopyra nosyl]oxy]-14,14-bis[[3-[[3-[[5-[[2-(acetylamino)-2-deoxy-b eta-D-galactopyranosyl]oxy]-1-oxopentyl]amino]propyl]amino] -3-oxopropoxy]methyl]-1,12,19,25-tetraoxo-16-oxa-13,20,24-t riazanonacos-1-yl]-4-hydroxy-2-pyrrolidinyl)methyl ester
gaaagaagtgtcagtcttgga

SEQ ID NO: 770 - RNA, 21 nt, synthetic construct
  source 1..21: mol_type = other RNA
  modified_base 1: mod_base = OTHER; note = 2'-O-methyladenosine-3'-phosphorothioate
  modified_base 2: mod_base = OTHER; note = 2'-O-methyladenosine-3'-phosphorothioate
  modified_base 3: mod_base = OTHER; note = 2'-O-methyladenosine-3'-phosphate
  modified_base 4: mod_base = OTHER; note = 2'-O-methylguanosine-3'-phosphate
  modified_base 5: mod_base = OTHER; note = 2'-O-methyladenosine-3'-phosphate
  modified_base 6: mod_base = OTHER; note = 2'-O-methyladenosine-3'-phosphate
  modified_base 7: mod_base = OTHER; note = 2'-deoxy-2'-fluoroguanosine-3'-phosphate
  modified_base 8: mod_base = OTHER; note = 2'-O-methyluridine-3'-phosphate
  modified_base 9: mod_base = OTHER; note = 2'-deoxy-2'-fluoroguanosine-3'-phosphate
  modified_base 10: mod_base = OTHER; note = 2'-deoxy-2'-fluorouridine-3'-phosphate
  modified_base 11: mod_base = OTHER; note = 2'-deoxy-2'-fluorocytidine-3'-phosphate
  modified_base 12: mod_base = OTHER; note = 2'-O-methyladenosine-3'-phosphate
  modified_base 13: mod_base = OTHER; note = 2'-O-methylguanosine-3'-phosphate
  modified_base 14: mod_base = OTHER; note = 2'-O-methyluridine-3'-phosphate
  modified_base 15: mod_base = OTHER; note = 2'-O-methylcytidine-3'-phosphate
  modified_base 16: mod_base = OTHER; note = 2'-O-methyluridine-3'-phosphate
  modified_base 17: mod_base = OTHER; note = 2'-O-methyluridine-3'-phosphate
  modified_base 18: mod_base = OTHER; note = 2'-O-methylguanosine-3'-phosphate
  modified_base 19: mod_base = OTHER; note = 2'-O-methylguanosine-3'-phosphate
  modified_base 20: mod_base = OTHER; note = 2'-O-methyluridine-3'-phosphate
  modified_base 21: mod_base = OTHER; note = 2'-O-methyladenosine-3'-phosphate ((2S,4R)-1-[29-[[2-(acetylamino)-2-deoxy-beta-D-galactopyra nosyl]oxy]-14,14-bis[[3-[[3-[[5-[[2-(acetylamino)-2-deoxy-b eta-D-galactopyranosyl]oxy]-1-oxopentyl]amino]propyl]amino] -3-oxopropoxy]methyl]-1,12,19,25-tetraoxo-16-oxa-13,20,24-t riazanonacos-1-yl]-4-hydroxy-2-pyrrolidinyl)methyl ester
aaagaagtgtcagtcttggta

SEQ ID NO: 771 - RNA, 21 nt, synthetic construct
  source 1..21: mol_type = other RNA
  modified_base 1: mod_base = OTHER; note = 2'-O-methyladenosine-3'-phosphorothioate
  modified_base 2: mod_base = OTHER; note = 2'-O-methylguanosine-3'-phosphorothioate
  modified_base 3: mod_base = OTHER; note = 2'-O-methyladenosine-3'-phosphate
  modified_base 4: mod_base = OTHER; note = 2'-O-methyladenosine-3'-phosphate
  modified_base 5: mod_base = OTHER; note = 2'-O-methylguanosine-3'-phosphate
  modified_base 6: mod_base = OTHER; note = 2'-O-methyluridine-3'-phosphate
  modified_base 7: mod_base = OTHER; note = 2'-deoxy-2'-fluoroguanosine-3'-phosphate
  modified_base 8: mod_base = OTHER; note = 2'-O-methyluridine-3'-phosphate
  modified_base 9: mod_base = OTHER; note = 2'-deoxy-2'-fluorocytidine-3'-phosphate
  modified_base 10: mod_base = OTHER; note = 2'-deoxy-2'-fluoroadenosine-3'-phosphate
  modified_base 11: mod_base = OTHER; note = 2'-deoxy-2'-fluoroguanosine-3'-phosphate
  modified_base 12: mod_base = OTHER; note = 2'-O-methyluridine-3'-phosphate
  modified_base 13: mod_base = OTHER; note = 2'-O-methylcytidine-3'-phosphate
  modified_base 14: mod_base = OTHER; note = 2'-O-methyluridine-3'-phosphate
  modified_base 15: mod_base = OTHER; note = 2'-O-methyluridine-3'-phosphate
  modified_base 16: mod_base = OTHER; note = 2'-O-methylguanosine-3'-phosphate
  modified_base 17: mod_base = OTHER; note = 2'-O-methylguanosine-3'-phosphate
  modified_base 18: mod_base = OTHER; note = 2'-O-methyluridine-3'-phosphate
  modified_base 19: mod_base = OTHER; note = 2'-O-methylcytidine-3'-phosphate
  modified_base 20: mod_base = OTHER; note = 2'-O-methyladenosine-3'-phosphate
  modified_base 21: mod_base = OTHER; note = 2'-O-methyladenosine-3'-phosphate ((2S,4R)-1-[29-[[2-(acetylamino)-2-deoxy-beta-D-galactopyra nosyl]oxy]-14,14-bis[[3-[[3-[[5-[[2-(acetylamino)-2-deoxy-b eta-D-galactopyranosyl]oxy]-1-oxopentyl]amino]propyl]amino] -3-oxopropoxy]methyl]-1,12,19,25-tetraoxo-16-oxa-13,20,24-t riazanonacos-1-yl]-4-hydroxy-2-pyrrolidinyl)methyl ester
agaagtgtcagtcttggtcaa

SEQ ID NO: 772 - RNA, 21 nt, synthetic construct
  source 1..21: mol_type = other RNA
  modified_base 1: mod_base = OTHER; note = 2'-O-methyladenosine-3'-phosphorothioate
  modified_base 2: mod_base = OTHER; note = 2'-O-methyladenosine-3'-phosphorothioate
  modified_base 3: mod_base = OTHER; note = 2'-O-methylguanosine-3'-phosphate
  modified_base 4: mod_base = OTHER; note = 2'-O-methyluridine-3'-phosphate
  modified_base 5: mod_base = OTHER; note = 2'-O-methylguanosine-3'-phosphate
  modified_base 6: mod_base = OTHER; note = 2'-O-methyluridine-3'-phosphate
  modified_base 7: mod_base = OTHER; note = 2'-deoxy-2'-fluorocytidine-3'-phosphate
  modified_base 8: mod_base = OTHER; note = 2'-O-methyladenosine-3'-phosphate
  modified_base 9: mod_base = OTHER; note = 2'-deoxy-2'-fluoroguanosine-3'-phosphate
  modified_base 10: mod_base = OTHER; note = 2'-deoxy-2'-fluorouridine-3'-phosphate
  modified_base 11: mod_base = OTHER; note = 2'-deoxy-2'-fluorocytidine-3'-phosphate
  modified_base 12: mod_base = OTHER; note = 2'-O-methyluridine-3'-phosphate
  modified_base 13: mod_base = OTHER; note = 2'-O-methyluridine-3'-phosphate
  modified_base 14: mod_base = OTHER; note = 2'-O-methylguanosine-3'-phosphate
  modified_base 15: mod_base = OTHER; note = 2'-O-methylguanosine-3'-phosphate
  modified_base 16: mod_base = OTHER; note = 2'-O-methyluridine-3'-phosphate
  modified_base 17: mod_base = OTHER; note = 2'-O-methylcytidine-3'-phosphate
  modified_base 18: mod_base = OTHER; note = 2'-O-methyladenosine-3'-phosphate
  modified_base 19: mod_base = OTHER; note = 2'-O-methyluridine-3'-phosphate
  modified_base 20: mod_base = OTHER; note = 2'-O-methylcytidine-3'-phosphate
  modified_base 21: mod_base = OTHER; note = 2'-O-methyladenosine-3'-phosphate ((2S,4R)-1-[29-[[2-(acetylamino)-2-deoxy-beta-D-galactopyra nosyl]oxy]-14,14-bis[[3-[[3-[[5-[[2-(acetylamino)-2-deoxy-b eta-D-galactopyranosyl]oxy]-1-oxopentyl]amino]propyl]amino] -3-oxopropoxy]methyl]-1,12,19,25-tetraoxo-16-oxa-13,20,24-t riazanonacos-1-yl]-4-hydroxy-2-pyrrolidinyl)methyl ester
aagtgtcagtcttggtcatca

SEQ ID NO: 773 - RNA, 21 nt, synthetic construct
  source 1..21: mol_type = other RNA
  modified_base 1: mod_base = OTHER; note = 2'-O-methyladenosine-3'-phosphorothioate
  modified_base 2: mod_base = OTHER; note = 2'-O-methyladenosine-3'-phosphorothioate
  modified_base 3: mod_base = OTHER; note = 2'-O-methylguanosine-3'-phosphate
  modified_base 4: mod_base = OTHER; note = 2'-O-methyluridine-3'-phosphate
  modified_base 5: mod_base = OTHER; note = 2'-O-methylguanosine-3'-phosphate
  modified_base 6: mod_base = OTHER; note = 2'-O-methyluridine-3'-phosphate
  modified_base 7: mod_base = OTHER; note = 2'-deoxy-2'-fluorocytidine-3'-phosphate
  modified_base 8: mod_base = OTHER; note = 2'-O-methyladenosine-3'-phosphate
  modified_base 9: mod_base = OTHER; note = 2'-deoxy-2'-fluoroguanosine-3'-phosphate
  modified_base 10: mod_base = OTHER; note = 2'-deoxy-2'-fluorouridine-3'-phosphate
  modified_base 11: mod_base = OTHER; note = 2'-deoxy-2'-fluorocytidine-3'-phosphate
  modified_base 12: mod_base = OTHER; note = 2'-O-methyluridine-3'-phosphate
  modified_base 13: mod_base = OTHER; note = 2'-O-methyluridine-3'-phosphate
  modified_base 14: mod_base = OTHER; note = 2'-O-methylguanosine-3'-phosphate
  modified_base 15: mod_base = OTHER; note = 2'-O-methyluridine-3'-phosphate
  modified_base 16: mod_base = OTHER; note = 2'-O-methyluridine-3'-phosphate
  modified_base 17: mod_base = OTHER; note = 2'-O-methylcytidine-3'-phosphate
  modified_base 18: mod_base = OTHER; note = 2'-O-methyladenosine-3'-phosphate
  modified_base 19: mod_base = OTHER; note = 2'-O-methyluridine-3'-phosphate
  modified_base 20: mod_base = OTHER; note = 2'-O-methylcytidine-3'-phosphate
  modified_base 21: mod_base = OTHER; note = 2'-O-methyladenosine-3'-phosphate ((2S,4R)-1-[29-[[2-(acetylamino)-2-deoxy-beta-D-galactopyra nosyl]oxy]-14,14-bis[[3-[[3-[[5-[[2-(acetylamino)-2-deoxy-b eta-D-galactopyranosyl]oxy]-1-oxopentyl]amino]propyl]amino] -3-oxopropoxy]methyl]-1,12,19,25-tetraoxo-16-oxa-13,20,24-t riazanonacos-1-yl]-4-hydroxy-2-pyrrolidinyl)methyl ester
aagtgtcagtcttgttcatca

SEQ ID NO: 774 - RNA, 21 nt, synthetic construct
  source 1..21: mol_type = other RNA
  modified_base 1: mod_base = OTHER; note = 2'-O-methyladenosine-3'-phosphorothioate
  modified_base 2: mod_base = OTHER; note = 2'-O-methylguanosine-3'-phosphorothioate
  modified_base 3: mod_base = OTHER; note = 2'-O-methyluridine-3'-phosphate
  modified_base 4: mod_base = OTHER; note = 2'-O-methylguanosine-3'-phosphate
  modified_base 5: mod_base = OTHER; note = 2'-O-methyluridine-3'-phosphate
  modified_base 6: mod_base = OTHER; note = 2'-O-methylcytidine-3'-phosphate
  modified_base 7: mod_base = OTHER; note = 2'-deoxy-2'-fluoroadenosine-3'-phosphate
  modified_base 8: mod_base = OTHER; note = 2'-O-methylguanosine-3'-phosphate
  modified_base 9: mod_base = OTHER; note = 2'-deoxy-2'-fluorouridine-3'-phosphate
  modified_base 10: mod_base = OTHER; note = 2'-deoxy-2'-fluorocytidine-3'-phosphate
  modified_base 11: mod_base = OTHER; note = 2'-deoxy-2'-fluorouridine-3'-phosphate
  modified_base 12: mod_base = OTHER; note = 2'-O-methyluridine-3'-phosphate
  modified_base 13: mod_base = OTHER; note = 2'-O-methylguanosine-3'-phosphate
  modified_base 14: mod_base = OTHER; note = 2'-O-methylguanosine-3'-phosphate
  modified_base 15: mod_base = OTHER; note = 2'-O-methyluridine-3'-phosphate
  modified_base 16: mod_base = OTHER; note = 2'-O-methylcytidine-3'-phosphate
  modified_base 17: mod_base = OTHER; note = 2'-O-methyladenosine-3'-phosphate
  modified_base 18: mod_base = OTHER; note = 2'-O-methyluridine-3'-phosphate
  modified_base 19: mod_base = OTHER; note = 2'-O-methylcytidine-3'-phosphate
  modified_base 20: mod_base = OTHER; note = 2'-O-methyluridine-3'-phosphate
  modified_base 21: mod_base = OTHER; note = 2'-O-methyladenosine-3'-phosphate ((2S,4R)-1-[29-[[2-(acetylamino)-2-deoxy-beta-D-galactopyra nosyl]oxy]-14,14-bis[[3-[[3-[[5-[[2-(acetylamino)-2-deoxy-b eta-D-galactopyranosyl]oxy]-1-oxopentyl]amino]propyl]amino] -3-oxopropoxy]methyl]-1,12,19,25-tetraoxo-16-oxa-13,20,24-t riazanonacos-1-yl]-4-hydroxy-2-pyrrolidinyl)methyl ester
agtgtcagtcttggtcatcta

SEQ ID NO: 775 - RNA, 21 nt, synthetic construct
  source 1..21: mol_type = other RNA
  modified_base 1: mod_base = OTHER; note = 2'-O-methyladenosine-3'-phosphorothioate
  modified_base 2: mod_base = OTHER; note = 2'-O-methylguanosine-3'-phosphorothioate
  modified_base 3: mod_base = OTHER; note = 2'-O-methyluridine-3'-phosphate
  modified_base 4: mod_base = OTHER; note = 2'-O-methylguanosine-3'-phosphate
  modified_base 5: mod_base = OTHER; note = 2'-O-methyluridine-3'-phosphate
  modified_base 6: mod_base = OTHER; note = 2'-O-methylcytidine-3'-phosphate
  modified_base 7: mod_base = OTHER; note = 2'-deoxy-2'-fluoroadenosine-3'-phosphate
  modified_base 8: mod_base = OTHER; note = 2'-O-methylguanosine-3'-phosphate
  modified_base 9: mod_base = OTHER; note = 2'-deoxy-2'-fluorouridine-3'-phosphate
  modified_base 10: mod_base = OTHER; note = 2'-deoxy-2'-fluorocytidine-3'-phosphate
  modified_base 11: mod_base = OTHER; note = 2'-deoxy-2'-fluorouridine-3'-phosphate
  modified_base 12: mod_base = OTHER; note = 2'-O-methyluridine-3'-phosphate
  modified_base 13: mod_base = OTHER; note = 2'-O-methylguanosine-3'-phosphate
  modified_base 14: mod_base = OTHER; note = 2'-O-methylguanosine-3'-phosphate
  modified_base 15: mod_base = OTHER; note = 2'-O-methyluridine-3'-phosphate
  modified_base 16: mod_base = OTHER; note = 2'-O-methyluridine-3'-phosphate
  modified_base 17: mod_base = OTHER; note = 2'-O-methyladenosine-3'-phosphate
  modified_base 18: mod_base = OTHER; note = 2'-O-methyluridine-3'-phosphate
  modified_base 19: mod_base = OTHER; note = 2'-O-methylcytidine-3'-phosphate
  modified_base 20: mod_base = OTHER; note = 2'-O-methyluridine-3'-phosphate
  modified_base 21: mod_base = OTHER; note = 2'-O-methyladenosine-3'-phosphate ((2S,4R)-1-[29-[[2-(acetylamino)-2-deoxy-beta-D-galactopyra nosyl]oxy]-14,14-bis[[3-[[3-[[5-[[2-(acetylamino)-2-deoxy-b eta-D-galactopyranosyl]oxy]-1-oxopentyl]amino]propyl]amino] -3-oxopropoxy]methyl]-1,12,19,25-tetraoxo-16-oxa-13,20,24-t riazanonacos-1-yl]-4-hydroxy-2-pyrrolidinyl)methyl ester
agtgtcagtcttggttatcta

SEQ ID NO: 776 - RNA, 21 nt, synthetic construct
  source 1..21: mol_type = other RNA
  modified_base 1: mod_base = OTHER; note = 2'-O-methylguanosine-3'-phosphorothioate
  modified_base 2: mod_base = OTHER; note = 2'-O-methyluridine-3'-phosphorothioate
  modified_base 3: mod_base = OTHER; note = 2'-O-methylcytidine-3'-phosphate
  modified_base 4: mod_base = OTHER; note = 2'-O-methyladenosine-3'-phosphate
  modified_base 5: mod_base = OTHER; note = 2'-O-methylguanosine-3'-phosphate
  modified_base 6: mod_base = OTHER; note = 2'-O-methyluridine-3'-phosphate
  modified_base 7: mod_base = OTHER; note = 2'-deoxy-2'-fluorocytidine-3'-phosphate
  modified_base 8: mod_base = OTHER; note = 2'-O-methyluridine-3'-phosphate
  modified_base 9: mod_base = OTHER; note = 2'-deoxy-2'-fluorouridine-3'-phosphate
  modified_base 10: mod_base = OTHER; note = 2'-deoxy-2'-fluoroguanosine-3'-phosphate
  modified_base 11: mod_base = OTHER; note = 2'-deoxy-2'-fluoroguanosine-3'-phosphate
  modified_base 12: mod_base = OTHER; note = 2'-O-methyluridine-3'-phosphate
  modified_base 13: mod_base = OTHER; note = 2'-O-methylcytidine-3'-phosphate
  modified_base 14: mod_base = OTHER; note = 2'-O-methyladenosine-3'-phosphate
  modified_base 15: mod_base = OTHER; note = 2'-O-methyluridine-3'-phosphate
  modified_base 16: mod_base = OTHER; note = 2'-O-methylcytidine-3'-phosphate
  modified_base 17: mod_base = OTHER; note = 2'-O-methyluridine-3'-phosphate
  modified_base 18: mod_base = OTHER; note = 2'-O-methyladenosine-3'-phosphate
  modified_base 19: mod_base = OTHER; note = 2'-O-methyluridine-3'-phosphate
  modified_base 20: mod_base = OTHER; note = 2'-O-methylguanosine-3'-phosphate
  modified_base 21: mod_base = OTHER; note = 2'-O-methyladenosine-3'-phosphate ((2S,4R)-1-[29-[[2-(acetylamino)-2-deoxy-beta-D-galactopyra nosyl]oxy]-14,14-bis[[3-[[3-[[5-[[2-(acetylamino)-2-deoxy-b eta-D-galactopyranosyl]oxy]-1-oxopentyl]amino]propyl]amino] -3-oxopropoxy]methyl]-1,12,19,25-tetraoxo-16-oxa-13,20,24-t riazanonacos-1-yl]-4-hydroxy-2-pyrrolidinyl)methyl ester
gtcagtcttggtcatctatga

SEQ ID NO: 777 - RNA, 21 nt, synthetic construct
  source 1..21: mol_type = other RNA
  modified_base 1: mod_base = OTHER; note = 2'-O-methylguanosine-3'-phosphorothioate
  modified_base 2: mod_base = OTHER; note = 2'-O-methylguanosine-3'-phosphorothioate
  modified_base 3: mod_base = OTHER; note = 2'-O-methyluridine-3'-phosphate
  modified_base 4: mod_base = OTHER; note = 2'-O-methylguanosine-3'-phosphate
  modified_base 5: mod_base = OTHER; note = 2'-O-methylguanosine-3'-phosphate
  modified_base 6: mod_base = OTHER; note = 2'-O-methylguanosine-3'-phosphate
  modified_base 7: mod_base = OTHER; note = 2'-deoxy-2'-fluoroadenosine-3'-phosphate
  modified_base 8: mod_base = OTHER; note = 2'-O-methylguanosine-3'-phosphate
  modified_base 9: mod_base = OTHER; note = 2'-deoxy-2'-fluorouridine-3'-phosphate
  modified_base 10: mod_base = OTHER; note = 2'-deoxy-2'-fluoroadenosine-3'-phosphate
  modified_base 11: mod_base = OTHER; note = 2'-deoxy-2'-fluorocytidine-3'-phosphate
  modified_base 12: mod_base = OTHER; note = 2'-O-methyluridine-3'-phosphate
  modified_base 13: mod_base = OTHER; note = 2'-O-methylguanosine-3'-phosphate
  modified_base 14: mod_base = OTHER; note = 2'-O-methylcytidine-3'-phosphate
  modified_base 15: mod_base = OTHER; note = 2'-O-methyladenosine-3'-phosphate
  modified_base 16: mod_base = OTHER; note = 2'-O-methyladenosine-3'-phosphate
  modified_base 17: mod_base = OTHER; note = 2'-O-methylcytidine-3'-phosphate
  modified_base 18: mod_base = OTHER; note = 2'-O-methylcytidine-3'-phosphate
  modified_base 19: mod_base = OTHER; note = 2'-O-methyluridine-3'-phosphate
  modified_base 20: mod_base = OTHER; note = 2'-O-methylguanosine-3'-phosphate
  modified_base 21: mod_base = OTHER; note = 2'-O-methyladenosine-3'-phosphate ((2S,4R)-1-[29-[[2-(acetylamino)-2-deoxy-beta-D-galactopyra nosyl]oxy]-14,14-bis[[3-[[3-[[5-[[2-(acetylamino)-2-deoxy-b eta-D-galactopyranosyl]oxy]-1-oxopentyl]amino]propyl]amino] -3-oxopropoxy]methyl]-1,12,19,25-tetraoxo-16-oxa-13,20,24-t riazanonacos-1-yl]-4-hydroxy-2-pyrrolidinyl)methyl ester
ggtgggagtactgcaacctga

SEQ ID NO: 778 - RNA, 21 nt, synthetic construct
  source 1..21: mol_type = other RNA
  modified_base 1: mod_base = OTHER; note = 2'-O-methyluridine-3'-phosphorothioate
  modified_base 2: mod_base = OTHER; note = 2'-O-methylguanosine-3'-phosphorothioate
  modified_base 3: mod_base = OTHER; note = 2'-O-methylguanosine-3'-phosphate
  modified_base 4: mod_base = OTHER; note = 2'-O-methylguanosine-3'-phosphate
  modified_base 5: mod_base = OTHER; note = 2'-O-methyladenosine-3'-phosphate
  modified_base 6: mod_base = OTHER; note = 2'-O-methylguanosine-3'-phosphate
  modified_base 7: mod_base = OTHER; note = 2'-deoxy-2'-fluorouridine-3'-phosphate
  modified_base 8: mod_base = OTHER; note = 2'-O-methyladenosine-3'-phosphate
  modified_base 9: mod_base = OTHER; note = 2'-deoxy-2'-fluorocytidine-3'-phosphate
  modified_base 10: mod_base = OTHER; note = 2'-deoxy-2'-fluorouridine-3'-phosphate
  modified_base 11: mod_base = OTHER; note = 2'-deoxy-2'-fluoroguanosine-3'-phosphate
  modified_base 12: mod_base = OTHER; note = 2'-O-methylcytidine-3'-phosphate
  modified_base 13: mod_base = OTHER; note = 2'-O-methyladenosine-3'-phosphate
  modified_base 14: mod_base = OTHER; note = 2'-O-methyladenosine-3'-phosphate
  modified_base 15: mod_base = OTHER; note = 2'-O-methylcytidine-3'-phosphate
  modified_base 16: mod_base = OTHER; note = 2'-O-methylcytidine-3'-phosphate
  modified_base 17: mod_base = OTHER; note = 2'-O-methyluridine-3'-phosphate
  modified_base 18: mod_base = OTHER; note = 2'-O-methylguanosine-3'-phosphate
  modified_base 19: mod_base = OTHER; note = 2'-O-methyladenosine-3'-phosphate
  modified_base 20: mod_base = OTHER; note = 2'-O-methyladenosine-3'-phosphate
  modified_base 21: mod_base = OTHER; note = 2'-O-methyladenosine-3'-phosphate ((2S,4R)-1-[29-[[2-(acetylamino)-2-deoxy-beta-D-galactopyra nosyl]oxy]-14,14-bis[[3-[[3-[[5-[[2-(acetylamino)-2-deoxy-b eta-D-galactopyranosyl]oxy]-1-oxopentyl]amino]propyl]amino] -3-oxopropoxy]methyl]-1,12,19,25-tetraoxo-16-oxa-13,20,24-t riazanonacos-1-yl]-4-hydroxy-2-pyrrolidinyl)methyl ester
tgggagtactgcaacctgaaa

SEQ ID NO: 779 - RNA, 21 nt, synthetic construct
  source 1..21: mol_type = other RNA
  modified_base 1: mod_base = OTHER; note = 2'-O-methyluridine-3'-phosphorothioate
  modified_base 2: mod_base = OTHER; note = 2'-O-methylguanosine-3'-phosphorothioate
  modified_base 3: mod_base = OTHER; note = 2'-O-methylguanosine-3'-phosphate
  modified_base 4: mod_base = OTHER; note = 2'-O-methylguanosine-3'-phosphate
  modified_base 5: mod_base = OTHER; note = 2'-O-methyladenosine-3'-phosphate
  modified_base 6: mod_base = OTHER; note = 2'-O-methylguanosine-3'-phosphate
  modified_base 7: mod_base = OTHER; note = 2'-deoxy-2'-fluorouridine-3'-phosphate
  modified_base 8: mod_base = OTHER; note = 2'-O-methyladenosine-3'-phosphate
  modified_base 9: mod_base = OTHER; note = 2'-deoxy-2'-fluorocytidine-3'-phosphate
  modified_base 10: mod_base = OTHER; note = 2'-deoxy-2'-fluorouridine-3'-phosphate
  modified_base 11: mod_base = OTHER; note = 2'-deoxy-2'-fluoroguanosine-3'-phosphate
  modified_base 12: mod_base = OTHER; note = 2'-O-methylcytidine-3'-phosphate
  modified_base 13: mod_base = OTHER; note = 2'-O-methyladenosine-3'-phosphate
  modified_base 14: mod_base = OTHER; note = 2'-O-methyladenosine-3'-phosphate
  modified_base 15: mod_base = OTHER; note = 2'-O-methyluridine-3'-phosphate
  modified_base 16: mod_base = OTHER; note = 2'-O-methylcytidine-3'-phosphate
  modified_base 17: mod_base = OTHER; note = 2'-O-methyluridine-3'-phosphate
  modified_base 18: mod_base = OTHER; note = 2'-O-methylguanosine-3'-phosphate
  modified_base 19: mod_base = OTHER; note = 2'-O-methyladenosine-3'-phosphate
  modified_base 20: mod_base = OTHER; note = 2'-O-methyladenosine-3'-phosphate
  modified_base 21: mod_base = OTHER; note = 2'-O-methyladenosine-3'-phosphate ((2S,4R)-1-[29-[[2-(acetylamino)-2-deoxy-beta-D-galactopyra nosyl]oxy]-14,14-bis[[3-[[3-[[5-[[2-(acetylamino)-2-deoxy-b eta-D-galactopyranosyl]oxy]-1-oxopentyl]amino]propyl]amino] -3-oxopropoxy]methyl]-1,12,19,25-tetraoxo-16-oxa-13,20,24-t riazanonacos-1-yl]-4-hydroxy-2-pyrrolidinyl)methyl ester
tgggagtactgcaatctgaaa

SEQ ID NO: 780 - RNA, 21 nt, synthetic construct
  source 1..21: mol_type = other RNA
  modified_base 1: mod_base = OTHER; note = 2'-O-methylguanosine-3'-phosphorothioate
  modified_base 2: mod_base = OTHER; note = 2'-O-methylguanosine-3'-phosphorothioate
  modified_base 3: mod_base = OTHER; note = 2'-O-methyladenosine-3'-phosphate
  modified_base 4: mod_base = OTHER; note = 2'-O-methylguanosine-3'-phosphate
  modified_base 5: mod_base = OTHER; note = 2'-O-methyluridine-3'-phosphate
  modified_base 6: mod_base = OTHER; note = 2'-O-methyladenosine-3'-phosphate
  modified_base 7: mod_base = OTHER; note = 2'-deoxy-2'-fluorocytidine-3'-phosphate
  modified_base 8: mod_base = OTHER; note = 2'-O-methyluridine-3'-phosphate
  modified_base 9: mod_base = OTHER; note = 2'-deoxy-2'-fluoroguanosine-3'-phosphate
  modified_base 10: mod_base = OTHER; note = 2'-deoxy-2'-fluorocytidine-3'-phosphate
  modified_base 11: mod_base = OTHER; note = 2'-deoxy-2'-fluoroadenosine-3'-phosphate
  modified_base 12: mod_base = OTHER; note = 2'-O-methyladenosine-3'-phosphate
  modified_base 13: mod_base = OTHER; note = 2'-O-methylcytidine-3'-phosphate
  modified_base 14: mod_base = OTHER; note = 2'-O-methylcytidine-3'-phosphate
  modified_base 15: mod_base = OTHER; note = 2'-O-methyluridine-3'-phosphate
  modified_base 16: mod_base = OTHER; note = 2'-O-methylguanosine-3'-phosphate
  modified_base 17: mod_base = OTHER; note = 2'-O-methyladenosine-3'-phosphate
  modified_base 18: mod_base = OTHER; note = 2'-O-methyladenosine-3'-phosphate
  modified_base 19: mod_base = OTHER; note = 2'-O-methyladenosine-3'-phosphate
  modified_base 20: mod_base = OTHER; note = 2'-O-methyladenosine-3'-phosphate
  modified_base 21: mod_base = OTHER; note = 2'-O-methyladenosine-3'-phosphate ((2S,4R)-1-[29-[[2-(acetylamino)-2-deoxy-beta-D-galactopyra nosyl]oxy]-14,14-bis[[3-[[3-[[5-[[2-(acetylamino)-2-deoxy-b eta-D-galactopyranosyl]oxy]-1-oxopentyl]amino]propyl]amino] -3-oxopropoxy]methyl]-1,12,19,25-tetraoxo-16-oxa-13,20,24-t riazanonacos-1-yl]-4-hydroxy-2-pyrrolidinyl)methyl ester
ggagtactgcaacctgaaaaa

SEQ ID NO: 781 - RNA, 21 nt, synthetic construct
  source 1..21: mol_type = other RNA
  modified_base 1: mod_base = OTHER; note = 2'-O-methylguanosine-3'-phosphorothioate
  modified_base 2: mod_base = OTHER; note = 2'-O-methylguanosine-3'-phosphorothioate
  modified_base 3: mod_base = OTHER; note = 2'-O-methyladenosine-3'-phosphate
  modified_base 4: mod_base = OTHER; note = 2'-O-methylguanosine-3'-phosphate
  modified_base 5: mod_base = OTHER; note = 2'-O-methyluridine-3'-phosphate
  modified_base 6: mod_base = OTHER; note = 2'-O-methyladenosine-3'-phosphate
  modified_base 7: mod_base = OTHER; note = 2'-deoxy-2'-fluorocytidine-3'-phosphate
  modified_base 8: mod_base = OTHER; note = 2'-O-methyluridine-3'-phosphate
  modified_base 9: mod_base = OTHER; note = 2'-deoxy-2'-fluoroguanosine-3'-phosphate
  modified_base 10: mod_base = OTHER; note = 2'-deoxy-2'-fluorocytidine-3'-phosphate
  modified_base 11: mod_base = OTHER; note = 2'-deoxy-2'-fluoroadenosine-3'-phosphate
  modified_base 12: mod_base = OTHER; note = 2'-O-methyladenosine-3'-phosphate
  modified_base 13: mod_base = OTHER; note = 2'-O-methylcytidine-3'-phosphate
  modified_base 14: mod_base = OTHER; note = 2'-O-methylcytidine-3'-phosphate
  modified_base 15: mod_base = OTHER; note = 2'-O-methyluridine-3'-phosphate
  modified_base 16: mod_base = OTHER; note = 2'-O-methyluridine-3'-phosphate
  modified_base 17: mod_base = OTHER; note = 2'-O-methyladenosine-3'-phosphate
  modified_base 18: mod_base = OTHER; note = 2'-O-methyladenosine-3'-phosphate
  modified_base 19: mod_base = OTHER; note = 2'-O-methyladenosine-3'-phosphate
  modified_base 20: mod_base = OTHER; note = 2'-O-methyladenosine-3'-phosphate
  modified_base 21: mod_base = OTHER; note = 2'-O-methyladenosine-3'-phosphate ((2S,4R)-1-[29-[[2-(acetylamino)-2-deoxy-beta-D-galactopyra nosyl]oxy]-14,14-bis[[3-[[3-[[5-[[2-(acetylamino)-2-deoxy-b eta-D-galactopyranosyl]oxy]-1-oxopentyl]amino]propyl]amino] -3-oxopropoxy]methyl]-1,12,19,25-tetraoxo-16-oxa-13,20,24-t riazanonacos-1-yl]-4-hydroxy-2-pyrrolidinyl)methyl ester
ggagtactgcaaccttaaaaa

SEQ ID NO: 782 - RNA, 21 nt, synthetic construct
  source 1..21: mol_type = other RNA
  modified_base 1: mod_base = OTHER; note = 2'-O-methylguanosine-3'-phosphorothioate
  modified_base 2: mod_base = OTHER; note = 2'-O-methyluridine-3'-phosphorothioate
  modified_base 3: mod_base = OTHER; note = 2'-O-methyladenosine-3'-phosphate
  modified_base 4: mod_base = OTHER; note = 2'-O-methylcytidine-3'-phosphate
  modified_base 5: mod_base = OTHER; note = 2'-O-methyluridine-3'-phosphate
  modified_base 6: mod_base = OTHER; note = 2'-O-methylguanosine-3'-phosphate
  modified_base 7: mod_base = OTHER; note = 2'-deoxy-2'-fluorocytidine-3'-phosphate
  modified_base 8: mod_base = OTHER; note = 2'-O-methyladenosine-3'-phosphate
  modified_base 9: mod_base = OTHER; note = 2'-deoxy-2'-fluoroadenosine-3'-phosphate
  modified_base 10: mod_base = OTHER; note = 2'-deoxy-2'-fluorocytidine-3'-phosphate
  modified_base 11: mod_base = OTHER; note = 2'-deoxy-2'-fluorocytidine-3'-phosphate
  modified_base 12: mod_base = OTHER; note = 2'-O-methyluridine-3'-phosphate
  modified_base 13: mod_base = OTHER; note = 2'-O-methylguanosine-3'-phosphate
  modified_base 14: mod_base = OTHER; note = 2'-O-methyladenosine-3'-phosphate
  modified_base 15: mod_base = OTHER; note = 2'-O-methyladenosine-3'-phosphate
  modified_base 16: mod_base = OTHER; note = 2'-O-methyladenosine-3'-phosphate
  modified_base 17: mod_base = OTHER; note = 2'-O-methyladenosine-3'-phosphate
  modified_base 18: mod_base = OTHER; note = 2'-O-methyladenosine-3'-phosphate
  modified_base 19: mod_base = OTHER; note = 2'-O-methyladenosine-3'-phosphate
  modified_base 20: mod_base = OTHER; note = 2'-O-methyluridine-3'-phosphate
  modified_base 21: mod_base = OTHER; note = 2'-O-methyladenosine-3'-phosphate ((2S,4R)-1-[29-[[2-(acetylamino)-2-deoxy-beta-D-galactopyra nosyl]oxy]-14,14-bis[[3-[[3-[[5-[[2-(acetylamino)-2-deoxy-b eta-D-galactopyranosyl]oxy]-1-oxopentyl]amino]propyl]amino] -3-oxopropoxy]methyl]-1,12,19,25-tetraoxo-16-oxa-13,20,24-t riazanonacos-1-yl]-4-hydroxy-2-pyrrolidinyl)methyl ester
gtactgcaacctgaaaaaata

SEQ ID NO: 783 - RNA, 21 nt, synthetic construct
  source 1..21: mol_type = other RNA
  modified_base 1: mod_base = OTHER; note = 2'-O-methyluridine-3'-phosphorothioate
  modified_base 2: mod_base = OTHER; note = 2'-O-methyladenosine-3'-phosphorothioate
  modified_base 3: mod_base = OTHER; note = 2'-O-methylcytidine-3'-phosphate
  modified_base 4: mod_base = OTHER; note = 2'-O-methyluridine-3'-phosphate
  modified_base 5: mod_base = OTHER; note = 2'-O-methylguanosine-3'-phosphate
  modified_base 6: mod_base = OTHER; note = 2'-O-methylcytidine-3'-phosphate
  modified_base 7: mod_base = OTHER; note = 2'-deoxy-2'-fluoroadenosine-3'-phosphate
  modified_base 8: mod_base = OTHER; note = 2'-O-methyladenosine-3'-phosphate
  modified_base 9: mod_base = OTHER; note = 2'-deoxy-2'-fluorocytidine-3'-phosphate
  modified_base 10: mod_base = OTHER; note = 2'-deoxy-2'-fluorocytidine-3'-phosphate
  modified_base 11: mod_base = OTHER; note = 2'-deoxy-2'-fluorouridine-3'-phosphate
  modified_base 12: mod_base = OTHER; note = 2'-O-methylguanosine-3'-phosphate
  modified_base 13: mod_base = OTHER; note = 2'-O-methyladenosine-3'-phosphate
  modified_base 14: mod_base = OTHER; note = 2'-O-methyladenosine-3'-phosphate
  modified_base 15: mod_base = OTHER; note = 2'-O-methyladenosine-3'-phosphate
  modified_base 16: mod_base = OTHER; note = 2'-O-methyladenosine-3'-phosphate
  modified_base 17: mod_base = OTHER; note = 2'-O-methyladenosine-3'-phosphate
  modified_base 18: mod_base = OTHER; note = 2'-O-methyladenosine-3'-phosphate
  modified_base 19: mod_base = OTHER; note = 2'-O-methyluridine-3'-phosphate
  modified_base 20: mod_base = OTHER; note = 2'-O-methylguanosine-3'-phosphate
  modified_base 21: mod_base = OTHER; note = 2'-O-methyladenosine-3'-phosphate ((2S,4R)-1-[29-[[2-(acetylamino)-2-deoxy-beta-D-galactopyra nosyl]oxy]-14,14-bis[[3-[[3-[[5-[[2-(acetylamino)-2-deoxy-b eta-D-galactopyranosyl]oxy]-1-oxopentyl]amino]propyl]amino] -3-oxopropoxy]methyl]-1,12,19,25-tetraoxo-16-oxa-13,20,24-t riazanonacos-1-yl]-4-hydroxy-2-pyrrolidinyl)methyl ester
tactgcaacctgaaaaaatga

SEQ ID NO: 784 - RNA, 21 nt, synthetic construct
  source 1..21: mol_type = other RNA
  modified_base 1: mod_base = OTHER; note = 2'-O-methyladenosine-3'-phosphorothioate
  modified_base 2: mod_base = OTHER; note = 2'-O-methylcytidine-3'-phosphorothioate
  modified_base 3: mod_base = OTHER; note = 2'-O-methylcytidine-3'-phosphate
  modified_base 4: mod_base = OTHER; note = 2'-O-methyluridine-3'-phosphate
  modified_base 5: mod_base = OTHER; note = 2'-O-methylguanosine-3'-phosphate
  modified_base 6: mod_base = OTHER; note = 2'-O-methyladenosine-3'-phosphate
  modified_base 7: mod_base = OTHER; note = 2'-deoxy-2'-fluoroadenosine-3'-phosphate
  modified_base 8: mod_base = OTHER; note = 2'-O-methyladenosine-3'-phosphate
  modified_base 9: mod_base = OTHER; note = 2'-deoxy-2'-fluoroadenosine-3'-phosphate
  modified_base 10: mod_base = OTHER; note = 2'-deoxy-2'-fluoroadenosine-3'-phosphate
  modified_base 11: mod_base = OTHER; note = 2'-deoxy-2'-fluoroadenosine-3'-phosphate
  modified_base 12: mod_base = OTHER; note = 2'-O-methyluridine-3'-phosphate
  modified_base 13: mod_base = OTHER; note = 2'-O-methylguanosine-3'-phosphate
  modified_base 14: mod_base = OTHER; note = 2'-O-methylcytidine-3'-phosphate
  modified_base 15: mod_base = OTHER; note = 2'-O-methyluridine-3'-phosphate
  modified_base 16: mod_base = OTHER; note = 2'-O-methylcytidine-3'-phosphate
  modified_base 17: mod_base = OTHER; note = 2'-O-methyladenosine-3'-phosphate
  modified_base 18: mod_base = OTHER; note = 2'-O-methylguanosine-3'-phosphate
  modified_base 19: mod_base = OTHER; note = 2'-O-methylguanosine-3'-phosphate
  modified_base 20: mod_base = OTHER; note = 2'-O-methyladenosine-3'-phosphate
  modified_base 21: mod_base = OTHER; note = 2'-O-methyladenosine-3'-phosphate ((2S,4R)-1-[29-[[2-(acetylamino)-2-deoxy-beta-D-galactopyra nosyl]oxy]-14,14-bis[[3-[[3-[[5-[[2-(acetylamino)-2-deoxy-b eta-D-galactopyranosyl]oxy]-1-oxopentyl]amino]propyl]amino] -3-oxopropoxy]methyl]-1,12,19,25-tetraoxo-16-oxa-13,20,24-t riazanonacos-1-yl]-4-hydroxy-2-pyrrolidinyl)methyl ester
acctgaaaaaatgctcaggaa

SEQ ID NO: 785 - RNA, 21 nt, synthetic construct
  source 1..21: mol_type = other RNA
  modified_base 1: mod_base = OTHER; note = 2'-O-methyladenosine-3'-phosphorothioate
  modified_base 2: mod_base = OTHER; note = 2'-O-methylcytidine-3'-phosphorothioate
  modified_base 3: mod_base = OTHER; note = 2'-O-methylcytidine-3'-phosphate
  modified_base 4: mod_base = OTHER; note = 2'-O-methyluridine-3'-phosphate
  modified_base 5: mod_base = OTHER; note = 2'-O-methylguanosine-3'-phosphate
  modified_base 6: mod_base = OTHER; note = 2'-O-methyladenosine-3'-phosphate
  modified_base 7: mod_base = OTHER; note = 2'-deoxy-2'-fluoroadenosine-3'-phosphate
  modified_base 8: mod_base = OTHER; note = 2'-O-methyladenosine-3'-phosphate
  modified_base 9: mod_base = OTHER; note = 2'-deoxy-2'-fluoroadenosine-3'-phosphate
  modified_base 10: mod_base = OTHER; note = 2'-deoxy-2'-fluoroadenosine-3'-phosphate
  modified_base 11: mod_base = OTHER; note = 2'-deoxy-2'-fluoroadenosine-3'-phosphate
  modified_base 12: mod_base = OTHER; note = 2'-O-methyluridine-3'-phosphate
  modified_base 13: mod_base = OTHER; note = 2'-O-methylguanosine-3'-phosphate
  modified_base 14: mod_base = OTHER; note = 2'-O-methylcytidine-3'-phosphate
  modified_base 15: mod_base = OTHER; note = 2'-O-methyluridine-3'-phosphate
  modified_base 16: mod_base = OTHER; note = 2'-O-methyluridine-3'-phosphate
  modified_base 17: mod_base = OTHER; note = 2'-O-methyladenosine-3'-phosphate
  modified_base 18: mod_base = OTHER; note = 2'-O-methylguanosine-3'-phosphate
  modified_base 19: mod_base = OTHER; note = 2'-O-methylguanosine-3'-phosphate
  modified_base 20: mod_base = OTHER; note = 2'-O-methyladenosine-3'-phosphate
  modified_base 21: mod_base = OTHER; note = 2'-O-methyladenosine-3'-phosphate ((2S,4R)-1-[29-[[2-(acetylamino)-2-deoxy-beta-D-galactopyra nosyl]oxy]-14,14-bis[[3-[[3-[[5-[[2-(acetylamino)-2-deoxy-b eta-D-galactopyranosyl]oxy]-1-oxopentyl]amino]propyl]amino] -3-oxopropoxy]methyl]-1,12,19,25-tetraoxo-16-oxa-13,20,24-t riazanonacos-1-yl]-4-hydroxy-2-pyrrolidinyl)methyl ester
acctgaaaaaatgcttaggaa

SEQ ID NO: 786 - RNA, 21 nt, synthetic construct
  source 1..21: mol_type = other RNA
  modified_base 1: mod_base = OTHER; note = 2'-O-methylguanosine-3'-phosphorothioate
  modified_base 2: mod_base = OTHER; note = 2'-O-methyladenosine-3'-phosphorothioate
  modified_base 3: mod_base = OTHER; note = 2'-O-methyladenosine-3'-phosphate
  modified_base 4: mod_base = OTHER; note = 2'-O-methyladenosine-3'-phosphate
  modified_base 5: mod_base = OTHER; note = 2'-O-methyladenosine-3'-phosphate
  modified_base 6: mod_base = OTHER; note = 2'-O-methyladenosine-3'-phosphate
  modified_base 7: mod_base = OTHER; note = 2'-deoxy-2'-fluoroadenosine-3'-phosphate
  modified_base 8: mod_base = OTHER; note = 2'-O-methyluridine-3'-phosphate
  modified_base 9: mod_base = OTHER; note = 2'-deoxy-2'-fluoroguanosine-3'-phosphate
  modified_base 10: mod_base = OTHER; note = 2'-deoxy-2'-fluorocytidine-3'-phosphate
  modified_base 11: mod_base = OTHER; note = 2'-deoxy-2'-fluorouridine-3'-phosphate
  modified_base 12: mod_base = OTHER; note = 2'-O-methylcytidine-3'-phosphate
  modified_base 13: mod_base = OTHER; note = 2'-O-methyladenosine-3'-phosphate
  modified_base 14: mod_base = OTHER; note = 2'-O-methylguanosine-3'-phosphate
  modified_base 15: mod_base = OTHER; note = 2'-O-methylguanosine-3'-phosphate
  modified_base 16: mod_base = OTHER; note = 2'-O-methyladenosine-3'-phosphate
  modified_base 17: mod_base = OTHER; note = 2'-O-methyladenosine-3'-phosphate
  modified_base 18: mod_base = OTHER; note = 2'-O-methylcytidine-3'-phosphate
  modified_base 19: mod_base = OTHER; note = 2'-O-methyladenosine-3'-phosphate
  modified_base 20: mod_base = OTHER; note = 2'-O-methylguanosine-3'-phosphate
  modified_base 21: mod_base = OTHER; note = 2'-O-methyladenosine-3'-phosphate ((2S,4R)-1-[29-[[2-(acetylamino)-2-deoxy-beta-D-galactopyra nosyl]oxy]-14,14-bis[[3-[[3-[[5-[[2-(acetylamino)-2-deoxy-b eta-D-galactopyranosyl]oxy]-1-oxopentyl]amino]propyl]amino] -3-oxopropoxy]methyl]-1,12,19,25-tetraoxo-16-oxa-13,20,24-t riazanonacos-1-yl]-4-hydroxy-2-pyrrolidinyl)methyl ester
gaaaaaatgctcaggaacaga

SEQ ID NO: 787 - RNA, 21 nt, synthetic construct
  source 1..21: mol_type = other RNA
  modified_base 1: mod_base = OTHER; note = 2'-O-methyladenosine-3'-phosphorothioate
  modified_base 2: mod_base = OTHER; note = 2'-O-methyladenosine-3'-phosphorothioate
  modified_base 3: mod_base = OTHER; note = 2'-O-methylguanosine-3'-phosphate
  modified_base 4: mod_base = OTHER; note = 2'-O-methyladenosine-3'-phosphate
  modified_base 5: mod_base = OTHER; note = 2'-O-methyladenosine-3'-phosphate
  modified_base 6: mod_base = OTHER; note = 2'-O-methylguanosine-3'-phosphate
  modified_base 7: mod_base = OTHER; note = 2'-deoxy-2'-fluoroadenosine-3'-phosphate
  modified_base 8: mod_base = OTHER; note = 2'-O-methylcytidine-3'-phosphate
  modified_base 9: mod_base = OTHER; note = 2'-deoxy-2'-fluorouridine-3'-phosphate
  modified_base 10: mod_base = OTHER; note = 2'-deoxy-2'-fluoroguanosine-3'-phosphate
  modified_base 11: mod_base = OTHER; note = 2'-deoxy-2'-fluorouridine-3'-phosphate
  modified_base 12: mod_base = OTHER; note = 2'-O-methyladenosine-3'-phosphate
  modified_base 13: mod_base = OTHER; note = 2'-O-methyluridine-3'-phosphate
  modified_base 14: mod_base = OTHER; note = 2'-O-methylguanosine-3'-phosphate
  modified_base 15: mod_base = OTHER; note = 2'-O-methyluridine-3'-phosphate
  modified_base 16: mod_base = OTHER; note = 2'-O-methyluridine-3'-phosphate
  modified_base 17: mod_base = OTHER; note = 2'-O-methyluridine-3'-phosphate
  modified_base 18: mod_base = OTHER; note = 2'-O-methylguanosine-3'-phosphate
  modified_base 19: mod_base = OTHER; note = 2'-O-methylguanosine-3'-phosphate
  modified_base 20: mod_base = OTHER; note = 2'-O-methylguanosine-3'-phosphate
  modified_base 21: mod_base = OTHER; note = 2'-O-methyladenosine-3'-phosphate ((2S,4R)-1-[29-[[2-(acetylamino)-2-deoxy-beta-D-galactopyra nosyl]oxy]-14,14-bis[[3-[[3-[[5-[[2-(acetylamino)-2-deoxy-b eta-D-galactopyranosyl]oxy]-1-oxopentyl]amino]propyl]amino] -3-oxopropoxy]methyl]-1,12,19,25-tetraoxo-16-oxa-13,20,24-t riazanonacos-1-yl]-4-hydroxy-2-pyrrolidinyl)methyl ester
aagaagactgtatgtttggga

SEQ ID NO: 788 - RNA, 21 nt, synthetic construct
  source 1..21: mol_type = other RNA
  modified_base 1: mod_base = OTHER; note = 2'-O-methylcytidine-3'-phosphorothioate
  modified_base 2: mod_base = OTHER; note = 2'-O-methyladenosine-3'-phosphorothioate
  modified_base 3: mod_base = OTHER; note = 2'-O-methylguanosine-3'-phosphate
  modified_base 4: mod_base = OTHER; note = 2'-O-methylcytidine-3'-phosphate
  modified_base 5: mod_base = OTHER; note = 2'-O-methyladenosine-3'-phosphate
  modified_base 6: mod_base = OTHER; note = 2'-O-methyluridine-3'-phosphate
  modified_base 7: mod_base = OTHER; note = 2'-deoxy-2'-fluorouridine-3'-phosphate
  modified_base 8: mod_base = OTHER; note = 2'-O-methyluridine-3'-phosphate
  modified_base 9: mod_base = OTHER; note = 2'-deoxy-2'-fluorouridine-3'-phosphate
  modified_base 10: mod_base = OTHER; note = 2'-deoxy-2'-fluorocytidine-3'-phosphate
  modified_base 11: mod_base = OTHER; note = 2'-deoxy-2'-fluoroadenosine-3'-phosphate
  modified_base 12: mod_base = OTHER; note = 2'-O-methylcytidine-3'-phosphate
  modified_base 13: mod_base = OTHER; note = 2'-O-methyluridine-3'-phosphate
  modified_base 14: mod_base = OTHER; note = 2'-O-methylcytidine-3'-phosphate
  modified_base 15: mod_base = OTHER; note = 2'-O-methylcytidine-3'-phosphate
  modified_base 16: mod_base = OTHER; note = 2'-O-methyladenosine-3'-phosphate
  modified_base 17: mod_base = OTHER; note = 2'-O-methylguanosine-3'-phosphate
  modified_base 18: mod_base = OTHER; note = 2'-O-methyladenosine-3'-phosphate
  modified_base 19: mod_base = OTHER; note = 2'-O-methylguanosine-3'-phosphate
  modified_base 20: mod_base = OTHER; note = 2'-O-methyladenosine-3'-phosphate
  modified_base 21: mod_base = OTHER; note = 2'-O-methyladenosine-3'-phosphate ((2S,4R)-1-[29-[[2-(acetylamino)-2-deoxy-beta-D-galactopyra nosyl]oxy]-14,14-bis[[3-[[3-[[5-[[2-(acetylamino)-2-deoxy-b eta-D-galactopyranosyl]oxy]-1-oxopentyl]amino]propyl]amino] -3-oxopropoxy]methyl]-1,12,19,25-tetraoxo-16-oxa-13,20,24-t riazanonacos-1-yl]-4-hydroxy-2-pyrrolidinyl)methyl ester
cagcattttcactccagagaa

SEQ ID NO: 789 - RNA, 21 nt, synthetic construct
  source 1..21: mol_type = other RNA
  modified_base 1: mod_base = OTHER; note = 2'-O-methylcytidine-3'-phosphorothioate
  modified_base 2: mod_base = OTHER; note = 2'-O-methyladenosine-3'-phosphorothioate
  modified_base 3: mod_base = OTHER; note = 2'-O-methylguanosine-3'-phosphate
  modified_base 4: mod_base = OTHER; note = 2'-O-methylcytidine-3'-phosphate
  modified_base 5: mod_base = OTHER; note = 2'-O-methyladenosine-3'-phosphate
  modified_base 6: mod_base = OTHER; note = 2'-O-methyluridine-3'-phosphate
  modified_base 7: mod_base = OTHER; note = 2'-deoxy-2'-fluorouridine-3'-phosphate
  modified_base 8: mod_base = OTHER; note = 2'-O-methyluridine-3'-phosphate
  modified_base 9: mod_base = OTHER; note = 2'-deoxy-2'-fluorouridine-3'-phosphate
  modified_base 10: mod_base = OTHER; note = 2'-deoxy-2'-fluorocytidine-3'-phosphate
  modified_base 11: mod_base = OTHER; note = 2'-deoxy-2'-fluoroadenosine-3'-phosphate
  modified_base 12: mod_base = OTHER; note = 2'-O-methylcytidine-3'-phosphate
  modified_base 13: mod_base = OTHER; note = 2'-O-methyluridine-3'-phosphate
  modified_base 14: mod_base = OTHER; note = 2'-O-methylcytidine-3'-phosphate
  modified_base 15: mod_base = OTHER; note = 2'-O-methyluridine-3'-phosphate
  modified_base 16: mod_base = OTHER; note = 2'-O-methyladenosine-3'-phosphate
  modified_base 17: mod_base = OTHER; note = 2'-O-methylguanosine-3'-phosphate
  modified_base 18: mod_base = OTHER; note = 2'-O-methyladenosine-3'-phosphate
  modified_base 19: mod_base = OTHER; note = 2'-O-methylguanosine-3'-phosphate
  modified_base 20: mod_base = OTHER; note = 2'-O-methyladenosine-3'-phosphate
  modified_base 21: mod_base = OTHER; note = 2'-O-methyladenosine-3'-phosphate ((2S,4R)-1-[29-[[2-(acetylamino)-2-deoxy-beta-D-galactopyra nosyl]oxy]-14,14-bis[[3-[[3-[[5-[[2-(acetylamino)-2-deoxy-b eta-D-galactopyranosyl]oxy]-1-oxopentyl]amino]propyl]amino] -3-oxopropoxy]methyl]-1,12,19,25-tetraoxo-16-oxa-13,20,24-t riazanonacos-1-yl]-4-hydroxy-2-pyrrolidinyl)methyl ester
cagcattttcactctagagaa

SEQ ID NO: 790 - RNA, 21 nt, synthetic construct
  source 1..21: mol_type = other RNA
  modified_base 1: mod_base = OTHER; note = 2'-O-methyladenosine-3'-phosphorothioate
  modified_base 2: mod_base = OTHER; note = 2'-O-methylguanosine-3'-phosphorothioate
  modified_base 3: mod_base = OTHER; note = 2'-O-methylcytidine-3'-phosphate
  modified_base 4: mod_base = OTHER; note = 2'-O-methyladenosine-3'-phosphate
  modified_base 5: mod_base = OTHER; note = 2'-O-methyluridine-3'-phosphate
  modified_base 6: mod_base = OTHER; note = 2'-O-methyluridine-3'-phosphate
  modified_base 7: mod_base = OTHER; note = 2'-deoxy-2'-fluorouridine-3'-phosphate
  modified_base 8: mod_base = OTHER; note = 2'-O-methyluridine-3'-phosphate
  modified_base 9: mod_base = OTHER; note = 2'-deoxy-2'-fluorocytidine-3'-phosphate
  modified_base 10: mod_base = OTHER; note = 2'-deoxy-2'-fluoroadenosine-3'-phosphate
  modified_base 11: mod_base = OTHER; note = 2'-deoxy-2'-fluorocytidine-3'-phosphate
  modified_base 12: mod_base = OTHER; note = 2'-O-methyluridine-3'-phosphate
  modified_base 13: mod_base = OTHER; note = 2'-O-methylcytidine-3'-phosphate
  modified_base 14: mod_base = OTHER; note = 2'-O-methylcytidine-3'-phosphate
  modified_base 15: mod_base = OTHER; note = 2'-O-methyladenosine-3'-phosphate
  modified_base 16: mod_base = OTHER; note = 2'-O-methylguanosine-3'-phosphate
  modified_base 17: mod_base = OTHER; note = 2'-O-methyladenosine-3'-phosphate
  modified_base 18: mod_base = OTHER; note = 2'-O-methylguanosine-3'-phosphate
  modified_base 19: mod_base = OTHER; note = 2'-O-methyladenosine-3'-phosphate
  modified_base 20: mod_base = OTHER; note = 2'-O-methylcytidine-3'-phosphate
  modified_base 21: mod_base = OTHER; note = 2'-O-methyladenosine-3'-phosphate ((2S,4R)-1-[29-[[2-(acetylamino)-2-deoxy-beta-D-galactopyra nosyl]oxy]-14,14-bis[[3-[[3-[[5-[[2-(acetylamino)-2-deoxy-b eta-D-galactopyranosyl]oxy]-1-oxopentyl]amino]propyl]amino] -3-oxopropoxy]methyl]-1,12,19,25-tetraoxo-16-oxa-13,20,24-t riazanonacos-1-yl]-4-hydroxy-2-pyrrolidinyl)methyl ester
agcattttcactccagagaca

SEQ ID NO: 791 - RNA, 21 nt, synthetic construct
  source 1..21: mol_type = other RNA
  modified_base 1: mod_base = OTHER; note = 2'-O-methyladenosine-3'-phosphorothioate
  modified_base 2: mod_base = OTHER; note = 2'-O-methylguanosine-3'-phosphorothioate
  modified_base 3: mod_base = OTHER; note = 2'-O-methylcytidine-3'-phosphate
  modified_base 4: mod_base = OTHER; note = 2'-O-methyladenosine-3'-phosphate
  modified_base 5: mod_base = OTHER; note = 2'-O-methyluridine-3'-phosphate
  modified_base 6: mod_base = OTHER; note = 2'-O-methyluridine-3'-phosphate
  modified_base 7: mod_base = OTHER; note = 2'-deoxy-2'-fluorouridine-3'-phosphate
  modified_base 8: mod_base = OTHER; note = 2'-O-methyluridine-3'-phosphate
  modified_base 9: mod_base = OTHER; note = 2'-deoxy-2'-fluorocytidine-3'-phosphate
  modified_base 10: mod_base = OTHER; note = 2'-deoxy-2'-fluoroadenosine-3'-phosphate
  modified_base 11: mod_base = OTHER; note = 2'-deoxy-2'-fluorocytidine-3'-phosphate
  modified_base 12: mod_base = OTHER; note = 2'-O-methyluridine-3'-phosphate
  modified_base 13: mod_base = OTHER; note = 2'-O-methylcytidine-3'-phosphate
  modified_base 14: mod_base = OTHER; note = 2'-O-methylcytidine-3'-phosphate
  modified_base 15: mod_base = OTHER; note = 2'-O-methyluridine-3'-phosphate
  modified_base 16: mod_base = OTHER; note = 2'-O-methylguanosine-3'-phosphate
  modified_base 17: mod_base = OTHER; note = 2'-O-methyladenosine-3'-phosphate
  modified_base 18: mod_base = OTHER; note = 2'-O-methylguanosine-3'-phosphate
  modified_base 19: mod_base = OTHER; note = 2'-O-methyladenosine-3'-phosphate
  modified_base 20: mod_base = OTHER; note = 2'-O-methylcytidine-3'-phosphate
  modified_base 21: mod_base = OTHER; note = 2'-O-methyladenosine-3'-phosphate ((2S,4R)-1-[29-[[2-(acetylamino)-2-deoxy-beta-D-galactopyra nosyl]oxy]-14,14-bis[[3-[[3-[[5-[[2-(acetylamino)-2-deoxy-b eta-D-galactopyranosyl]oxy]-1-oxopentyl]amino]propyl]amino] -3-oxopropoxy]methyl]-1,12,19,25-tetraoxo-16-oxa-13,20,24-t riazanonacos-1-yl]-4-hydroxy-2-pyrrolidinyl)methyl ester
agcattttcactcctgagaca

SEQ ID NO: 792 - RNA, 21 nt, synthetic construct
  source 1..21: mol_type = other RNA
  modified_base 1: mod_base = OTHER; note = 2'-O-methylguanosine-3'-phosphorothioate
  modified_base 2: mod_base = OTHER; note = 2'-O-methylcytidine-3'-phosphorothioate
  modified_base 3: mod_base = OTHER; note = 2'-O-methyladenosine-3'-phosphate
  modified_base 4: mod_base = OTHER; note = 2'-O-methyluridine-3'-phosphate
  modified_base 5: mod_base = OTHER; note = 2'-O-methyluridine-3'-phosphate
  modified_base 6: mod_base = OTHER; note = 2'-O-methyluridine-3'-phosphate
  modified_base 7: mod_base = OTHER; note = 2'-deoxy-2'-fluorouridine-3'-phosphate
  modified_base 8: mod_base = OTHER; note = 2'-O-methylcytidine-3'-phosphate
  modified_base 9: mod_base = OTHER; note = 2'-deoxy-2'-fluoroadenosine-3'-phosphate
  modified_base 10: mod_base = OTHER; note = 2'-deoxy-2'-fluorocytidine-3'-phosphate
  modified_base 11: mod_base = OTHER; note = 2'-deoxy-2'-fluorouridine-3'-phosphate
  modified_base 12: mod_base = OTHER; note = 2'-O-methylcytidine-3'-phosphate
  modified_base 13: mod_base = OTHER; note = 2'-O-methylcytidine-3'-phosphate
  modified_base 14: mod_base = OTHER; note = 2'-O-methyladenosine-3'-phosphate
  modified_base 15: mod_base = OTHER; note = 2'-O-methylguanosine-3'-phosphate
  modified_base 16: mod_base = OTHER; note = 2'-O-methyladenosine-3'-phosphate
  modified_base 17: mod_base = OTHER; note = 2'-O-methylguanosine-3'-phosphate
  modified_base 18: mod_base = OTHER; note = 2'-O-methyladenosine-3'-phosphate
  modified_base 19: mod_base = OTHER; note = 2'-O-methylcytidine-3'-phosphate
  modified_base 20: mod_base = OTHER; note = 2'-O-methyladenosine-3'-phosphate
  modified_base 21: mod_base = OTHER; note = 2'-O-methyladenosine-3'-phosphate ((2S,4R)-1-[29-[[2-(acetylamino)-2-deoxy-beta-D-galactopyra nosyl]oxy]-14,14-bis[[3-[[3-[[5-[[2-(acetylamino)-2-deoxy-b eta-D-galactopyranosyl]oxy]-1-oxopentyl]amino]propyl]amino] -3-oxopropoxy]methyl]-1,12,19,25-tetraoxo-16-oxa-13,20,24-t riazanonacos-1-yl]-4-hydroxy-2-pyrrolidinyl)methyl ester
gcattttcactccagagacaa

SEQ ID NO: 793 - RNA, 21 nt, synthetic construct
  source 1..21: mol_type = other RNA
  modified_base 1: mod_base = OTHER; note = 2'-O-methylguanosine-3'-phosphorothioate
  modified_base 2: mod_base = OTHER; note = 2'-O-methylcytidine-3'-phosphorothioate
  modified_base 3: mod_base = OTHER; note = 2'-O-methyladenosine-3'-phosphate
  modified_base 4: mod_base = OTHER; note = 2'-O-methyluridine-3'-phosphate
  modified_base 5: mod_base = OTHER; note = 2'-O-methyluridine-3'-phosphate
  modified_base 6: mod_base = OTHER; note = 2'-O-methyluridine-3'-phosphate
  modified_base 7: mod_base = OTHER; note = 2'-deoxy-2'-fluorouridine-3'-phosphate
  modified_base 8: mod_base = OTHER; note = 2'-O-methylcytidine-3'-phosphate
  modified_base 9: mod_base = OTHER; note = 2'-deoxy-2'-fluoroadenosine-3'-phosphate
  modified_base 10: mod_base = OTHER; note = 2'-deoxy-2'-fluorocytidine-3'-phosphate
  modified_base 11: mod_base = OTHER; note = 2'-deoxy-2'-fluorouridine-3'-phosphate
  modified_base 12: mod_base = OTHER; note = 2'-O-methylcytidine-3'-phosphate
  modified_base 13: mod_base = OTHER; note = 2'-O-methylcytidine-3'-phosphate
  modified_base 14: mod_base = OTHER; note = 2'-O-methyladenosine-3'-phosphate
  modified_base 15: mod_base = OTHER; note = 2'-O-methyluridine-3'-phosphate
  modified_base 16: mod_base = OTHER; note = 2'-O-methyladenosine-3'-phosphate
  modified_base 17: mod_base = OTHER; note = 2'-O-methylguanosine-3'-phosphate
  modified_base 18: mod_base = OTHER; note = 2'-O-methyladenosine-3'-phosphate
  modified_base 19: mod_base = OTHER; note = 2'-O-methylcytidine-3'-phosphate
  modified_base 20: mod_base = OTHER; note = 2'-O-methyladenosine-3'-phosphate
  modified_base 21: mod_base = OTHER; note = 2'-O-methyladenosine-3'-phosphate ((2S,4R)-1-[29-[[2-(acetylamino)-2-deoxy-beta-D-galactopyra nosyl]oxy]-14,14-bis[[3-[[3-[[5-[[2-(acetylamino)-2-deoxy-b eta-D-galactopyranosyl]oxy]-1-oxopentyl]amino]propyl]amino] -3-oxopropoxy]methyl]-1,12,19,25-tetraoxo-16-oxa-13,20,24-t riazanonacos-1-yl]-4-hydroxy-2-pyrrolidinyl)methyl ester
gcattttcactccatagacaa

SEQ ID NO: 794 - RNA, 21 nt, synthetic construct
  source 1..21: mol_type = other RNA
  modified_base 1: mod_base = OTHER; note = 2'-O-methyluridine-3'-phosphorothioate
  modified_base 2: mod_base = OTHER; note = 2'-O-methylcytidine-3'-phosphorothioate
  modified_base 3: mod_base = OTHER; note = 2'-O-methyladenosine-3'-phosphate
  modified_base 4: mod_base = OTHER; note = 2'-O-methylcytidine-3'-phosphate
  modified_base 5: mod_base = OTHER; note = 2'-O-methyluridine-3'-phosphate
  modified_base 6: mod_base = OTHER; note = 2'-O-methylcytidine-3'-phosphate
  modified_base 7: mod_base = OTHER; note = 2'-deoxy-2'-fluorocytidine-3'-phosphate
  modified_base 8: mod_base = OTHER; note = 2'-O-methyladenosine-3'-phosphate
  modified_base 9: mod_base = OTHER; note = 2'-deoxy-2'-fluoroguanosine-3'-phosphate
  modified_base 10: mod_base = OTHER; note = 2'-deoxy-2'-fluoroadenosine-3'-phosphate
  modified_base 11: mod_base = OTHER; note = 2'-deoxy-2'-fluoroguanosine-3'-phosphate
  modified_base 12: mod_base = OTHER; note = 2'-O-methyladenosine-3'-phosphate
  modified_base 13: mod_base = OTHER; note = 2'-O-methylcytidine-3'-phosphate
  modified_base 14: mod_base = OTHER; note = 2'-O-methyladenosine-3'-phosphate
  modified_base 15: mod_base = OTHER; note = 2'-O-methyladenosine-3'-phosphate
  modified_base 16: mod_base = OTHER; note = 2'-O-methyladenosine-3'-phosphate
  modified_base 17: mod_base = OTHER; note = 2'-O-methyluridine-3'-phosphate
  modified_base 18: mod_base = OTHER; note = 2'-O-methylcytidine-3'-phosphate
  modified_base 19: mod_base = OTHER; note = 2'-O-methylcytidine-3'-phosphate
  modified_base 20: mod_base = OTHER; note = 2'-O-methyladenosine-3'-phosphate
  modified_base 21: mod_base = OTHER; note = 2'-O-methyladenosine-3'-phosphate ((2S,4R)-1-[29-[[2-(acetylamino)-2-deoxy-beta-D-galactopyra nosyl]oxy]-14,14-bis[[3-[[3-[[5-[[2-(acetylamino)-2-deoxy-b eta-D-galactopyranosyl]oxy]-1-oxopentyl]amino]propyl]amino] -3-oxopropoxy]methyl]-1,12,19,25-tetraoxo-16-oxa-13,20,24-t riazanonacos-1-yl]-4-hydroxy-2-pyrrolidinyl)methyl ester
tcactccagagacaaatccaa

SEQ ID NO: 795 - RNA, 21 nt, synthetic construct
  source 1..21: mol_type = other RNA
  modified_base 1: mod_base = OTHER; note = 2'-O-methyluridine-3'-phosphorothioate
  modified_base 2: mod_base = OTHER; note = 2'-O-methyladenosine-3'-phosphorothioate
  modified_base 3: mod_base = OTHER; note = 2'-O-methylguanosine-3'-phosphate
  modified_base 4: mod_base = OTHER; note = 2'-O-methylguanosine-3'-phosphate
  modified_base 5: mod_base = OTHER; note = 2'-O-methyluridine-3'-phosphate
  modified_base 6: mod_base = OTHER; note = 2'-O-methylguanosine-3'-phosphate
  modified_base 7: mod_base = OTHER; note = 2'-deoxy-2'-fluoroguanosine-3'-phosphate
  modified_base 8: mod_base = OTHER; note = 2'-O-methyluridine-3'-phosphate
  modified_base 9: mod_base = OTHER; note = 2'-deoxy-2'-fluorocytidine-3'-phosphate
  modified_base 10: mod_base = OTHER; note = 2'-deoxy-2'-fluorocytidine-3'-phosphate
  modified_base 11: mod_base = OTHER; note = 2'-deoxy-2'-fluorocytidine-3'-phosphate
  modified_base 12: mod_base = OTHER; note = 2'-O-methyluridine-3'-phosphate
  modified_base 13: mod_base = OTHER; note = 2'-O-methylguanosine-3'-phosphate
  modified_base 14: mod_base = OTHER; note = 2'-O-methylguanosine-3'-phosphate
  modified_base 15: mod_base = OTHER; note = 2'-O-methyluridine-3'-phosphate
  modified_base 16: mod_base = OTHER; note = 2'-O-methylguanosine-3'-phosphate
  modified_base 17: mod_base = OTHER; note = 2'-O-methylcytidine-3'-phosphate
  modified_base 18: mod_base = OTHER; note = 2'-O-methyluridine-3'-phosphate
  modified_base 19: mod_base = OTHER; note = 2'-O-methyladenosine-3'-phosphate
  modified_base 20: mod_base = OTHER; note = 2'-O-methylcytidine-3'-phosphate
  modified_base 21: mod_base = OTHER; note = 2'-O-methyladenosine-3'-phosphate ((2S,4R)-1-[29-[[2-(acetylamino)-2-deoxy-beta-D-galactopyra nosyl]oxy]-14,14-bis[[3-[[3-[[5-[[2-(acetylamino)-2-deoxy-b eta-D-galactopyranosyl]oxy]-1-oxopentyl]amino]propyl]amino] -3-oxopropoxy]methyl]-1,12,19,25-tetraoxo-16-oxa-13,20,24-t riazanonacos-1-yl]-4-hydroxy-2-pyrrolidinyl)methyl ester
taggtggtccctggtgctaca

SEQ ID NO: 796 - RNA, 21 nt, synthetic construct
  source 1..21: mol_type = other RNA
  modified_base 1: mod_base = OTHER; note = 2'-O-methyluridine-3'-phosphorothioate
  modified_base 2: mod_base = OTHER; note = 2'-O-methyladenosine-3'-phosphorothioate
  modified_base 3: mod_base = OTHER; note = 2'-O-methylguanosine-3'-phosphate
  modified_base 4: mod_base = OTHER; note = 2'-O-methylguanosine-3'-phosphate
  modified_base 5: mod_base = OTHER; note = 2'-O-methyluridine-3'-phosphate
  modified_base 6: mod_base = OTHER; note = 2'-O-methylguanosine-3'-phosphate
  modified_base 7: mod_base = OTHER; note = 2'-deoxy-2'-fluoroguanosine-3'-phosphate
  modified_base 8: mod_base = OTHER; note = 2'-O-methyluridine-3'-phosphate
  modified_base 9: mod_base = OTHER; note = 2'-deoxy-2'-fluorocytidine-3'-phosphate
  modified_base 10: mod_base = OTHER; note = 2'-deoxy-2'-fluorocytidine-3'-phosphate
  modified_base 11: mod_base = OTHER; note = 2'-deoxy-2'-fluorocytidine-3'-phosphate
  modified_base 12: mod_base = OTHER; note = 2'-O-methyluridine-3'-phosphate
  modified_base 13: mod_base = OTHER; note = 2'-O-methylguanosine-3'-phosphate
  modified_base 14: mod_base = OTHER; note = 2'-O-methylguanosine-3'-phosphate
  modified_base 15: mod_base = OTHER; note = 2'-O-methyluridine-3'-phosphate
  modified_base 16: mod_base = OTHER; note = 2'-O-methyluridine-3'-phosphate
  modified_base 17: mod_base = OTHER; note = 2'-O-methylcytidine-3'-phosphate
  modified_base 18: mod_base = OTHER; note = 2'-O-methyluridine-3'-phosphate
  modified_base 19: mod_base = OTHER; note = 2'-O-methyladenosine-3'-phosphate
  modified_base 20: mod_base = OTHER; note = 2'-O-methylcytidine-3'-phosphate
  modified_base 21: mod_base = OTHER; note = 2'-O-methyladenosine-3'-phosphate ((2S,4R)-1-[29-[[2-(acetylamino)-2-deoxy-beta-D-galactopyra nosyl]oxy]-14,14-bis[[3-[[3-[[5-[[2-(acetylamino)-2-deoxy-b eta-D-galactopyranosyl]oxy]-1-oxopentyl]amino]propyl]amino] -3-oxopropoxy]methyl]-1,12,19,25-tetraoxo-16-oxa-13,20,24-t riazanonacos-1-yl]-4-hydroxy-2-pyrrolidinyl)methyl ester
taggtggtccctggttctaca

SEQ ID NO: 797 - RNA, 21 nt, synthetic construct
  source 1..21: mol_type = other RNA
  modified_base 1: mod_base = OTHER; note = 2'-O-methylcytidine-3'-phosphorothioate
  modified_base 2: mod_base = OTHER; note = 2'-O-methyluridine-3'-phosphorothioate
  modified_base 3: mod_base = OTHER; note = 2'-O-methylguanosine-3'-phosphate
  modified_base 4: mod_base = OTHER; note = 2'-O-methylguanosine-3'-phosphate
  modified_base 5: mod_base = OTHER; note = 2'-O-methyluridine-3'-phosphate
  modified_base 6: mod_base = OTHER; note = 2'-O-methylguanosine-3'-phosphate
  modified_base 7: mod_base = OTHER; note = 2'-deoxy-2'-fluorocytidine-3'-phosphate
  modified_base 8: mod_base = OTHER; note = 2'-O-methyluridine-3'-phosphate
  modified_base 9: mod_base = OTHER; note = 2'-deoxy-2'-fluoroadenosine-3'-phosphate
  modified_base 10: mod_base = OTHER; note = 2'-deoxy-2'-fluorocytidine-3'-phosphate
  modified_base 11: mod_base = OTHER; note = 2'-deoxy-2'-fluoroadenosine-3'-phosphate
  modified_base 12: mod_base = OTHER; note = 2'-O-methylcytidine-3'-phosphate
  modified_base 13: mod_base = OTHER; note = 2'-O-methylguanosine-3'-phosphate
  modified_base 14: mod_base = OTHER; note = 2'-O-methyladenosine-3'-phosphate
  modified_base 15: mod_base = OTHER; note = 2'-O-methylcytidine-3'-phosphate
  modified_base 16: mod_base = OTHER; note = 2'-O-methyladenosine-3'-phosphate
  modified_base 17: mod_base = OTHER; note = 2'-O-methyladenosine-3'-phosphate
  modified_base 18: mod_base = OTHER; note = 2'-O-methyladenosine-3'-phosphate
  modified_base 19: mod_base = OTHER; note = 2'-O-methyluridine-3'-phosphate
  modified_base 20: mod_base = OTHER; note = 2'-O-methylcytidine-3'-phosphate
  modified_base 21: mod_base = OTHER; note = 2'-O-methyladenosine-3'-phosphate ((2S,4R)-1-[29-[[2-(acetylamino)-2-deoxy-beta-D-galactopyra nosyl]oxy]-14,14-bis[[3-[[3-[[5-[[2-(acetylamino)-2-deoxy-b eta-D-galactopyranosyl]oxy]-1-oxopentyl]amino]propyl]amino] -3-oxopropoxy]methyl]-1,12,19,25-tetraoxo-16-oxa-13,20,24-t riazanonacos-1-yl]-4-hydroxy-2-pyrrolidinyl)methyl ester
ctggtgctacacgacaaatca

SEQ ID NO: 798 - RNA, 21 nt, synthetic construct
  source 1..21: mol_type = other RNA
  modified_base 1: mod_base = OTHER; note = 2'-O-methylcytidine-3'-phosphorothioate
  modified_base 2: mod_base = OTHER; note = 2'-O-methyluridine-3'-phosphorothioate
  modified_base 3: mod_base = OTHER; note = 2'-O-methylguanosine-3'-phosphate
  modified_base 4: mod_base = OTHER; note = 2'-O-methylguanosine-3'-phosphate
  modified_base 5: mod_base = OTHER; note = 2'-O-methyluridine-3'-phosphate
  modified_base 6: mod_base = OTHER; note = 2'-O-methylguanosine-3'-phosphate
  modified_base 7: mod_base = OTHER; note = 2'-deoxy-2'-fluorocytidine-3'-phosphate
  modified_base 8: mod_base = OTHER; note = 2'-O-methyluridine-3'-phosphate
  modified_base 9: mod_base = OTHER; note = 2'-deoxy-2'-fluoroadenosine-3'-phosphate
  modified_base 10: mod_base = OTHER; note = 2'-deoxy-2'-fluorocytidine-3'-phosphate
  modified_base 11: mod_base = OTHER; note = 2'-deoxy-2'-fluoroadenosine-3'-phosphate
  modified_base 12: mod_base = OTHER; note = 2'-O-methylcytidine-3'-phosphate
  modified_base 13: mod_base = OTHER; note = 2'-O-methylguanosine-3'-phosphate
  modified_base 14: mod_base = OTHER; note = 2'-O-methyladenosine-3'-phosphate
  modified_base 15: mod_base = OTHER; note = 2'-O-methyluridine-3'-phosphate
  modified_base 16: mod_base = OTHER; note = 2'-O-methyladenosine-3'-phosphate
  modified_base 17: mod_base = OTHER; note = 2'-O-methyladenosine-3'-phosphate
  modified_base 18: mod_base = OTHER; note = 2'-O-methyladenosine-3'-phosphate
  modified_base 19: mod_base = OTHER; note = 2'-O-methyluridine-3'-phosphate
  modified_base 20: mod_base = OTHER; note = 2'-O-methylcytidine-3'-phosphate
  modified_base 21: mod_base = OTHER; note = 2'-O-methyladenosine-3'-phosphate ((2S,4R)-1-[29-[[2-(acetylamino)-2-deoxy-beta-D-galactopyra nosyl]oxy]-14,14-bis[[3-[[3-[[5-[[2-(acetylamino)-2-deoxy-b eta-D-galactopyranosyl]oxy]-1-oxopentyl]amino]propyl]amino] -3-oxopropoxy]methyl]-1,12,19,25-tetraoxo-16-oxa-13,20,24-t riazanonacos-1-yl]-4-hydroxy-2-pyrrolidinyl)methyl ester
ctggtgctacacgataaatca

SEQ ID NO: 799 - RNA, 21 nt, synthetic construct
  source 1..21: mol_type = other RNA
  modified_base 1: mod_base = OTHER; note = 2'-O-methylguanosine-3'-phosphorothioate
  modified_base 2: mod_base = OTHER; note = 2'-O-methylguanosine-3'-phosphorothioate
  modified_base 3: mod_base = OTHER; note = 2'-O-methyluridine-3'-phosphate
  modified_base 4: mod_base = OTHER; note = 2'-O-methylguanosine-3'-phosphate
  modified_base 5: mod_base = OTHER; note = 2'-O-methylcytidine-3'-phosphate
  modified_base 6: mod_base = OTHER; note = 2'-O-methyluridine-3'-phosphate
  modified_base 7: mod_base = OTHER; note = 2'-deoxy-2'-fluoroadenosine-3'-phosphate
  modified_base 8: mod_base = OTHER; note = 2'-O-methylcytidine-3'-phosphate
  modified_base 9: mod_base = OTHER; note = 2'-deoxy-2'-fluoroadenosine-3'-phosphate
  modified_base 10: mod_base = OTHER; note = 2'-deoxy-2'-fluorocytidine-3'-phosphate
  modified_base 11: mod_base = OTHER; note = 2'-deoxy-2'-fluoroguanosine-3'-phosphate
  modified_base 12: mod_base = OTHER; note = 2'-O-methyladenosine-3'-phosphate
  modified_base 13: mod_base = OTHER; note = 2'-O-methylcytidine-3'-phosphate
  modified_base 14: mod_base = OTHER; note = 2'-O-methyladenosine-3'-phosphate
  modified_base 15: mod_base = OTHER; note = 2'-O-methyladenosine-3'-phosphate
  modified_base 16: mod_base = OTHER; note = 2'-O-methyladenosine-3'-phosphate
  modified_base 17: mod_base = OTHER; note = 2'-O-methyluridine-3'-phosphate
  modified_base 18: mod_base = OTHER; note = 2'-O-methylcytidine-3'-phosphate
  modified_base 19: mod_base = OTHER; note = 2'-O-methylcytidine-3'-phosphate
  modified_base 20: mod_base = OTHER; note = 2'-O-methyladenosine-3'-phosphate
  modified_base 21: mod_base = OTHER; note = 2'-O-methyladenosine-3'-phosphate ((2S,4R)-1-[29-[[2-(acetylamino)-2-deoxy-beta-D-galactopyra nosyl]oxy]-14,14-bis[[3-[[3-[[5-[[2-(acetylamino)-2-deoxy-b eta-D-galactopyranosyl]oxy]-1-oxopentyl]amino]propyl]amino] -3-oxopropoxy]methyl]-1,12,19,25-tetraoxo-16-oxa-13,20,24-t riazanonacos-1-yl]-4-hydroxy-2-pyrrolidinyl)methyl ester
ggtgctacacgacaaatccaa

SEQ ID NO: 800 - RNA, 21 nt, synthetic construct
  source 1..21: mol_type = other RNA
  modified_base 1: mod_base = OTHER; note = 2'-O-methylguanosine-3'-phosphorothioate
  modified_base 2: mod_base = OTHER; note = 2'-O-methyluridine-3'-phosphorothioate
  modified_base 3: mod_base = OTHER; note = 2'-O-methylguanosine-3'-phosphate
  modified_base 4: mod_base = OTHER; note = 2'-O-methylcytidine-3'-phosphate
  modified_base 5: mod_base = OTHER; note = 2'-O-methyluridine-3'-phosphate
  modified_base 6: mod_base = OTHER; note = 2'-O-methyladenosine-3'-phosphate
  modified_base 7: mod_base = OTHER; note = 2'-deoxy-2'-fluorocytidine-3'-phosphate
  modified_base 8: mod_base = OTHER; note = 2'-O-methyladenosine-3'-phosphate
  modified_base 9: mod_base = OTHER; note = 2'-deoxy-2'-fluorocytidine-3'-phosphate
  modified_base 10: mod_base = OTHER; note = 2'-deoxy-2'-fluoroguanosine-3'-phosphate
  modified_base 11: mod_base = OTHER; note = 2'-deoxy-2'-fluoroadenosine-3'-phosphate
  modified_base 12: mod_base = OTHER; note = 2'-O-methylcytidine-3'-phosphate
  modified_base 13: mod_base = OTHER; note = 2'-O-methyladenosine-3'-phosphate
  modified_base 14: mod_base = OTHER; note = 2'-O-methyladenosine-3'-phosphate
  modified_base 15: mod_base = OTHER; note = 2'-O-methyladenosine-3'-phosphate
  modified_base 16: mod_base = OTHER; note = 2'-O-methyluridine-3'-phosphate
  modified_base 17: mod_base = OTHER; note = 2'-O-methylcytidine-3'-phosphate
  modified_base 18: mod_base = OTHER; note = 2'-O-methylcytidine-3'-phosphate
  modified_base 19: mod_base = OTHER; note = 2'-O-methyladenosine-3'-phosphate
  modified_base 20: mod_base = OTHER; note = 2'-O-methyladenosine-3'-phosphate
  modified_base 21: mod_base = OTHER; note = 2'-O-methyladenosine-3'-phosphate ((2S,4R)-1-[29-[[2-(acetylamino)-2-deoxy-beta-D-galactopyra nosyl]oxy]-14,14-bis[[3-[[3-[[5-[[2-(acetylamino)-2-deoxy-b eta-D-galactopyranosyl]oxy]-1-oxopentyl]amino]propyl]amino] -3-oxopropoxy]methyl]-1,12,19,25-tetraoxo-16-oxa-13,20,24-t riazanonacos-1-yl]-4-hydroxy-2-pyrrolidinyl)methyl ester
gtgctacacgacaaatccaaa

SEQ ID NO: 801 - RNA, 21 nt, synthetic construct
  source 1..21: mol_type = other RNA
  modified_base 1: mod_base = OTHER; note = 2'-O-methylguanosine-3'-phosphorothioate
  modified_base 2: mod_base = OTHER; note = 2'-O-methyluridine-3'-phosphorothioate
  modified_base 3: mod_base = OTHER; note = 2'-O-methylguanosine-3'-phosphate
  modified_base 4: mod_base = OTHER; note = 2'-O-methylcytidine-3'-phosphate
  modified_base 5: mod_base = OTHER; note = 2'-O-methyluridine-3'-phosphate
  modified_base 6: mod_base = OTHER; note = 2'-O-methyladenosine-3'-phosphate
  modified_base 7: mod_base = OTHER; note = 2'-deoxy-2'-fluorocytidine-3'-phosphate
  modified_base 8: mod_base = OTHER; note = 2'-O-methyladenosine-3'-phosphate
  modified_base 9: mod_base = OTHER; note = 2'-deoxy-2'-fluorocytidine-3'-phosphate
  modified_base 10: mod_base = OTHER; note = 2'-deoxy-2'-fluoroguanosine-3'-phosphate
  modified_base 11: mod_base = OTHER; note = 2'-deoxy-2'-fluoroadenosine-3'-phosphate
  modified_base 12: mod_base = OTHER; note = 2'-O-methylcytidine-3'-phosphate
  modified_base 13: mod_base = OTHER; note = 2'-O-methyladenosine-3'-phosphate
  modified_base 14: mod_base = OTHER; note = 2'-O-methyladenosine-3'-phosphate
  modified_base 15: mod_base = OTHER; note = 2'-O-methyluridine-3'-phosphate
  modified_base 16: mod_base = OTHER; note = 2'-O-methyluridine-3'-phosphate
  modified_base 17: mod_base = OTHER; note = 2'-O-methylcytidine-3'-phosphate
  modified_base 18: mod_base = OTHER; note = 2'-O-methylcytidine-3'-phosphate
  modified_base 19: mod_base = OTHER; note = 2'-O-methyladenosine-3'-phosphate
  modified_base 20: mod_base = OTHER; note = 2'-O-methyladenosine-3'-phosphate
  modified_base 21: mod_base = OTHER; note = 2'-O-methyladenosine-3'-phosphate ((2S,4R)-1-[29-[[2-(acetylamino)-2-deoxy-beta-D-galactopyra nosyl]oxy]-14,14-bis[[3-[[3-[[5-[[2-(acetylamino)-2-deoxy-b eta-D-galactopyranosyl]oxy]-1-oxopentyl]amino]propyl]amino] -3-oxopropoxy]methyl]-1,12,19,25-tetraoxo-16-oxa-13,20,24-t riazanonacos-1-yl]-4-hydroxy-2-pyrrolidinyl)methyl ester
gtgctacacgacaattccaaa

SEQ ID NO: 802 - RNA, 21 nt, synthetic construct
  source 1..21: mol_type = other RNA
  modified_base 1: mod_base = OTHER; note = 2'-O-methylcytidine-3'-phosphorothioate
  modified_base 2: mod_base = OTHER; note = 2'-O-methyluridine-3'-phosphorothioate
  modified_base 3: mod_base = OTHER; note = 2'-O-methyladenosine-3'-phosphate
  modified_base 4: mod_base = OTHER; note = 2'-O-methylcytidine-3'-phosphate
  modified_base 5: mod_base = OTHER; note = 2'-O-methyladenosine-3'-phosphate
  modified_base 6: mod_base = OTHER; note = 2'-O-methylcytidine-3'-phosphate
  modified_base 7: mod_base = OTHER; note = 2'-deoxy-2'-fluoroguanosine-3'-phosphate
  modified_base 8: mod_base = OTHER; note = 2'-O-methyladenosine-3'-phosphate
  modified_base 9: mod_base = OTHER; note = 2'-deoxy-2'-fluorocytidine-3'-phosphate
  modified_base 10: mod_base = OTHER; note = 2'-deoxy-2'-fluoroadenosine-3'-phosphate
  modified_base 11: mod_base = OTHER; note = 2'-deoxy-2'-fluoroadenosine-3'-phosphate
  modified_base 12: mod_base = OTHER; note = 2'-O-methyladenosine-3'-phosphate
  modified_base 13: mod_base = OTHER; note = 2'-O-methyluridine-3'-phosphate
  modified_base 14: mod_base = OTHER; note = 2'-O-methylcytidine-3'-phosphate
  modified_base 15: mod_base = OTHER; note = 2'-O-methylcytidine-3'-phosphate
  modified_base 16: mod_base = OTHER; note = 2'-O-methyladenosine-3'-phosphate
  modified_base 17: mod_base = OTHER; note = 2'-O-methyladenosine-3'-phosphate
  modified_base 18: mod_base = OTHER; note = 2'-O-methylguanosine-3'-phosphate
  modified_base 19: mod_base = OTHER; note = 2'-O-methyladenosine-3'-phosphate
  modified_base 20: mod_base = OTHER; note = 2'-O-methyladenosine-3'-phosphate
  modified_base 21: mod_base = OTHER; note = 2'-O-methyladenosine-3'-phosphate ((2S,4R)-1-[29-[[2-(acetylamino)-2-deoxy-beta-D-galactopyra nosyl]oxy]-14,14-bis[[3-[[3-[[5-[[2-(acetylamino)-2-deoxy-b eta-D-galactopyranosyl]oxy]-1-oxopentyl]amino]propyl]amino] -3-oxopropoxy]methyl]-1,12,19,25-tetraoxo-16-oxa-13,20,24-t riazanonacos-1-yl]-4-hydroxy-2-pyrrolidinyl)methyl ester
ctacacgacaaatccaagaaa

SEQ ID NO: 803 - RNA, 21 nt, synthetic construct
  source 1..21: mol_type = other RNA
  modified_base 1: mod_base = OTHER; note = 2'-O-methylcytidine-3'-phosphorothioate
  modified_base 2: mod_base = OTHER; note = 2'-O-methyluridine-3'-phosphorothioate
  modified_base 3: mod_base = OTHER; note = 2'-O-methyladenosine-3'-phosphate
  modified_base 4: mod_base = OTHER; note = 2'-O-methylcytidine-3'-phosphate
  modified_base 5: mod_base = OTHER; note = 2'-O-methyladenosine-3'-phosphate
  modified_base 6: mod_base = OTHER; note = 2'-O-methylcytidine-3'-phosphate
  modified_base 7: mod_base = OTHER; note = 2'-deoxy-2'-fluoroguanosine-3'-phosphate
  modified_base 8: mod_base = OTHER; note = 2'-O-methyladenosine-3'-phosphate
  modified_base 9: mod_base = OTHER; note = 2'-deoxy-2'-fluorocytidine-3'-phosphate
  modified_base 10: mod_base = OTHER; note = 2'-deoxy-2'-fluoroadenosine-3'-phosphate
  modified_base 11: mod_base = OTHER; note = 2'-deoxy-2'-fluoroadenosine-3'-phosphate
  modified_base 12: mod_base = OTHER; note = 2'-O-methyladenosine-3'-phosphate
  modified_base 13: mod_base = OTHER; note = 2'-O-methyluridine-3'-phosphate
  modified_base 14: mod_base = OTHER; note = 2'-O-methylcytidine-3'-phosphate
  modified_base 15: mod_base = OTHER; note = 2'-O-methyluridine-3'-phosphate
  modified_base 16: mod_base = OTHER; note = 2'-O-methyladenosine-3'-phosphate
  modified_base 17: mod_base = OTHER; note = 2'-O-methyladenosine-3'-phosphate
  modified_base 18: mod_base = OTHER; note = 2'-O-methylguanosine-3'-phosphate
  modified_base 19: mod_base = OTHER; note = 2'-O-methyladenosine-3'-phosphate
  modified_base 20: mod_base = OTHER; note = 2'-O-methyladenosine-3'-phosphate
  modified_base 21: mod_base = OTHER; note = 2'-O-methyladenosine-3'-phosphate ((2S,4R)-1-[29-[[2-(acetylamino)-2-deoxy-beta-D-galactopyra nosyl]oxy]-14,14-bis[[3-[[3-[[5-[[2-(acetylamino)-2-deoxy-b eta-D-galactopyranosyl]oxy]-1-oxopentyl]amino]propyl]amino] -3-oxopropoxy]methyl]-1,12,19,25-tetraoxo-16-oxa-13,20,24-t riazanonacos-1-yl]-4-hydroxy-2-pyrrolidinyl)methyl ester
ctacacgacaaatctaagaaa

SEQ ID NO: 804 - RNA, 21 nt, synthetic construct
  source 1..21: mol_type = other RNA
  modified_base 1: mod_base = OTHER; note = 2'-O-methyluridine-3'-phosphorothioate
  modified_base 2: mod_base = OTHER; note = 2'-O-methyladenosine-3'-phosphorothioate
  modified_base 3: mod_base = OTHER; note = 2'-O-methylcytidine-3'-phosphate
  modified_base 4: mod_base = OTHER; note = 2'-O-methyladenosine-3'-phosphate
  modified_base 5: mod_base = OTHER; note = 2'-O-methylcytidine-3'-phosphate
  modified_base 6: mod_base = OTHER; note = 2'-O-methylguanosine-3'-phosphate
  modified_base 7: mod_base = OTHER; note = 2'-deoxy-2'-fluoroadenosine-3'-phosphate
  modified_base 8: mod_base = OTHER; note = 2'-O-methylcytidine-3'-phosphate
  modified_base 9: mod_base = OTHER; note = 2'-deoxy-2'-fluoroadenosine-3'-phosphate
  modified_base 10: mod_base = OTHER; note = 2'-deoxy-2'-fluoroadenosine-3'-phosphate
  modified_base 11: mod_base = OTHER; note = 2'-deoxy-2'-fluoroadenosine-3'-phosphate
  modified_base 12: mod_base = OTHER; note = 2'-O-methyluridine-3'-phosphate
  modified_base 13: mod_base = OTHER; note = 2'-O-methylcytidine-3'-phosphate
  modified_base 14: mod_base = OTHER; note = 2'-O-methylcytidine-3'-phosphate
  modified_base 15: mod_base = OTHER; note = 2'-O-methyladenosine-3'-phosphate
  modified_base 16: mod_base = OTHER; note = 2'-O-methyladenosine-3'-phosphate
  modified_base 17: mod_base = OTHER; note = 2'-O-methylguanosine-3'-phosphate
  modified_base 18: mod_base = OTHER; note = 2'-O-methyladenosine-3'-phosphate
  modified_base 19: mod_base = OTHER; note = 2'-O-methyladenosine-3'-phosphate
  modified_base 20: mod_base = OTHER; note = 2'-O-methyladenosine-3'-phosphate
  modified_base 21: mod_base = OTHER; note = 2'-O-methyladenosine-3'-phosphate ((2S,4R)-1-[29-[[2-(acetylamino)-2-deoxy-beta-D-galactopyra nosyl]oxy]-14,14-bis[[3-[[3-[[5-[[2-(acetylamino)-2-deoxy-b eta-D-galactopyranosyl]oxy]-1-oxopentyl]amino]propyl]amino] -3-oxopropoxy]methyl]-1,12,19,25-tetraoxo-16-oxa-13,20,24-t riazanonacos-1-yl]-4-hydroxy-2-pyrrolidinyl)methyl ester
tacacgacaaatccaagaaaa

SEQ ID NO: 805 - RNA, 21 nt, synthetic construct
  source 1..21: mol_type = other RNA
  modified_base 1: mod_base = OTHER; note = 2'-O-methyluridine-3'-phosphorothioate
  modified_base 2: mod_base = OTHER; note = 2'-O-methyladenosine-3'-phosphorothioate
  modified_base 3: mod_base = OTHER; note = 2'-O-methylcytidine-3'-phosphate
  modified_base 4: mod_base = OTHER; note = 2'-O-methyladenosine-3'-phosphate
  modified_base 5: mod_base = OTHER; note = 2'-O-methylcytidine-3'-phosphate
  modified_base 6: mod_base = OTHER; note = 2'-O-methylguanosine-3'-phosphate
  modified_base 7: mod_base = OTHER; note = 2'-deoxy-2'-fluoroadenosine-3'-phosphate
  modified_base 8: mod_base = OTHER; note = 2'-O-methylcytidine-3'-phosphate
  modified_base 9: mod_base = OTHER; note = 2'-deoxy-2'-fluoroadenosine-3'-phosphate
  modified_base 10: mod_base = OTHER; note = 2'-deoxy-2'-fluoroadenosine-3'-phosphate
  modified_base 11: mod_base = OTHER; note = 2'-deoxy-2'-fluoroadenosine-3'-phosphate
  modified_base 12: mod_base = OTHER; note = 2'-O-methyluridine-3'-phosphate
  modified_base 13: mod_base = OTHER; note = 2'-O-methylcytidine-3'-phosphate
  modified_base 14: mod_base = OTHER; note = 2'-O-methylcytidine-3'-phosphate
  modified_base 15: mod_base = OTHER; note = 2'-O-methyluridine-3'-phosphate
  modified_base 16: mod_base = OTHER; note = 2'-O-methyladenosine-3'-phosphate
  modified_base 17: mod_base = OTHER; note = 2'-O-methylguanosine-3'-phosphate
  modified_base 18: mod_base = OTHER; note = 2'-O-methyladenosine-3'-phosphate
  modified_base 19: mod_base = OTHER; note = 2'-O-methyladenosine-3'-phosphate
  modified_base 20: mod_base = OTHER; note = 2'-O-methyladenosine-3'-phosphate
  modified_base 21: mod_base = OTHER; note = 2'-O-methyladenosine-3'-phosphate ((2S,4R)-1-[29-[[2-(acetylamino)-2-deoxy-beta-D-galactopyra nosyl]oxy]-14,14-bis[[3-[[3-[[5-[[2-(acetylamino)-2-deoxy-b eta-D-galactopyranosyl]oxy]-1-oxopentyl]amino]propyl]amino] -3-oxopropoxy]methyl]-1,12,19,25-tetraoxo-16-oxa-13,20,24-t riazanonacos-1-yl]-4-hydroxy-2-pyrrolidinyl)methyl ester
tacacgacaaatcctagaaaa

SEQ ID NO: 806 - RNA, 21 nt, synthetic construct
  source 1..21: mol_type = other RNA
  modified_base 1: mod_base = OTHER; note = 2'-O-methyladenosine-3'-phosphorothioate
  modified_base 2: mod_base = OTHER; note = 2'-O-methylcytidine-3'-phosphorothioate
  modified_base 3: mod_base = OTHER; note = 2'-O-methyladenosine-3'-phosphate
  modified_base 4: mod_base = OTHER; note = 2'-O-methylcytidine-3'-phosphate
  modified_base 5: mod_base = OTHER; note = 2'-O-methylguanosine-3'-phosphate
  modified_base 6: mod_base = OTHER; note = 2'-O-methyladenosine-3'-phosphate
  modified_base 7: mod_base = OTHER; note = 2'-deoxy-2'-fluorocytidine-3'-phosphate
  modified_base 8: mod_base = OTHER; note = 2'-O-methyladenosine-3'-phosphate
  modified_base 9: mod_base = OTHER; note = 2'-deoxy-2'-fluoroadenosine-3'-phosphate
  modified_base 10: mod_base = OTHER; note = 2'-deoxy-2'-fluoroadenosine-3'-phosphate
  modified_base 11: mod_base = OTHER; note = 2'-deoxy-2'-fluorouridine-3'-phosphate
  modified_base 12: mod_base = OTHER; note = 2'-O-methylcytidine-3'-phosphate
  modified_base 13: mod_base = OTHER; note = 2'-O-methylcytidine-3'-phosphate
  modified_base 14: mod_base = OTHER; note = 2'-O-methyladenosine-3'-phosphate
  modified_base 15: mod_base = OTHER; note = 2'-O-methyladenosine-3'-phosphate
  modified_base 16: mod_base = OTHER; note = 2'-O-methylguanosine-3'-phosphate
  modified_base 17: mod_base = OTHER; note = 2'-O-methyladenosine-3'-phosphate
  modified_base 18: mod_base = OTHER; note = 2'-O-methyladenosine-3'-phosphate
  modified_base 19: mod_base = OTHER; note = 2'-O-methyladenosine-3'-phosphate
  modified_base 20: mod_base = OTHER; note = 2'-O-methyladenosine-3'-phosphate
  modified_base 21: mod_base = OTHER; note = 2'-O-methyladenosine-3'-phosphate ((2S,4R)-1-[29-[[2-(acetylamino)-2-deoxy-beta-D-galactopyra nosyl]oxy]-14,14-bis[[3-[[3-[[5-[[2-(acetylamino)-2-deoxy-b eta-D-galactopyranosyl]oxy]-1-oxopentyl]amino]propyl]amino] -3-oxopropoxy]methyl]-1,12,19,25-tetraoxo-16-oxa-13,20,24-t riazanonacos-1-yl]-4-hydroxy-2-pyrrolidinyl)methyl ester
acacgacaaatccaagaaaaa

SEQ ID NO: 807 - RNA, 21 nt, synthetic construct
  source 1..21: mol_type = other RNA
  modified_base 1: mod_base = OTHER; note = 2'-O-methyladenosine-3'-phosphorothioate
  modified_base 2: mod_base = OTHER; note = 2'-O-methylcytidine-3'-phosphorothioate
  modified_base 3: mod_base = OTHER; note = 2'-O-methyladenosine-3'-phosphate
  modified_base 4: mod_base = OTHER; note = 2'-O-methylcytidine-3'-phosphate
  modified_base 5: mod_base = OTHER; note = 2'-O-methylguanosine-3'-phosphate
  modified_base 6: mod_base = OTHER; note = 2'-O-methyladenosine-3'-phosphate
  modified_base 7: mod_base = OTHER; note = 2'-deoxy-2'-fluorocytidine-3'-phosphate
  modified_base 8: mod_base = OTHER; note = 2'-O-methyladenosine-3'-phosphate
  modified_base 9: mod_base = OTHER; note = 2'-deoxy-2'-fluoroadenosine-3'-phosphate
  modified_base 10: mod_base = OTHER; note = 2'-deoxy-2'-fluoroadenosine-3'-phosphate
  modified_base 11: mod_base = OTHER; note = 2'-deoxy-2'-fluorouridine-3'-phosphate
  modified_base 12: mod_base = OTHER; note = 2'-O-methylcytidine-3'-phosphate
  modified_base 13: mod_base = OTHER; note = 2'-O-methylcytidine-3'-phosphate
  modified_base 14: mod_base = OTHER; note = 2'-O-methyladenosine-3'-phosphate
  modified_base 15: mod_base = OTHER; note = 2'-O-methyluridine-3'-phosphate
  modified_base 16: mod_base = OTHER; note = 2'-O-methylguanosine-3'-phosphate
  modified_base 17: mod_base = OTHER; note = 2'-O-methyladenosine-3'-phosphate
  modified_base 18: mod_base = OTHER; note = 2'-O-methyladenosine-3'-phosphate
  modified_base 19: mod_base = OTHER; note = 2'-O-methyladenosine-3'-phosphate
  modified_base 20: mod_base = OTHER; note = 2'-O-methyladenosine-3'-phosphate
  modified_base 21: mod_base = OTHER; note = 2'-O-methyladenosine-3'-phosphate ((2S,4R)-1-[29-[[2-(acetylamino)-2-deoxy-beta-D-galactopyra nosyl]oxy]-14,14-bis[[3-[[3-[[5-[[2-(acetylamino)-2-deoxy-b eta-D-galactopyranosyl]oxy]-1-oxopentyl]amino]propyl]amino] -3-oxopropoxy]methyl]-1,12,19,25-tetraoxo-16-oxa-13,20,24-t riazanonacos-1-yl]-4-hydroxy-2-pyrrolidinyl)methyl ester
acacgacaaatccatgaaaaa

SEQ ID NO: 808 - RNA, 21 nt, synthetic construct
  source 1..21: mol_type = other RNA
  modified_base 1: mod_base = OTHER; note = 2'-O-methylcytidine-3'-phosphorothioate
  modified_base 2: mod_base = OTHER; note = 2'-O-methyladenosine-3'-phosphorothioate
  modified_base 3: mod_base = OTHER; note = 2'-O-methylcytidine-3'-phosphate
  modified_base 4: mod_base = OTHER; note = 2'-O-methylguanosine-3'-phosphate
  modified_base 5: mod_base = OTHER; note = 2'-O-methyladenosine-3'-phosphate
  modified_base 6: mod_base = OTHER; note = 2'-O-methylcytidine-3'-phosphate
  modified_base 7: mod_base = OTHER; note = 2'-deoxy-2'-fluoroadenosine-3'-phosphate
  modified_base 8: mod_base = OTHER; note = 2'-O-methyladenosine-3'-phosphate
  modified_base 9: mod_base = OTHER; note = 2'-deoxy-2'-fluoroadenosine-3'-phosphate
  modified_base 10: mod_base = OTHER; note = 2'-deoxy-2'-fluorouridine-3'-phosphate
  modified_base 11: mod_base = OTHER; note = 2'-deoxy-2'-fluorocytidine-3'-phosphate
  modified_base 12: mod_base = OTHER; note = 2'-O-methylcytidine-3'-phosphate
  modified_base 13: mod_base = OTHER; note = 2'-O-methyladenosine-3'-phosphate
  modified_base 14: mod_base = OTHER; note = 2'-O-methyladenosine-3'-phosphate
  modified_base 15: mod_base = OTHER; note = 2'-O-methylguanosine-3'-phosphate
  modified_base 16: mod_base = OTHER; note = 2'-O-methyladenosine-3'-phosphate
  modified_base 17: mod_base = OTHER; note = 2'-O-methyladenosine-3'-phosphate
  modified_base 18: mod_base = OTHER; note = 2'-O-methyladenosine-3'-phosphate
  modified_base 19: mod_base = OTHER; note = 2'-O-methyladenosine-3'-phosphate
  modified_base 20: mod_base = OTHER; note = 2'-O-methylcytidine-3'-phosphate
  modified_base 21: mod_base = OTHER; note = 2'-O-methyladenosine-3'-phosphate ((2S,4R)-1-[29-[[2-(acetylamino)-2-deoxy-beta-D-galactopyra nosyl]oxy]-14,14-bis[[3-[[3-[[5-[[2-(acetylamino)-2-deoxy-b eta-D-galactopyranosyl]oxy]-1-oxopentyl]amino]propyl]amino] -3-oxopropoxy]methyl]-1,12,19,25-tetraoxo-16-oxa-13,20,24-t riazanonacos-1-yl]-4-hydroxy-2-pyrrolidinyl)methyl ester
cacgacaaatccaagaaaaca

SEQ ID NO: 809 - RNA, 21 nt, synthetic construct
  source 1..21: mol_type = other RNA
  modified_base 1: mod_base = OTHER; note = 2'-O-methylcytidine-3'-phosphorothioate
  modified_base 2: mod_base = OTHER; note = 2'-O-methyladenosine-3'-phosphorothioate
  modified_base 3: mod_base = OTHER; note = 2'-O-methylcytidine-3'-phosphate
  modified_base 4: mod_base = OTHER; note = 2'-O-methylguanosine-3'-phosphate
  modified_base 5: mod_base = OTHER; note = 2'-O-methyladenosine-3'-phosphate
  modified_base 6: mod_base = OTHER; note = 2'-O-methylcytidine-3'-phosphate
  modified_base 7: mod_base = OTHER; note = 2'-deoxy-2'-fluoroadenosine-3'-phosphate
  modified_base 8: mod_base = OTHER; note = 2'-O-methyladenosine-3'-phosphate
  modified_base 9: mod_base = OTHER; note = 2'-deoxy-2'-fluoroadenosine-3'-phosphate
  modified_base 10: mod_base = OTHER; note = 2'-deoxy-2'-fluorouridine-3'-phosphate
  modified_base 11: mod_base = OTHER; note = 2'-deoxy-2'-fluorocytidine-3'-phosphate
  modified_base 12: mod_base = OTHER; note = 2'-O-methylcytidine-3'-phosphate
  modified_base 13: mod_base = OTHER; note = 2'-O-methyladenosine-3'-phosphate
  modified_base 14: mod_base = OTHER; note = 2'-O-methyladenosine-3'-phosphate
  modified_base 15: mod_base = OTHER; note = 2'-O-methyluridine-3'-phosphate
  modified_base 16: mod_base = OTHER; note = 2'-O-methyladenosine-3'-phosphate
  modified_base 17: mod_base = OTHER; note = 2'-O-methyladenosine-3'-phosphate
  modified_base 18: mod_base = OTHER; note = 2'-O-methyladenosine-3'-phosphate
  modified_base 19: mod_base = OTHER; note = 2'-O-methyladenosine-3'-phosphate
  modified_base 20: mod_base = OTHER; note = 2'-O-methylcytidine-3'-phosphate
  modified_base 21: mod_base = OTHER; note = 2'-O-methyladenosine-3'-phosphate ((2S,4R)-1-[29-[[2-(acetylamino)-2-deoxy-beta-D-galactopyra nosyl]oxy]-14,14-bis[[3-[[3-[[5-[[2-(acetylamino)-2-deoxy-b eta-D-galactopyranosyl]oxy]-1-oxopentyl]amino]propyl]amino] -3-oxopropoxy]methyl]-1,12,19,25-tetraoxo-16-oxa-13,20,24-t riazanonacos-1-yl]-4-hydroxy-2-pyrrolidinyl)methyl ester
cacgacaaatccaataaaaca

SEQ ID NO: 810 - RNA, 21 nt, synthetic construct
  source 1..21: mol_type = other RNA
  modified_base 1: mod_base = OTHER; note = 2'-O-methylcytidine-3'-phosphorothioate
  modified_base 2: mod_base = OTHER; note = 2'-O-methylguanosine-3'-phosphorothioate
  modified_base 3: mod_base = OTHER; note = 2'-O-methyladenosine-3'-phosphate
  modified_base 4: mod_base = OTHER; note = 2'-O-methylcytidine-3'-phosphate
  modified_base 5: mod_base = OTHER; note = 2'-O-methyladenosine-3'-phosphate
  modified_base 6: mod_base = OTHER; note = 2'-O-methyladenosine-3'-phosphate
  modified_base 7: mod_base = OTHER; note = 2'-deoxy-2'-fluoroadenosine-3'-phosphate
  modified_base 8: mod_base = OTHER; note = 2'-O-methyluridine-3'-phosphate
  modified_base 9: mod_base = OTHER; note = 2'-deoxy-2'-fluorocytidine-3'-phosphate
  modified_base 10: mod_base = OTHER; note = 2'-deoxy-2'-fluorocytidine-3'-phosphate
  modified_base 11: mod_base = OTHER; note = 2'-deoxy-2'-fluoroadenosine-3'-phosphate
  modified_base 12: mod_base = OTHER; note = 2'-O-methyladenosine-3'-phosphate
  modified_base 13: mod_base = OTHER; note = 2'-O-methylguanosine-3'-phosphate
  modified_base 14: mod_base = OTHER; note = 2'-O-methyladenosine-3'-phosphate
  modified_base 15: mod_base = OTHER; note = 2'-O-methyladenosine-3'-phosphate
  modified_base 16: mod_base = OTHER; note = 2'-O-methyladenosine-3'-phosphate
  modified_base 17: mod_base = OTHER; note = 2'-O-methyladenosine-3'-phosphate
  modified_base 18: mod_base = OTHER; note = 2'-O-methylcytidine-3'-phosphate
  modified_base 19: mod_base = OTHER; note = 2'-O-methyluridine-3'-phosphate
  modified_base 20: mod_base = OTHER; note = 2'-O-methyluridine-3'-phosphate
  modified_base 21: mod_base = OTHER; note = 2'-O-methyladenosine-3'-phosphate ((2S,4R)-1-[29-[[2-(acetylamino)-2-deoxy-beta-D-galactopyra nosyl]oxy]-14,14-bis[[3-[[3-[[5-[[2-(acetylamino)-2-deoxy-b eta-D-galactopyranosyl]oxy]-1-oxopentyl]amino]propyl]amino] -3-oxopropoxy]methyl]-1,12,19,25-tetraoxo-16-oxa-13,20,24-t riazanonacos-1-yl]-4-hydroxy-2-pyrrolidinyl)methyl ester
cgacaaatccaagaaaactta

SEQ ID NO: 811 - RNA, 21 nt, synthetic construct
  source 1..21: mol_type = other RNA
  modified_base 1: mod_base = OTHER; note = 2'-O-methylguanosine-3'-phosphorothioate
  modified_base 2: mod_base = OTHER; note = 2'-O-methyladenosine-3'-phosphorothioate
  modified_base 3: mod_base = OTHER; note = 2'-O-methylcytidine-3'-phosphate
  modified_base 4: mod_base = OTHER; note = 2'-O-methyladenosine-3'-phosphate
  modified_base 5: mod_base = OTHER; note = 2'-O-methyladenosine-3'-phosphate
  modified_base 6: mod_base = OTHER; note = 2'-O-methyladenosine-3'-phosphate
  modified_base 7: mod_base = OTHER; note = 2'-deoxy-2'-fluorouridine-3'-phosphate
  modified_base 8: mod_base = OTHER; note = 2'-O-methylcytidine-3'-phosphate
  modified_base 9: mod_base = OTHER; note = 2'-deoxy-2'-fluorocytidine-3'-phosphate
  modified_base 10: mod_base = OTHER; note = 2'-deoxy-2'-fluoroadenosine-3'-phosphate
  modified_base 11: mod_base = OTHER; note = 2'-deoxy-2'-fluoroadenosine-3'-phosphate
  modified_base 12: mod_base = OTHER; note = 2'-O-methylguanosine-3'-phosphate
  modified_base 13: mod_base = OTHER; note = 2'-O-methyladenosine-3'-phosphate
  modified_base 14: mod_base = OTHER; note = 2'-O-methyladenosine-3'-phosphate
  modified_base 15: mod_base = OTHER; note = 2'-O-methyladenosine-3'-phosphate
  modified_base 16: mod_base = OTHER; note = 2'-O-methyladenosine-3'-phosphate
  modified_base 17: mod_base = OTHER; note = 2'-O-methylcytidine-3'-phosphate
  modified_base 18: mod_base = OTHER; note = 2'-O-methyluridine-3'-phosphate
  modified_base 19: mod_base = OTHER; note = 2'-O-methyluridine-3'-phosphate
  modified_base 20: mod_base = OTHER; note = 2'-O-methyluridine-3'-phosphate
  modified_base 21: mod_base = OTHER; note = 2'-O-methyladenosine-3'-phosphate ((2S,4R)-1-[29-[[2-(acetylamino)-2-deoxy-beta-D-galactopyra nosyl]oxy]-14,14-bis[[3-[[3-[[5-[[2-(acetylamino)-2-deoxy-b eta-D-galactopyranosyl]oxy]-1-oxopentyl]amino]propyl]amino] -3-oxopropoxy]methyl]-1,12,19,25-tetraoxo-16-oxa-13,20,24-t riazanonacos-1-yl]-4-hydroxy-2-pyrrolidinyl)methyl ester
gacaaatccaagaaaacttta

SEQ ID NO: 812 - RNA, 21 nt, synthetic construct
  source 1..21: mol_type = other RNA
  modified_base 1: mod_base = OTHER; note = 2'-O-methylguanosine-3'-phosphorothioate
  modified_base 2: mod_base = OTHER; note = 2'-O-methyladenosine-3'-phosphorothioate
  modified_base 3: mod_base = OTHER; note = 2'-O-methylcytidine-3'-phosphate
  modified_base 4: mod_base = OTHER; note = 2'-O-methyladenosine-3'-phosphate
  modified_base 5: mod_base = OTHER; note = 2'-O-methyladenosine-3'-phosphate
  modified_base 6: mod_base = OTHER; note = 2'-O-methyladenosine-3'-phosphate
  modified_base 7: mod_base = OTHER; note = 2'-deoxy-2'-fluorouridine-3'-phosphate
  modified_base 8: mod_base = OTHER; note = 2'-O-methylcytidine-3'-phosphate
  modified_base 9: mod_base = OTHER; note = 2'-deoxy-2'-fluorocytidine-3'-phosphate
  modified_base 10: mod_base = OTHER; note = 2'-deoxy-2'-fluoroadenosine-3'-phosphate
  modified_base 11: mod_base = OTHER; note = 2'-deoxy-2'-fluoroadenosine-3'-phosphate
  modified_base 12: mod_base = OTHER; note = 2'-O-methylguanosine-3'-phosphate
  modified_base 13: mod_base = OTHER; note = 2'-O-methyladenosine-3'-phosphate
  modified_base 14: mod_base = OTHER; note = 2'-O-methyladenosine-3'-phosphate
  modified_base 15: mod_base = OTHER; note = 2'-O-methyluridine-3'-phosphate
  modified_base 16: mod_base = OTHER; note = 2'-O-methyladenosine-3'-phosphate
  modified_base 17: mod_base = OTHER; note = 2'-O-methylcytidine-3'-phosphate
  modified_base 18: mod_base = OTHER; note = 2'-O-methyluridine-3'-phosphate
  modified_base 19: mod_base = OTHER; note = 2'-O-methyluridine-3'-phosphate
  modified_base 20: mod_base = OTHER; note = 2'-O-methyluridine-3'-phosphate
  modified_base 21: mod_base = OTHER; note = 2'-O-methyladenosine-3'-phosphate ((2S,4R)-1-[29-[[2-(acetylamino)-2-deoxy-beta-D-galactopyra nosyl]oxy]-14,14-bis[[3-[[3-[[5-[[2-(acetylamino)-2-deoxy-b eta-D-galactopyranosyl]oxy]-1-oxopentyl]amino]propyl]amino] -3-oxopropoxy]methyl]-1,12,19,25-tetraoxo-16-oxa-13,20,24-t riazanonacos-1-yl]-4-hydroxy-2-pyrrolidinyl)methyl ester
gacaaatccaagaatacttta

SEQ ID NO: 813 - RNA, 21 nt, synthetic construct
  source 1..21: mol_type = other RNA
  modified_base 1: mod_base = OTHER; note = 2'-O-methylguanosine-3'-phosphorothioate
  modified_base 2: mod_base = OTHER; note = 2'-O-methyladenosine-3'-phosphorothioate
  modified_base 3: mod_base = OTHER; note = 2'-O-methylcytidine-3'-phosphate
  modified_base 4: mod_base = OTHER; note = 2'-O-methyluridine-3'-phosphate
  modified_base 5: mod_base = OTHER; note = 2'-O-methyladenosine-3'-phosphate
  modified_base 6: mod_base = OTHER; note = 2'-O-methylcytidine-3'-phosphate
  modified_base 7: mod_base = OTHER; note = 2'-deoxy-2'-fluorouridine-3'-phosphate
  modified_base 8: mod_base = OTHER; note = 2'-O-methylguanosine-3'-phosphate
  modified_base 9: mod_base = OTHER; note = 2'-deoxy-2'-fluorouridine-3'-phosphate
  modified_base 10: mod_base = OTHER; note = 2'-deoxy-2'-fluoroguanosine-3'-phosphate
  modified_base 11: mod_base = OTHER; note = 2'-deoxy-2'-fluoroadenosine-3'-phosphate
  modified_base 12: mod_base = OTHER; note = 2'-O-methyluridine-3'-phosphate
  modified_base 13: mod_base = OTHER; note = 2'-O-methylguanosine-3'-phosphate
  modified_base 14: mod_base = OTHER; note = 2'-O-methyluridine-3'-phosphate
  modified_base 15: mod_base = OTHER; note = 2'-O-methylcytidine-3'-phosphate
  modified_base 16: mod_base = OTHER; note = 2'-O-methylcytidine-3'-phosphate
  modified_base 17: mod_base = OTHER; note = 2'-O-methylcytidine-3'-phosphate
  modified_base 18: mod_base = OTHER; note = 2'-O-methyluridine-3'-phosphate
  modified_base 19: mod_base = OTHER; note = 2'-O-methylcytidine-3'-phosphate
  modified_base 20: mod_base = OTHER; note = 2'-O-methyladenosine-3'-phosphate
  modified_base 21: mod_base = OTHER; note = 2'-O-methyladenosine-3'-phosphate ((2S,4R)-1-[29-[[2-(acetylamino)-2-deoxy-beta-D-galactopyra nosyl]oxy]-14,14-bis[[3-[[3-[[5-[[2-(acetylamino)-2-deoxy-b eta-D-galactopyranosyl]oxy]-1-oxopentyl]amino]propyl]amino] -3-oxopropoxy]methyl]-1,12,19,25-tetraoxo-16-oxa-13,20,24-t riazanonacos-1-yl]-4-hydroxy-2-pyrrolidinyl)methyl ester
gactactgtgatgtccctcaa

SEQ ID NO: 814 - RNA, 21 nt, synthetic construct
  source 1..21: mol_type = other RNA
  modified_base 1: mod_base = OTHER; note = 2'-O-methylguanosine-3'-phosphorothioate
  modified_base 2: mod_base = OTHER; note = 2'-O-methyladenosine-3'-phosphorothioate
  modified_base 3: mod_base = OTHER; note = 2'-O-methylcytidine-3'-phosphate
  modified_base 4: mod_base = OTHER; note = 2'-O-methyluridine-3'-phosphate
  modified_base 5: mod_base = OTHER; note = 2'-O-methyladenosine-3'-phosphate
  modified_base 6: mod_base = OTHER; note = 2'-O-methylcytidine-3'-phosphate
  modified_base 7: mod_base = OTHER; note = 2'-deoxy-2'-fluorouridine-3'-phosphate
  modified_base 8: mod_base = OTHER; note = 2'-O-methylguanosine-3'-phosphate
  modified_base 9: mod_base = OTHER; note = 2'-deoxy-2'-fluorouridine-3'-phosphate
  modified_base 10: mod_base = OTHER; note = 2'-deoxy-2'-fluoroguanosine-3'-phosphate
  modified_base 11: mod_base = OTHER; note = 2'-deoxy-2'-fluoroadenosine-3'-phosphate
  modified_base 12: mod_base = OTHER; note = 2'-O-methyluridine-3'-phosphate
  modified_base 13: mod_base = OTHER; note = 2'-O-methylguanosine-3'-phosphate
  modified_base 14: mod_base = OTHER; note = 2'-O-methyluridine-3'-phosphate
  modified_base 15: mod_base = OTHER; note = 2'-O-methyluridine-3'-phosphate
  modified_base 16: mod_base = OTHER; note = 2'-O-methylcytidine-3'-phosphate
  modified_base 17: mod_base = OTHER; note = 2'-O-methylcytidine-3'-phosphate
  modified_base 18: mod_base = OTHER; note = 2'-O-methyluridine-3'-phosphate
  modified_base 19: mod_base = OTHER; note = 2'-O-methylcytidine-3'-phosphate
  modified_base 20: mod_base = OTHER; note = 2'-O-methyladenosine-3'-phosphate
  modified_base 21: mod_base = OTHER; note = 2'-O-methyladenosine-3'-phosphate ((2S,4R)-1-[29-[[2-(acetylamino)-2-deoxy-beta-D-galactopyra nosyl]oxy]-14,14-bis[[3-[[3-[[5-[[2-(acetylamino)-2-deoxy-b eta-D-galactopyranosyl]oxy]-1-oxopentyl]amino]propyl]amino] -3-oxopropoxy]methyl]-1,12,19,25-tetraoxo-16-oxa-13,20,24-t riazanonacos-1-yl]-4-hydroxy-2-pyrrolidinyl)methyl ester
gactactgtgatgttcctcaa

SEQ ID NO: 815 - RNA, 21 nt, synthetic construct
  source 1..21: mol_type = other RNA
  modified_base 1: mod_base = OTHER; note = 2'-O-methylcytidine-3'-phosphorothioate
  modified_base 2: mod_base = OTHER; note = 2'-O-methyluridine-3'-phosphorothioate
  modified_base 3: mod_base = OTHER; note = 2'-O-methylguanosine-3'-phosphate
  modified_base 4: mod_base = OTHER; note = 2'-O-methyluridine-3'-phosphate
  modified_base 5: mod_base = OTHER; note = 2'-O-methylguanosine-3'-phosphate
  modified_base 6: mod_base = OTHER; note = 2'-O-methyladenosine-3'-phosphate
  modified_base 7: mod_base = OTHER; note = 2'-deoxy-2'-fluorouridine-3'-phosphate
  modified_base 8: mod_base = OTHER; note = 2'-O-methylguanosine-3'-phosphate
  modified_base 9: mod_base = OTHER; note = 2'-deoxy-2'-fluorouridine-3'-phosphate
  modified_base 10: mod_base = OTHER; note = 2'-deoxy-2'-fluorocytidine-3'-phosphate
  modified_base 11: mod_base = OTHER; note = 2'-deoxy-2'-fluorocytidine-3'-phosphate
  modified_base 12: mod_base = OTHER; note = 2'-O-methylcytidine-3'-phosphate
  modified_base 13: mod_base = OTHER; note = 2'-O-methyluridine-3'-phosphate
  modified_base 14: mod_base = OTHER; note = 2'-O-methylcytidine-3'-phosphate
  modified_base 15: mod_base = OTHER; note = 2'-O-methyladenosine-3'-phosphate
  modified_base 16: mod_base = OTHER; note = 2'-O-methylguanosine-3'-phosphate
  modified_base 17: mod_base = OTHER; note = 2'-O-methyluridine-3'-phosphate
  modified_base 18: mod_base = OTHER; note = 2'-O-methylguanosine-3'-phosphate
  modified_base 19: mod_base = OTHER; note = 2'-O-methyluridine-3'-phosphate
  modified_base 20: mod_base = OTHER; note = 2'-O-methylguanosine-3'-phosphate
  modified_base 21: mod_base = OTHER; note = 2'-O-methyladenosine-3'-phosphate ((2S,4R)-1-[29-[[2-(acetylamino)-2-deoxy-beta-D-galactopyra nosyl]oxy]-14,14-bis[[3-[[3-[[5-[[2-(acetylamino)-2-deoxy-b eta-D-galactopyranosyl]oxy]-1-oxopentyl]amino]propyl]amino] -3-oxopropoxy]methyl]-1,12,19,25-tetraoxo-16-oxa-13,20,24-t riazanonacos-1-yl]-4-hydroxy-2-pyrrolidinyl)methyl ester
ctgtgatgtccctcagtgtga

SEQ ID NO: 816 - RNA, 21 nt, synthetic construct
  source 1..21: mol_type = other RNA
  modified_base 1: mod_base = OTHER; note = 2'-O-methyluridine-3'-phosphorothioate
  modified_base 2: mod_base = OTHER; note = 2'-O-methyluridine-3'-phosphorothioate
  modified_base 3: mod_base = OTHER; note = 2'-O-methylguanosine-3'-phosphate
  modified_base 4: mod_base = OTHER; note = 2'-O-methylguanosine-3'-phosphate
  modified_base 5: mod_base = OTHER; note = 2'-O-methyladenosine-3'-phosphate
  modified_base 6: mod_base = OTHER; note = 2'-O-methyladenosine-3'-phosphate
  modified_base 7: mod_base = OTHER; note = 2'-deoxy-2'-fluorouridine-3'-phosphate
  modified_base 8: mod_base = OTHER; note = 2'-O-methylguanosine-3'-phosphate
  modified_base 9: mod_base = OTHER; note = 2'-deoxy-2'-fluorocytidine-3'-phosphate
  modified_base 10: mod_base = OTHER; note = 2'-deoxy-2'-fluoroadenosine-3'-phosphate
  modified_base 11: mod_base = OTHER; note = 2'-deoxy-2'-fluorocytidine-3'-phosphate
  modified_base 12: mod_base = OTHER; note = 2'-O-methyluridine-3'-phosphate
  modified_base 13: mod_base = OTHER; note = 2'-O-methyluridine-3'-phosphate
  modified_base 14: mod_base = OTHER; note = 2'-O-methylcytidine-3'-phosphate
  modified_base 15: mod_base = OTHER; note = 2'-O-methyluridine-3'-phosphate
  modified_base 16: mod_base = OTHER; note = 2'-O-methylguanosine-3'-phosphate
  modified_base 17: mod_base = OTHER; note = 2'-O-methyluridine-3'-phosphate
  modified_base 18: mod_base = OTHER; note = 2'-O-methylguanosine-3'-phosphate
  modified_base 19: mod_base = OTHER; note = 2'-O-methylguanosine-3'-phosphate
  modified_base 20: mod_base = OTHER; note = 2'-O-methyladenosine-3'-phosphate
  modified_base 21: mod_base = OTHER; note = 2'-O-methyladenosine-3'-phosphate ((2S,4R)-1-[29-[[2-(acetylamino)-2-deoxy-beta-D-galactopyra nosyl]oxy]-14,14-bis[[3-[[3-[[5-[[2-(acetylamino)-2-deoxy-b eta-D-galactopyranosyl]oxy]-1-oxopentyl]amino]propyl]amino] -3-oxopropoxy]methyl]-1,12,19,25-tetraoxo-16-oxa-13,20,24-t riazanonacos-1-yl]-4-hydroxy-2-pyrrolidinyl)methyl ester
ttggaatgcacttctgtggaa

SEQ ID NO: 817 - RNA, 21 nt, synthetic construct
  source 1..21: mol_type = other RNA
  modified_base 1: mod_base = OTHER; note = 2'-O-methyluridine-3'-phosphorothioate
  modified_base 2: mod_base = OTHER; note = 2'-O-methyluridine-3'-phosphorothioate
  modified_base 3: mod_base = OTHER; note = 2'-O-methylguanosine-3'-phosphate
  modified_base 4: mod_base = OTHER; note = 2'-O-methylguanosine-3'-phosphate
  modified_base 5: mod_base = OTHER; note = 2'-O-methyladenosine-3'-phosphate
  modified_base 6: mod_base = OTHER; note = 2'-O-methyladenosine-3'-phosphate
  modified_base 7: mod_base = OTHER; note = 2'-deoxy-2'-fluorouridine-3'-phosphate
  modified_base 8: mod_base = OTHER; note = 2'-O-methylguanosine-3'-phosphate
  modified_base 9: mod_base = OTHER; note = 2'-deoxy-2'-fluorocytidine-3'-phosphate
  modified_base 10: mod_base = OTHER; note = 2'-deoxy-2'-fluoroadenosine-3'-phosphate
  modified_base 11: mod_base = OTHER; note = 2'-deoxy-2'-fluorocytidine-3'-phosphate
  modified_base 12: mod_base = OTHER; note = 2'-O-methyluridine-3'-phosphate
  modified_base 13: mod_base = OTHER; note = 2'-O-methyluridine-3'-phosphate
  modified_base 14: mod_base = OTHER; note = 2'-O-methylcytidine-3'-phosphate
  modified_base 15: mod_base = OTHER; note = 2'-O-methyluridine-3'-phosphate
  modified_base 16: mod_base = OTHER; note = 2'-O-methyluridine-3'-phosphate
  modified_base 17: mod_base = OTHER; note = 2'-O-methyluridine-3'-phosphate
  modified_base 18: mod_base = OTHER; note = 2'-O-methylguanosine-3'-phosphate
  modified_base 19: mod_base = OTHER; note = 2'-O-methylguanosine-3'-phosphate
  modified_base 20: mod_base = OTHER; note = 2'-O-methyladenosine-3'-phosphate
  modified_base 21: mod_base = OTHER; note = 2'-O-methyladenosine-3'-phosphate ((2S,4R)-1-[29-[[2-(acetylamino)-2-deoxy-beta-D-galactopyra nosyl]oxy]-14,14-bis[[3-[[3-[[5-[[2-(acetylamino)-2-deoxy-b eta-D-galactopyranosyl]oxy]-1-oxopentyl]amino]propyl]amino] -3-oxopropoxy]methyl]-1,12,19,25-tetraoxo-16-oxa-13,20,24-t riazanonacos-1-yl]-4-hydroxy-2-pyrrolidinyl)methyl ester
ttggaatgcacttctttggaa

SEQ ID NO: 818 - RNA, 21 nt, synthetic construct
  source 1..21: mol_type = other RNA
  modified_base 1: mod_base = OTHER; note = 2'-O-methyluridine-3'-phosphorothioate
  modified_base 2: mod_base = OTHER; note = 2'-O-methylguanosine-3'-phosphorothioate
  modified_base 3: mod_base = OTHER; note = 2'-O-methylcytidine-3'-phosphate
  modified_base 4: mod_base = OTHER; note = 2'-O-methylcytidine-3'-phosphate
  modified_base 5: mod_base = OTHER; note = 2'-O-methylcytidine-3'-phosphate
  modified_base 6: mod_base = OTHER; note = 2'-O-methyladenosine-3'-phosphate
  modified_base 7: mod_base = OTHER; note = 2'-deoxy-2'-fluorocytidine-3'-phosphate
  modified_base 8: mod_base = OTHER; note = 2'-O-methyluridine-3'-phosphate
  modified_base 9: mod_base = OTHER; note = 2'-deoxy-2'-fluoroguanosine-3'-phosphate
  modified_base 10: mod_base = OTHER; note = 2'-deoxy-2'-fluorocytidine-3'-phosphate
  modified_base 11: mod_base = OTHER; note = 2'-deoxy-2'-fluorouridine-3'-phosphate
  modified_base 12: mod_base = OTHER; note = 2'-O-methyluridine-3'-phosphate
  modified_base 13: mod_base = OTHER; note = 2'-O-methylguanosine-3'-phosphate
  modified_base 14: mod_base = OTHER; note = 2'-O-methylguanosine-3'-phosphate
  modified_base 15: mod_base = OTHER; note = 2'-O-methyladenosine-3'-phosphate
  modified_base 16: mod_base = OTHER; note = 2'-O-methylguanosine-3'-phosphate
  modified_base 17: mod_base = OTHER; note = 2'-O-methyladenosine-3'-phosphate
  modified_base 18: mod_base = OTHER; note = 2'-O-methyladenosine-3'-phosphate
  modified_base 19: mod_base = OTHER; note = 2'-O-methylguanosine-3'-phosphate
  modified_base 20: mod_base = OTHER; note = 2'-O-methyluridine-3'-phosphate
  modified_base 21: mod_base = OTHER; note = 2'-O-methyladenosine-3'-phosphate ((2S,4R)-1-[29-[[2-(acetylamino)-2-deoxy-beta-D-galactopyra nosyl]oxy]-14,14-bis[[3-[[3-[[5-[[2-(acetylamino)-2-deoxy-b eta-D-galactopyranosyl]oxy]-1-oxopentyl]amino]propyl]amino] -3-oxopropoxy]methyl]-1,12,19,25-tetraoxo-16-oxa-13,20,24-t riazanonacos-1-yl]-4-hydroxy-2-pyrrolidinyl)methyl ester
tgcccactgcttggagaagta

SEQ ID NO: 819 - RNA, 21 nt, synthetic construct
  source 1..21: mol_type = other RNA
  modified_base 1: mod_base = OTHER; note = 2'-O-methyluridine-3'-phosphorothioate
  modified_base 2: mod_base = OTHER; note = 2'-O-methylguanosine-3'-phosphorothioate
  modified_base 3: mod_base = OTHER; note = 2'-O-methylcytidine-3'-phosphate
  modified_base 4: mod_base = OTHER; note = 2'-O-methylcytidine-3'-phosphate
  modified_base 5: mod_base = OTHER; note = 2'-O-methylcytidine-3'-phosphate
  modified_base 6: mod_base = OTHER; note = 2'-O-methyladenosine-3'-phosphate
  modified_base 7: mod_base = OTHER; note = 2'-deoxy-2'-fluorocytidine-3'-phosphate
  modified_base 8: mod_base = OTHER; note = 2'-O-methyluridine-3'-phosphate
  modified_base 9: mod_base = OTHER; note = 2'-deoxy-2'-fluoroguanosine-3'-phosphate
  modified_base 10: mod_base = OTHER; note = 2'-deoxy-2'-fluorocytidine-3'-phosphate
  modified_base 11: mod_base = OTHER; note = 2'-deoxy-2'-fluorouridine-3'-phosphate
  modified_base 12: mod_base = OTHER; note = 2'-O-methyluridine-3'-phosphate
  modified_base 13: mod_base = OTHER; note = 2'-O-methylguanosine-3'-phosphate
  modified_base 14: mod_base = OTHER; note = 2'-O-methylguanosine-3'-phosphate
  modified_base 15: mod_base = OTHER; note = 2'-O-methyluridine-3'-phosphate
  modified_base 16: mod_base = OTHER; note = 2'-O-methylguanosine-3'-phosphate
  modified_base 17: mod_base = OTHER; note = 2'-O-methyladenosine-3'-phosphate
  modified_base 18: mod_base = OTHER; note = 2'-O-methyladenosine-3'-phosphate
  modified_base 19: mod_base = OTHER; note = 2'-O-methylguanosine-3'-phosphate
  modified_base 20: mod_base = OTHER; note = 2'-O-methyluridine-3'-phosphate
  modified_base 21: mod_base = OTHER; note = 2'-O-methyladenosine-3'-phosphate ((2S,4R)-1-[29-[[2-(acetylamino)-2-deoxy-beta-D-galactopyra nosyl]oxy]-14,14-bis[[3-[[3-[[5-[[2-(acetylamino)-2-deoxy-b eta-D-galactopyranosyl]oxy]-1-oxopentyl]amino]propyl]amino] -3-oxopropoxy]methyl]-1,12,19,25-tetraoxo-16-oxa-13,20,24-t riazanonacos-1-yl]-4-hydroxy-2-pyrrolidinyl)methyl ester
tgcccactgcttggtgaagta

SEQ ID NO: 820 - RNA, 21 nt, synthetic construct
  source 1..21: mol_type = other RNA
  modified_base 1: mod_base = OTHER; note = 2'-O-methyladenosine-3'-phosphorothioate
  modified_base 2: mod_base = OTHER; note = 2'-O-methyladenosine-3'-phosphorothioate
  modified_base 3: mod_base = OTHER; note = 2'-O-methyladenosine-3'-phosphate
  modified_base 4: mod_base = OTHER; note = 2'-O-methylguanosine-3'-phosphate
  modified_base 5: mod_base = OTHER; note = 2'-O-methyladenosine-3'-phosphate
  modified_base 6: mod_base = OTHER; note = 2'-O-methyluridine-3'-phosphate
  modified_base 7: mod_base = OTHER; note = 2'-deoxy-2'-fluoroadenosine-3'-phosphate
  modified_base 8: mod_base = OTHER; note = 2'-O-methyluridine-3'-phosphate
  modified_base 9: mod_base = OTHER; note = 2'-deoxy-2'-fluorouridine-3'-phosphate
  modified_base 10: mod_base = OTHER; note = 2'-deoxy-2'-fluoroguanosine-3'-phosphate
  modified_base 11: mod_base = OTHER; note = 2'-deoxy-2'-fluorocytidine-3'-phosphate
  modified_base 12: mod_base = OTHER; note = 2'-O-methylcytidine-3'-phosphate
  modified_base 13: mod_base = OTHER; note = 2'-O-methyluridine-3'-phosphate
  modified_base 14: mod_base = OTHER; note = 2'-O-methyluridine-3'-phosphate
  modified_base 15: mod_base = OTHER; note = 2'-O-methylguanosine-3'-phosphate
  modified_base 16: mod_base = OTHER; note = 2'-O-methylcytidine-3'-phosphate
  modified_base 17: mod_base = OTHER; note = 2'-O-methyluridine-3'-phosphate
  modified_base 18: mod_base = OTHER; note = 2'-O-methyladenosine-3'-phosphate
  modified_base 19: mod_base = OTHER; note = 2'-O-methyladenosine-3'-phosphate
  modified_base 20: mod_base = OTHER; note = 2'-O-methyladenosine-3'-phosphate
  modified_base 21: mod_base = OTHER; note = 2'-O-methyladenosine-3'-phosphate ((2S,4R)-1-[29-[[2-(acetylamino)-2-deoxy-beta-D-galactopyra nosyl]oxy]-14,14-bis[[3-[[3-[[5-[[2-(acetylamino)-2-deoxy-b eta-D-galactopyranosyl]oxy]-1-oxopentyl]amino]propyl]amino] -3-oxopropoxy]methyl]-1,12,19,25-tetraoxo-16-oxa-13,20,24-t riazanonacos-1-yl]-4-hydroxy-2-pyrrolidinyl)methyl ester
aaagatattgccttgctaaaa

SEQ ID NO: 821 - RNA, 21 nt, synthetic construct
  source 1..21: mol_type = other RNA
  modified_base 1: mod_base = OTHER; note = 2'-O-methyladenosine-3'-phosphorothioate
  modified_base 2: mod_base = OTHER; note = 2'-O-methyladenosine-3'-phosphorothioate
  modified_base 3: mod_base = OTHER; note = 2'-O-methyladenosine-3'-phosphate
  modified_base 4: mod_base = OTHER; note = 2'-O-methylguanosine-3'-phosphate
  modified_base 5: mod_base = OTHER; note = 2'-O-methyladenosine-3'-phosphate
  modified_base 6: mod_base = OTHER; note = 2'-O-methyluridine-3'-phosphate
  modified_base 7: mod_base = OTHER; note = 2'-deoxy-2'-fluoroadenosine-3'-phosphate
  modified_base 8: mod_base = OTHER; note = 2'-O-methyluridine-3'-phosphate
  modified_base 9: mod_base = OTHER; note = 2'-deoxy-2'-fluorouridine-3'-phosphate
  modified_base 10: mod_base = OTHER; note = 2'-deoxy-2'-fluoroguanosine-3'-phosphate
  modified_base 11: mod_base = OTHER; note = 2'-deoxy-2'-fluorocytidine-3'-phosphate
  modified_base 12: mod_base = OTHER; note = 2'-O-methylcytidine-3'-phosphate
  modified_base 13: mod_base = OTHER; note = 2'-O-methyluridine-3'-phosphate
  modified_base 14: mod_base = OTHER; note = 2'-O-methyluridine-3'-phosphate
  modified_base 15: mod_base = OTHER; note = 2'-O-methyluridine-3'-phosphate
  modified_base 16: mod_base = OTHER; note = 2'-O-methylcytidine-3'-phosphate
  modified_base 17: mod_base = OTHER; note = 2'-O-methyluridine-3'-phosphate
  modified_base 18: mod_base = OTHER; note = 2'-O-methyladenosine-3'-phosphate
  modified_base 19: mod_base = OTHER; note = 2'-O-methyladenosine-3'-phosphate
  modified_base 20: mod_base = OTHER; note = 2'-O-methyladenosine-3'-phosphate
  modified_base 21: mod_base = OTHER; note = 2'-O-methyladenosine-3'-phosphate ((2S,4R)-1-[29-[[2-(acetylamino)-2-deoxy-beta-D-galactopyra nosyl]oxy]-14,14-bis[[3-[[3-[[5-[[2-(acetylamino)-2-deoxy-b eta-D-galactopyranosyl]oxy]-1-oxopentyl]amino]propyl]amino] -3-oxopropoxy]methyl]-1,12,19,25-tetraoxo-16-oxa-13,20,24-t riazanonacos-1-yl]-4-hydroxy-2-pyrrolidinyl)methyl ester
aaagatattgcctttctaaaa

SEQ ID NO: 822 - RNA, 21 nt, synthetic construct
  source 1..21: mol_type = other RNA
  modified_base 1: mod_base = OTHER; note = 2'-O-methyladenosine-3'-phosphorothioate
  modified_base 2: mod_base = OTHER; note = 2'-O-methyladenosine-3'-phosphorothioate
  modified_base 3: mod_base = OTHER; note = 2'-O-methylguanosine-3'-phosphate
  modified_base 4: mod_base = OTHER; note = 2'-O-methyladenosine-3'-phosphate
  modified_base 5: mod_base = OTHER; note = 2'-O-methyluridine-3'-phosphate
  modified_base 6: mod_base = OTHER; note = 2'-O-methyladenosine-3'-phosphate
  modified_base 7: mod_base = OTHER; note = 2'-deoxy-2'-fluorouridine-3'-phosphate
  modified_base 8: mod_base = OTHER; note = 2'-O-methyluridine-3'-phosphate
  modified_base 9: mod_base = OTHER; note = 2'-deoxy-2'-fluoroguanosine-3'-phosphate
  modified_base 10: mod_base = OTHER; note = 2'-deoxy-2'-fluorocytidine-3'-phosphate
  modified_base 11: mod_base = OTHER; note = 2'-deoxy-2'-fluorocytidine-3'-phosphate
  modified_base 12: mod_base = OTHER; note = 2'-O-methyluridine-3'-phosphate
  modified_base 13: mod_base = OTHER; note = 2'-O-methyluridine-3'-phosphate
  modified_base 14: mod_base = OTHER; note = 2'-O-methylguanosine-3'-phosphate
  modified_base 15: mod_base = OTHER; note = 2'-O-methylcytidine-3'-phosphate
  modified_base 16: mod_base = OTHER; note = 2'-O-methyluridine-3'-phosphate
  modified_base 17: mod_base = OTHER; note = 2'-O-methyladenosine-3'-phosphate
  modified_base 18: mod_base = OTHER; note = 2'-O-methyladenosine-3'-phosphate
  modified_base 19: mod_base = OTHER; note = 2'-O-methyladenosine-3'-phosphate
  modified_base 20: mod_base = OTHER; note = 2'-O-methylguanosine-3'-phosphate
  modified_base 21: mod_base = OTHER; note = 2'-O-methyladenosine-3'-phosphate ((2S,4R)-1-[29-[[2-(acetylamino)-2-deoxy-beta-D-galactopyra nosyl]oxy]-14,14-bis[[3-[[3-[[5-[[2-(acetylamino)-2-deoxy-b eta-D-galactopyranosyl]oxy]-1-oxopentyl]amino]propyl]amino] -3-oxopropoxy]methyl]-1,12,19,25-tetraoxo-16-oxa-13,20,24-t riazanonacos-1-yl]-4-hydroxy-2-pyrrolidinyl)methyl ester
aagatattgccttgctaaaga

SEQ ID NO: 823 - RNA, 21 nt, synthetic construct
  source 1..21: mol_type = other RNA
  modified_base 1: mod_base = OTHER; note = 2'-O-methyladenosine-3'-phosphorothioate
  modified_base 2: mod_base = OTHER; note = 2'-O-methylguanosine-3'-phosphorothioate
  modified_base 3: mod_base = OTHER; note = 2'-O-methyladenosine-3'-phosphate
  modified_base 4: mod_base = OTHER; note = 2'-O-methyluridine-3'-phosphate
  modified_base 5: mod_base = OTHER; note = 2'-O-methyladenosine-3'-phosphate
  modified_base 6: mod_base = OTHER; note = 2'-O-methyluridine-3'-phosphate
  modified_base 7: mod_base = OTHER; note = 2'-deoxy-2'-fluorouridine-3'-phosphate
  modified_base 8: mod_base = OTHER; note = 2'-O-methylguanosine-3'-phosphate
  modified_base 9: mod_base = OTHER; note = 2'-deoxy-2'-fluorocytidine-3'-phosphate
  modified_base 10: mod_base = OTHER; note = 2'-deoxy-2'-fluorocytidine-3'-phosphate
  modified_base 11: mod_base = OTHER; note = 2'-deoxy-2'-fluorouridine-3'-phosphate
  modified_base 12: mod_base = OTHER; note = 2'-O-methyluridine-3'-phosphate
  modified_base 13: mod_base = OTHER; note = 2'-O-methylguanosine-3'-phosphate
  modified_base 14: mod_base = OTHER; note = 2'-O-methylcytidine-3'-phosphate
  modified_base 15: mod_base = OTHER; note = 2'-O-methyluridine-3'-phosphate
  modified_base 16: mod_base = OTHER; note = 2'-O-methyladenosine-3'-phosphate
  modified_base 17: mod_base = OTHER; note = 2'-O-methyladenosine-3'-phosphate
  modified_base 18: mod_base = OTHER; note = 2'-O-methyladenosine-3'-phosphate
  modified_base 19: mod_base = OTHER; note = 2'-O-methylguanosine-3'-phosphate
  modified_base 20: mod_base = OTHER; note = 2'-O-methylcytidine-3'-phosphate
  modified_base 21: mod_base = OTHER; note = 2'-O-methyladenosine-3'-phosphate ((2S,4R)-1-[29-[[2-(acetylamino)-2-deoxy-beta-D-galactopyra nosyl]oxy]-14,14-bis[[3-[[3-[[5-[[2-(acetylamino)-2-deoxy-b eta-D-galactopyranosyl]oxy]-1-oxopentyl]amino]propyl]amino] -3-oxopropoxy]methyl]-1,12,19,25-tetraoxo-16-oxa-13,20,24-t riazanonacos-1-yl]-4-hydroxy-2-pyrrolidinyl)methyl ester
agatattgccttgctaaagca

SEQ ID NO: 824 - RNA, 21 nt, synthetic construct
  source 1..21: mol_type = other RNA
  modified_base 1: mod_base = OTHER; note = 2'-O-methyluridine-3'-phosphorothioate
  modified_base 2: mod_base = OTHER; note = 2'-O-methyladenosine-3'-phosphorothioate
  modified_base 3: mod_base = OTHER; note = 2'-O-methyluridine-3'-phosphate
  modified_base 4: mod_base = OTHER; note = 2'-O-methyluridine-3'-phosphate
  modified_base 5: mod_base = OTHER; note = 2'-O-methylguanosine-3'-phosphate
  modified_base 6: mod_base = OTHER; note = 2'-O-methylcytidine-3'-phosphate
  modified_base 7: mod_base = OTHER; note = 2'-deoxy-2'-fluorocytidine-3'-phosphate
  modified_base 8: mod_base = OTHER; note = 2'-O-methyluridine-3'-phosphate
  modified_base 9: mod_base = OTHER; note = 2'-deoxy-2'-fluorouridine-3'-phosphate
  modified_base 10: mod_base = OTHER; note = 2'-deoxy-2'-fluoroguanosine-3'-phosphate
  modified_base 11: mod_base = OTHER; note = 2'-deoxy-2'-fluorocytidine-3'-phosphate
  modified_base 12: mod_base = OTHER; note = 2'-O-methyluridine-3'-phosphate
  modified_base 13: mod_base = OTHER; note = 2'-O-methyladenosine-3'-phosphate
  modified_base 14: mod_base = OTHER; note = 2'-O-methyladenosine-3'-phosphate
  modified_base 15: mod_base = OTHER; note = 2'-O-methyladenosine-3'-phosphate
  modified_base 16: mod_base = OTHER; note = 2'-O-methylguanosine-3'-phosphate
  modified_base 17: mod_base = OTHER; note = 2'-O-methylcytidine-3'-phosphate
  modified_base 18: mod_base = OTHER; note = 2'-O-methyluridine-3'-phosphate
  modified_base 19: mod_base = OTHER; note = 2'-O-methyladenosine-3'-phosphate
  modified_base 20: mod_base = OTHER; note = 2'-O-methyladenosine-3'-phosphate
  modified_base 21: mod_base = OTHER; note = 2'-O-methyladenosine-3'-phosphate ((2S,4R)-1-[29-[[2-(acetylamino)-2-deoxy-beta-D-galactopyra nosyl]oxy]-14,14-bis[[3-[[3-[[5-[[2-(acetylamino)-2-deoxy-b eta-D-galactopyranosyl]oxy]-1-oxopentyl]amino]propyl]amino] -3-oxopropoxy]methyl]-1,12,19,25-tetraoxo-16-oxa-13,20,24-t riazanonacos-1-yl]-4-hydroxy-2-pyrrolidinyl)methyl ester
tattgccttgctaaagctaaa

SEQ ID NO: 825 - RNA, 21 nt, synthetic construct
  source 1..21: mol_type = other RNA
  modified_base 1: mod_base = OTHER; note = 2'-O-methylcytidine-3'-phosphorothioate
  modified_base 2: mod_base = OTHER; note = 2'-O-methylcytidine-3'-phosphorothioate
  modified_base 3: mod_base = OTHER; note = 2'-O-methyluridine-3'-phosphate
  modified_base 4: mod_base = OTHER; note = 2'-O-methyluridine-3'-phosphate
  modified_base 5: mod_base = OTHER; note = 2'-O-methylguanosine-3'-phosphate
  modified_base 6: mod_base = OTHER; note = 2'-O-methylcytidine-3'-phosphate
  modified_base 7: mod_base = OTHER; note = 2'-deoxy-2'-fluorouridine-3'-phosphate
  modified_base 8: mod_base = OTHER; note = 2'-O-methyladenosine-3'-phosphate
  modified_base 9: mod_base = OTHER; note = 2'-deoxy-2'-fluoroadenosine-3'-phosphate
  modified_base 10: mod_base = OTHER; note = 2'-deoxy-2'-fluoroadenosine-3'-phosphate
  modified_base 11: mod_base = OTHER; note = 2'-deoxy-2'-fluoroguanosine-3'-phosphate
  modified_base 12: mod_base = OTHER; note = 2'-O-methylcytidine-3'-phosphate
  modified_base 13: mod_base = OTHER; note = 2'-O-methyluridine-3'-phosphate
  modified_base 14: mod_base = OTHER; note = 2'-O-methyladenosine-3'-phosphate
  modified_base 15: mod_base = OTHER; note = 2'-O-methyladenosine-3'-phosphate
  modified_base 16: mod_base = OTHER; note = 2'-O-methylguanosine-3'-phosphate
  modified_base 17: mod_base = OTHER; note = 2'-O-methylcytidine-3'-phosphate
  modified_base 18: mod_base = OTHER; note = 2'-O-methyladenosine-3'-phosphate
  modified_base 19: mod_base = OTHER; note = 2'-O-methylguanosine-3'-phosphate
  modified_base 20: mod_base = OTHER; note = 2'-O-methyluridine-3'-phosphate
  modified_base 21: mod_base = OTHER; note = 2'-O-methyladenosine-3'-phosphate ((2S,4R)-1-[29-[[2-(acetylamino)-2-deoxy-beta-D-galactopyra nosyl]oxy]-14,14-bis[[3-[[3-[[5-[[2-(acetylamino)-2-deoxy-b eta-D-galactopyranosyl]oxy]-1-oxopentyl]amino]propyl]amino] -3-oxopropoxy]methyl]-1,12,19,25-tetraoxo-16-oxa-13,20,24-t riazanonacos-1-yl]-4-hydroxy-2-pyrrolidinyl)methyl ester
ccttgctaaagctaagcagta

SEQ ID NO: 826 - RNA, 21 nt, synthetic construct
  source 1..21: mol_type = other RNA
  modified_base 1: mod_base = OTHER; note = 2'-O-methylcytidine-3'-phosphorothioate
  modified_base 2: mod_base = OTHER; note = 2'-O-methylcytidine-3'-phosphorothioate
  modified_base 3: mod_base = OTHER; note = 2'-O-methyluridine-3'-phosphate
  modified_base 4: mod_base = OTHER; note = 2'-O-methyluridine-3'-phosphate
  modified_base 5: mod_base = OTHER; note = 2'-O-methylguanosine-3'-phosphate
  modified_base 6: mod_base = OTHER; note = 2'-O-methylcytidine-3'-phosphate
  modified_base 7: mod_base = OTHER; note = 2'-deoxy-2'-fluorouridine-3'-phosphate
  modified_base 8: mod_base = OTHER; note = 2'-O-methyladenosine-3'-phosphate
  modified_base 9: mod_base = OTHER; note = 2'-deoxy-2'-fluoroadenosine-3'-phosphate
  modified_base 10: mod_base = OTHER; note = 2'-deoxy-2'-fluoroadenosine-3'-phosphate
  modified_base 11: mod_base = OTHER; note = 2'-deoxy-2'-fluoroguanosine-3'-phosphate
  modified_base 12: mod_base = OTHER; note = 2'-O-methylcytidine-3'-phosphate
  modified_base 13: mod_base = OTHER; note = 2'-O-methyluridine-3'-phosphate
  modified_base 14: mod_base = OTHER; note = 2'-O-methyladenosine-3'-phosphate
  modified_base 15: mod_base = OTHER; note = 2'-O-methyluridine-3'-phosphate
  modified_base 16: mod_base = OTHER; note = 2'-O-methylguanosine-3'-phosphate
  modified_base 17: mod_base = OTHER; note = 2'-O-methylcytidine-3'-phosphate
  modified_base 18: mod_base = OTHER; note = 2'-O-methyladenosine-3'-phosphate
  modified_base 19: mod_base = OTHER; note = 2'-O-methylguanosine-3'-phosphate
  modified_base 20: mod_base = OTHER; note = 2'-O-methyluridine-3'-phosphate
  modified_base 21: mod_base = OTHER; note = 2'-O-methyladenosine-3'-phosphate ((2S,4R)-1-[29-[[2-(acetylamino)-2-deoxy-beta-D-galactopyra nosyl]oxy]-14,14-bis[[3-[[3-[[5-[[2-(acetylamino)-2-deoxy-b eta-D-galactopyranosyl]oxy]-1-oxopentyl]amino]propyl]amino] -3-oxopropoxy]methyl]-1,12,19,25-tetraoxo-16-oxa-13,20,24-t riazanonacos-1-yl]-4-hydroxy-2-pyrrolidinyl)methyl ester
ccttgctaaagctatgcagta

SEQ ID NO: 827 - RNA, 21 nt, synthetic construct
  source 1..21: mol_type = other RNA
  modified_base 1: mod_base = OTHER; note = 2'-O-methyluridine-3'-phosphorothioate
  modified_base 2: mod_base = OTHER; note = 2'-O-methylguanosine-3'-phosphorothioate
  modified_base 3: mod_base = OTHER; note = 2'-O-methylcytidine-3'-phosphate
  modified_base 4: mod_base = OTHER; note = 2'-O-methyluridine-3'-phosphate
  modified_base 5: mod_base = OTHER; note = 2'-O-methyladenosine-3'-phosphate
  modified_base 6: mod_base = OTHER; note = 2'-O-methyladenosine-3'-phosphate
  modified_base 7: mod_base = OTHER; note = 2'-deoxy-2'-fluoroadenosine-3'-phosphate
  modified_base 8: mod_base = OTHER; note = 2'-O-methylguanosine-3'-phosphate
  modified_base 9: mod_base = OTHER; note = 2'-deoxy-2'-fluorocytidine-3'-phosphate
  modified_base 10: mod_base = OTHER; note = 2'-deoxy-2'-fluorouridine-3'-phosphate
  modified_base 11: mod_base = OTHER; note = 2'-deoxy-2'-fluoroadenosine-3'-phosphate
  modified_base 12: mod_base = OTHER; note = 2'-O-methyladenosine-3'-phosphate
  modified_base 13: mod_base = OTHER; note = 2'-O-methylguanosine-3'-phosphate
  modified_base 14: mod_base = OTHER; note = 2'-O-methylcytidine-3'-phosphate
  modified_base 15: mod_base = OTHER; note = 2'-O-methyladenosine-3'-phosphate
  modified_base 16: mod_base = OTHER; note = 2'-O-methylguanosine-3'-phosphate
  modified_base 17: mod_base = OTHER; note = 2'-O-methyluridine-3'-phosphate
  modified_base 18: mod_base = OTHER; note = 2'-O-methylcytidine-3'-phosphate
  modified_base 19: mod_base = OTHER; note = 2'-O-methylcytidine-3'-phosphate
  modified_base 20: mod_base = OTHER; note = 2'-O-methyluridine-3'-phosphate
  modified_base 21: mod_base = OTHER; note = 2'-O-methyladenosine-3'-phosphate ((2S,4R)-1-[29-[[2-(acetylamino)-2-deoxy-beta-D-galactopyra nosyl]oxy]-14,14-bis[[3-[[3-[[5-[[2-(acetylamino)-2-deoxy-b eta-D-galactopyranosyl]oxy]-1-oxopentyl]amino]propyl]amino] -3-oxopropoxy]methyl]-1,12,19,25-tetraoxo-16-oxa-13,20,24-t riazanonacos-1-yl]-4-hydroxy-2-pyrrolidinyl)methyl ester
tgctaaagctaagcagtccta

SEQ ID NO: 828 - RNA, 21 nt, synthetic construct
  source 1..21: mol_type = other RNA
  modified_base 1: mod_base = OTHER; note = 2'-O-methyluridine-3'-phosphorothioate
  modified_base 2: mod_base = OTHER; note = 2'-O-methylguanosine-3'-phosphorothioate
  modified_base 3: mod_base = OTHER; note = 2'-O-methylcytidine-3'-phosphate
  modified_base 4: mod_base = OTHER; note = 2'-O-methyluridine-3'-phosphate
  modified_base 5: mod_base = OTHER; note = 2'-O-methyladenosine-3'-phosphate
  modified_base 6: mod_base = OTHER; note = 2'-O-methyladenosine-3'-phosphate
  modified_base 7: mod_base = OTHER; note = 2'-deoxy-2'-fluoroadenosine-3'-phosphate
  modified_base 8: mod_base = OTHER; note = 2'-O-methylguanosine-3'-phosphate
  modified_base 9: mod_base = OTHER; note = 2'-deoxy-2'-fluorocytidine-3'-phosphate
  modified_base 10: mod_base = OTHER; note = 2'-deoxy-2'-fluorouridine-3'-phosphate
  modified_base 11: mod_base = OTHER; note = 2'-deoxy-2'-fluoroadenosine-3'-phosphate
  modified_base 12: mod_base = OTHER; note = 2'-O-methyladenosine-3'-phosphate
  modified_base 13: mod_base = OTHER; note = 2'-O-methylguanosine-3'-phosphate
  modified_base 14: mod_base = OTHER; note = 2'-O-methylcytidine-3'-phosphate
  modified_base 15: mod_base = OTHER; note = 2'-O-methyluridine-3'-phosphate
  modified_base 16: mod_base = OTHER; note = 2'-O-methylguanosine-3'-phosphate
  modified_base 17: mod_base = OTHER; note = 2'-O-methyluridine-3'-phosphate
  modified_base 18: mod_base = OTHER; note = 2'-O-methylcytidine-3'-phosphate
  modified_base 19: mod_base = OTHER; note = 2'-O-methylcytidine-3'-phosphate
  modified_base 20: mod_base = OTHER; note = 2'-O-methyluridine-3'-phosphate
  modified_base 21: mod_base = OTHER; note = 2'-O-methyladenosine-3'-phosphate ((2S,4R)-1-[29-[[2-(acetylamino)-2-deoxy-beta-D-galactopyra nosyl]oxy]-14,14-bis[[3-[[3-[[5-[[2-(acetylamino)-2-deoxy-b eta-D-galactopyranosyl]oxy]-1-oxopentyl]amino]propyl]amino] -3-oxopropoxy]methyl]-1,12,19,25-tetraoxo-16-oxa-13,20,24-t riazanonacos-1-yl]-4-hydroxy-2-pyrrolidinyl)methyl ester
tgctaaagctaagctgtccta

SEQ ID NO: 829 - RNA, 21 nt, synthetic construct
  source 1..21: mol_type = other RNA
  modified_base 1: mod_base = OTHER; note = 2'-O-methyluridine-3'-phosphorothioate
  modified_base 2: mod_base = OTHER; note = 2'-O-methylcytidine-3'-phosphorothioate
  modified_base 3: mod_base = OTHER; note = 2'-O-methyladenosine-3'-phosphate
  modified_base 4: mod_base = OTHER; note = 2'-O-methyluridine-3'-phosphate
  modified_base 5: mod_base = OTHER; note = 2'-O-methylcytidine-3'-phosphate
  modified_base 6: mod_base = OTHER; note = 2'-O-methyladenosine-3'-phosphate
  modified_base 7: mod_base = OTHER; note = 2'-deoxy-2'-fluorocytidine-3'-phosphate
  modified_base 8: mod_base = OTHER; note = 2'-O-methyluridine-3'-phosphate
  modified_base 9: mod_base = OTHER; note = 2'-deoxy-2'-fluoroguanosine-3'-phosphate
  modified_base 10: mod_base = OTHER; note = 2'-deoxy-2'-fluoroadenosine-3'-phosphate
  modified_base 11: mod_base = OTHER; note = 2'-deoxy-2'-fluorocytidine-3'-phosphate
  modified_base 12: mod_base = OTHER; note = 2'-O-methyladenosine-3'-phosphate
  modified_base 13: mod_base = OTHER; note = 2'-O-methyladenosine-3'-phosphate
  modified_base 14: mod_base = OTHER; note = 2'-O-methyladenosine-3'-phosphate
  modified_base 15: mod_base = OTHER; note = 2'-O-methylguanosine-3'-phosphate
  modified_base 16: mod_base = OTHER; note = 2'-O-methyluridine-3'-phosphate
  modified_base 17: mod_base = OTHER; note = 2'-O-methyladenosine-3'-phosphate
  modified_base 18: mod_base = OTHER; note = 2'-O-methyladenosine-3'-phosphate
  modified_base 19: mod_base = OTHER; note = 2'-O-methyluridine-3'-phosphate
  modified_base 20: mod_base = OTHER; note = 2'-O-methylcytidine-3'-phosphate
  modified_base 21: mod_base = OTHER; note = 2'-O-methyladenosine-3'-phosphate ((2S,4R)-1-[29-[[2-(acetylamino)-2-deoxy-beta-D-galactopyra nosyl]oxy]-14,14-bis[[3-[[3-[[5-[[2-(acetylamino)-2-deoxy-b eta-D-galactopyranosyl]oxy]-1-oxopentyl]amino]propyl]amino] -3-oxopropoxy]methyl]-1,12,19,25-tetraoxo-16-oxa-13,20,24-t riazanonacos-1-yl]-4-hydroxy-2-pyrrolidinyl)methyl ester
tcatcactgacaaagtaatca

SEQ ID NO: 830 - RNA, 21 nt, synthetic construct
  source 1..21: mol_type = other RNA
  modified_base 1: mod_base = OTHER; note = 2'-O-methylcytidine-3'-phosphorothioate
  modified_base 2: mod_base = OTHER; note = 2'-O-methyladenosine-3'-phosphorothioate
  modified_base 3: mod_base = OTHER; note = 2'-O-methyluridine-3'-phosphate
  modified_base 4: mod_base = OTHER; note = 2'-O-methylcytidine-3'-phosphate
  modified_base 5: mod_base = OTHER; note = 2'-O-methyladenosine-3'-phosphate
  modified_base 6: mod_base = OTHER; note = 2'-O-methylcytidine-3'-phosphate
  modified_base 7: mod_base = OTHER; note = 2'-deoxy-2'-fluorouridine-3'-phosphate
  modified_base 8: mod_base = OTHER; note = 2'-O-methylguanosine-3'-phosphate
  modified_base 9: mod_base = OTHER; note = 2'-deoxy-2'-fluoroadenosine-3'-phosphate
  modified_base 10: mod_base = OTHER; note = 2'-deoxy-2'-fluorocytidine-3'-phosphate
  modified_base 11: mod_base = OTHER; note = 2'-deoxy-2'-fluoroadenosine-3'-phosphate
  modified_base 12: mod_base = OTHER; note = 2'-O-methyladenosine-3'-phosphate
  modified_base 13: mod_base = OTHER; note = 2'-O-methyladenosine-3'-phosphate
  modified_base 14: mod_base = OTHER; note = 2'-O-methylguanosine-3'-phosphate
  modified_base 15: mod_base = OTHER; note = 2'-O-methyluridine-3'-phosphate
  modified_base 16: mod_base = OTHER; note = 2'-O-methyladenosine-3'-phosphate
  modified_base 17: mod_base = OTHER; note = 2'-O-methyladenosine-3'-phosphate
  modified_base 18: mod_base = OTHER; note = 2'-O-methyluridine-3'-phosphate
  modified_base 19: mod_base = OTHER; note = 2'-O-methylcytidine-3'-phosphate
  modified_base 20: mod_base = OTHER; note = 2'-O-methylcytidine-3'-phosphate
  modified_base 21: mod_base = OTHER; note = 2'-O-methyladenosine-3'-phosphate ((2S,4R)-1-[29-[[2-(acetylamino)-2-deoxy-beta-D-galactopyra nosyl]oxy]-14,14-bis[[3-[[3-[[5-[[2-(acetylamino)-2-deoxy-b eta-D-galactopyranosyl]oxy]-1-oxopentyl]amino]propyl]amino] -3-oxopropoxy]methyl]-1,12,19,25-tetraoxo-16-oxa-13,20,24-t riazanonacos-1-yl]-4-hydroxy-2-pyrrolidinyl)methyl ester
catcactgacaaagtaatcca

SEQ ID NO: 831 - RNA, 21 nt, synthetic construct
  source 1..21: mol_type = other RNA
  modified_base 1: mod_base = OTHER; note = 2'-O-methyladenosine-3'-phosphorothioate
  modified_base 2: mod_base = OTHER; note = 2'-O-methyluridine-3'-phosphorothioate
  modified_base 3: mod_base = OTHER; note = 2'-O-methylcytidine-3'-phosphate
  modified_base 4: mod_base = OTHER; note = 2'-O-methyladenosine-3'-phosphate
  modified_base 5: mod_base = OTHER; note = 2'-O-methylcytidine-3'-phosphate
  modified_base 6: mod_base = OTHER; note = 2'-O-methyluridine-3'-phosphate
  modified_base 7: mod_base = OTHER; note = 2'-deoxy-2'-fluoroguanosine-3'-phosphate
  modified_base 8: mod_base = OTHER; note = 2'-O-methyladenosine-3'-phosphate
  modified_base 9: mod_base = OTHER; note = 2'-deoxy-2'-fluorocytidine-3'-phosphate
  modified_base 10: mod_base = OTHER; note = 2'-deoxy-2'-fluoroadenosine-3'-phosphate
  modified_base 11: mod_base = OTHER; note = 2'-deoxy-2'-fluoroadenosine-3'-phosphate
  modified_base 12: mod_base = OTHER; note = 2'-O-methyladenosine-3'-phosphate
  modified_base 13: mod_base = OTHER; note = 2'-O-methylguanosine-3'-phosphate
  modified_base 14: mod_base = OTHER; note = 2'-O-methyluridine-3'-phosphate
  modified_base 15: mod_base = OTHER; note = 2'-O-methyladenosine-3'-phosphate
  modified_base 16: mod_base = OTHER; note = 2'-O-methyladenosine-3'-phosphate
  modified_base 17: mod_base = OTHER; note = 2'-O-methyluridine-3'-phosphate
  modified_base 18: mod_base = OTHER; note = 2'-O-methylcytidine-3'-phosphate
  modified_base 19: mod_base = OTHER; note = 2'-O-methylcytidine-3'-phosphate
  modified_base 20: mod_base = OTHER; note = 2'-O-methylcytidine-3'-phosphate
  modified_base 21: mod_base = OTHER; note = 2'-O-methyladenosine-3'-phosphate ((2S,4R)-1-[29-[[2-(acetylamino)-2-deoxy-beta-D-galactopyra nosyl]oxy]-14,14-bis[[3-[[3-[[5-[[2-(acetylamino)-2-deoxy-b eta-D-galactopyranosyl]oxy]-1-oxopentyl]amino]propyl]amino] -3-oxopropoxy]methyl]-1,12,19,25-tetraoxo-16-oxa-13,20,24-t riazanonacos-1-yl]-4-hydroxy-2-pyrrolidinyl)methyl ester
atcactgacaaagtaatccca

SEQ ID NO: 832 - RNA, 21 nt, synthetic construct
  source 1..21: mol_type = other RNA
  modified_base 1: mod_base = OTHER; note = 2'-O-methyluridine-3'-phosphorothioate
  modified_base 2: mod_base = OTHER; note = 2'-O-methylcytidine-3'-phosphorothioate
  modified_base 3: mod_base = OTHER; note = 2'-O-methyladenosine-3'-phosphate
  modified_base 4: mod_base = OTHER; note = 2'-O-methylcytidine-3'-phosphate
  modified_base 5: mod_base = OTHER; note = 2'-O-methyluridine-3'-phosphate
  modified_base 6: mod_base = OTHER; note = 2'-O-methylguanosine-3'-phosphate
  modified_base 7: mod_base = OTHER; note = 2'-deoxy-2'-fluoroadenosine-3'-phosphate
  modified_base 8: mod_base = OTHER; note = 2'-O-methylcytidine-3'-phosphate
  modified_base 9: mod_base = OTHER; note = 2'-deoxy-2'-fluoroadenosine-3'-phosphate
  modified_base 10: mod_base = OTHER; note = 2'-deoxy-2'-fluoroadenosine-3'-phosphate
  modified_base 11: mod_base = OTHER; note = 2'-deoxy-2'-fluoroadenosine-3'-phosphate
  modified_base 12: mod_base = OTHER; note = 2'-O-methylguanosine-3'-phosphate
  modified_base 13: mod_base = OTHER; note = 2'-O-methyluridine-3'-phosphate
  modified_base 14: mod_base = OTHER; note = 2'-O-methyladenosine-3'-phosphate
  modified_base 15: mod_base = OTHER; note = 2'-O-methyladenosine-3'-phosphate
  modified_base 16: mod_base = OTHER; note = 2'-O-methyluridine-3'-phosphate
  modified_base 17: mod_base = OTHER; note = 2'-O-methylcytidine-3'-phosphate
  modified_base 18: mod_base = OTHER; note = 2'-O-methylcytidine-3'-phosphate
  modified_base 19: mod_base = OTHER; note = 2'-O-methylcytidine-3'-phosphate
  modified_base 20: mod_base = OTHER; note = 2'-O-methyladenosine-3'-phosphate
  modified_base 21: mod_base = OTHER; note = 2'-O-methyladenosine-3'-phosphate ((2S,4R)-1-[29-[[2-(acetylamino)-2-deoxy-beta-D-galactopyra nosyl]oxy]-14,14-bis[[3-[[3-[[5-[[2-(acetylamino)-2-deoxy-b eta-D-galactopyranosyl]oxy]-1-oxopentyl]amino]propyl]amino] -3-oxopropoxy]methyl]-1,12,19,25-tetraoxo-16-oxa-13,20,24-t riazanonacos-1-yl]-4-hydroxy-2-pyrrolidinyl)methyl ester
tcactgacaaagtaatcccaa

SEQ ID NO: 833 - RNA, 21 nt, synthetic construct
  source 1..21: mol_type = other RNA
  modified_base 1: mod_base = OTHER; note = 2'-O-methyluridine-3'-phosphorothioate
  modified_base 2: mod_base = OTHER; note = 2'-O-methylcytidine-3'-phosphorothioate
  modified_base 3: mod_base = OTHER; note = 2'-O-methyladenosine-3'-phosphate
  modified_base 4: mod_base = OTHER; note = 2'-O-methylcytidine-3'-phosphate
  modified_base 5: mod_base = OTHER; note = 2'-O-methyluridine-3'-phosphate
  modified_base 6: mod_base = OTHER; note = 2'-O-methylguanosine-3'-phosphate
  modified_base 7: mod_base = OTHER; note = 2'-deoxy-2'-fluoroadenosine-3'-phosphate
  modified_base 8: mod_base = OTHER; note = 2'-O-methylcytidine-3'-phosphate
  modified_base 9: mod_base = OTHER; note = 2'-deoxy-2'-fluoroadenosine-3'-phosphate
  modified_base 10: mod_base = OTHER; note = 2'-deoxy-2'-fluoroadenosine-3'-phosphate
  modified_base 11: mod_base = OTHER; note = 2'-deoxy-2'-fluoroadenosine-3'-phosphate
  modified_base 12: mod_base = OTHER; note = 2'-O-methylguanosine-3'-phosphate
  modified_base 13: mod_base = OTHER; note = 2'-O-methyluridine-3'-phosphate
  modified_base 14: mod_base = OTHER; note = 2'-O-methyladenosine-3'-phosphate
  modified_base 15: mod_base = OTHER; note = 2'-O-methyluridine-3'-phosphate
  modified_base 16: mod_base = OTHER; note = 2'-O-methyluridine-3'-phosphate
  modified_base 17: mod_base = OTHER; note = 2'-O-methylcytidine-3'-phosphate
  modified_base 18: mod_base = OTHER; note = 2'-O-methylcytidine-3'-phosphate
  modified_base 19: mod_base = OTHER; note = 2'-O-methylcytidine-3'-phosphate
  modified_base 20: mod_base = OTHER; note = 2'-O-methyladenosine-3'-phosphate
  modified_base 21: mod_base = OTHER; note = 2'-O-methyladenosine-3'-phosphate ((2S,4R)-1-[29-[[2-(acetylamino)-2-deoxy-beta-D-galactopyra nosyl]oxy]-14,14-bis[[3-[[3-[[5-[[2-(acetylamino)-2-deoxy-b eta-D-galactopyranosyl]oxy]-1-oxopentyl]amino]propyl]amino] -3-oxopropoxy]methyl]-1,12,19,25-tetraoxo-16-oxa-13,20,24-t riazanonacos-1-yl]-4-hydroxy-2-pyrrolidinyl)methyl ester
tcactgacaaagtattcccaa

SEQ ID NO: 834 - RNA, 21 nt, synthetic construct
  source 1..21: mol_type = other RNA
  modified_base 1: mod_base = OTHER; note = 2'-O-methylcytidine-3'-phosphorothioate
  modified_base 2: mod_base = OTHER; note = 2'-O-methyladenosine-3'-phosphorothioate
  modified_base 3: mod_base = OTHER; note = 2'-O-methylcytidine-3'-phosphate
  modified_base 4: mod_base = OTHER; note = 2'-O-methyluridine-3'-phosphate
  modified_base 5: mod_base = OTHER; note = 2'-O-methylguanosine-3'-phosphate
  modified_base 6: mod_base = OTHER; note = 2'-O-methyladenosine-3'-phosphate
  modified_base 7: mod_base = OTHER; note = 2'-deoxy-2'-fluorocytidine-3'-phosphate
  modified_base 8: mod_base = OTHER; note = 2'-O-methyladenosine-3'-phosphate
  modified_base 9: mod_base = OTHER; note = 2'-deoxy-2'-fluoroadenosine-3'-phosphate
  modified_base 10: mod_base = OTHER; note = 2'-deoxy-2'-fluoroadenosine-3'-phosphate
  modified_base 11: mod_base = OTHER; note = 2'-deoxy-2'-fluoroguanosine-3'-phosphate
  modified_base 12: mod_base = OTHER; note = 2'-O-methyluridine-3'-phosphate
  modified_base 13: mod_base = OTHER; note = 2'-O-methyladenosine-3'-phosphate
  modified_base 14: mod_base = OTHER; note = 2'-O-methyladenosine-3'-phosphate
  modified_base 15: mod_base = OTHER; note = 2'-O-methyluridine-3'-phosphate
  modified_base 16: mod_base = OTHER; note = 2'-O-methylcytidine-3'-phosphate
  modified_base 17: mod_base = OTHER; note = 2'-O-methylcytidine-3'-phosphate
  modified_base 18: mod_base = OTHER; note = 2'-O-methylcytidine-3'-phosphate
  modified_base 19: mod_base = OTHER; note = 2'-O-methyladenosine-3'-phosphate
  modified_base 20: mod_base = OTHER; note = 2'-O-methylguanosine-3'-phosphate
  modified_base 21: mod_base = OTHER; note = 2'-O-methyladenosine-3'-phosphate ((2S,4R)-1-[29-[[2-(acetylamino)-2-deoxy-beta-D-galactopyra nosyl]oxy]-14,14-bis[[3-[[3-[[5-[[2-(acetylamino)-2-deoxy-b eta-D-galactopyranosyl]oxy]-1-oxopentyl]amino]propyl]amino] -3-oxopropoxy]methyl]-1,12,19,25-tetraoxo-16-oxa-13,20,24-t riazanonacos-1-yl]-4-hydroxy-2-pyrrolidinyl)methyl ester
cactgacaaagtaatcccaga

SEQ ID NO: 835 - RNA, 21 nt, synthetic construct
  source 1..21: mol_type = other RNA
  modified_base 1: mod_base = OTHER; note = 2'-O-methylcytidine-3'-phosphorothioate
  modified_base 2: mod_base = OTHER; note = 2'-O-methyladenosine-3'-phosphorothioate
  modified_base 3: mod_base = OTHER; note = 2'-O-methylcytidine-3'-phosphate
  modified_base 4: mod_base = OTHER; note = 2'-O-methyluridine-3'-phosphate
  modified_base 5: mod_base = OTHER; note = 2'-O-methylguanosine-3'-phosphate
  modified_base 6: mod_base = OTHER; note = 2'-O-methyladenosine-3'-phosphate
  modified_base 7: mod_base = OTHER; note = 2'-deoxy-2'-fluorocytidine-3'-phosphate
  modified_base 8: mod_base = OTHER; note = 2'-O-methyladenosine-3'-phosphate
  modified_base 9: mod_base = OTHER; note = 2'-deoxy-2'-fluoroadenosine-3'-phosphate
  modified_base 10: mod_base = OTHER; note = 2'-deoxy-2'-fluoroadenosine-3'-phosphate
  modified_base 11: mod_base = OTHER; note = 2'-deoxy-2'-fluoroguanosine-3'-phosphate
  modified_base 12: mod_base = OTHER; note = 2'-O-methyluridine-3'-phosphate
  modified_base 13: mod_base = OTHER; note = 2'-O-methyladenosine-3'-phosphate
  modified_base 14: mod_base = OTHER; note = 2'-O-methyladenosine-3'-phosphate
  modified_base 15: mod_base = OTHER; note = 2'-O-methyluridine-3'-phosphate
  modified_base 16: mod_base = OTHER; note = 2'-O-methyluridine-3'-phosphate
  modified_base 17: mod_base = OTHER; note = 2'-O-methylcytidine-3'-phosphate
  modified_base 18: mod_base = OTHER; note = 2'-O-methylcytidine-3'-phosphate
  modified_base 19: mod_base = OTHER; note = 2'-O-methyladenosine-3'-phosphate
  modified_base 20: mod_base = OTHER; note = 2'-O-methylguanosine-3'-phosphate
  modified_base 21: mod_base = OTHER; note = 2'-O-methyladenosine-3'-phosphate ((2S,4R)-1-[29-[[2-(acetylamino)-2-deoxy-beta-D-galactopyra nosyl]oxy]-14,14-bis[[3-[[3-[[5-[[2-(acetylamino)-2-deoxy-b eta-D-galactopyranosyl]oxy]-1-oxopentyl]amino]propyl]amino] -3-oxopropoxy]methyl]-1,12,19,25-tetraoxo-16-oxa-13,20,24-t riazanonacos-1-yl]-4-hydroxy-2-pyrrolidinyl)methyl ester
cactgacaaagtaattccaga

SEQ ID NO: 836 - RNA, 21 nt, synthetic construct
  source 1..21: mol_type = other RNA
  modified_base 1: mod_base = OTHER; note = 2'-O-methyladenosine-3'-phosphorothioate
  modified_base 2: mod_base = OTHER; note = 2'-O-methylcytidine-3'-phosphorothioate
  modified_base 3: mod_base = OTHER; note = 2'-O-methyluridine-3'-phosphate
  modified_base 4: mod_base = OTHER; note = 2'-O-methylguanosine-3'-phosphate
  modified_base 5: mod_base = OTHER; note = 2'-O-methyladenosine-3'-phosphate
  modified_base 6: mod_base = OTHER; note = 2'-O-methylcytidine-3'-phosphate
  modified_base 7: mod_base = OTHER; note = 2'-deoxy-2'-fluoroadenosine-3'-phosphate
  modified_base 8: mod_base = OTHER; note = 2'-O-methyladenosine-3'-phosphate
  modified_base 9: mod_base = OTHER; note = 2'-deoxy-2'-fluoroadenosine-3'-phosphate
  modified_base 10: mod_base = OTHER; note = 2'-deoxy-2'-fluoroguanosine-3'-phosphate
  modified_base 11: mod_base = OTHER; note = 2'-deoxy-2'-fluorouridine-3'-phosphate
  modified_base 12: mod_base = OTHER; note = 2'-O-methyladenosine-3'-phosphate
  modified_base 13: mod_base = OTHER; note = 2'-O-methyladenosine-3'-phosphate
  modified_base 14: mod_base = OTHER; note = 2'-O-methyluridine-3'-phosphate
  modified_base 15: mod_base = OTHER; note = 2'-O-methylcytidine-3'-phosphate
  modified_base 16: mod_base = OTHER; note = 2'-O-methylcytidine-3'-phosphate
  modified_base 17: mod_base = OTHER; note = 2'-O-methylcytidine-3'-phosphate
  modified_base 18: mod_base = OTHER; note = 2'-O-methyladenosine-3'-phosphate
  modified_base 19: mod_base = OTHER; note = 2'-O-methylguanosine-3'-phosphate
  modified_base 20: mod_base = OTHER; note = 2'-O-methylcytidine-3'-phosphate
  modified_base 21: mod_base = OTHER; note = 2'-O-methyladenosine-3'-phosphate ((2S,4R)-1-[29-[[2-(acetylamino)-2-deoxy-beta-D-galactopyra nosyl]oxy]-14,14-bis[[3-[[3-[[5-[[2-(acetylamino)-2-deoxy-b eta-D-galactopyranosyl]oxy]-1-oxopentyl]amino]propyl]amino] -3-oxopropoxy]methyl]-1,12,19,25-tetraoxo-16-oxa-13,20,24-t riazanonacos-1-yl]-4-hydroxy-2-pyrrolidinyl)methyl ester
actgacaaagtaatcccagca

SEQ ID NO: 837 - RNA, 21 nt, synthetic construct
  source 1..21: mol_type = other RNA
  modified_base 1: mod_base = OTHER; note = 2'-O-methyladenosine-3'-phosphorothioate
  modified_base 2: mod_base = OTHER; note = 2'-O-methylcytidine-3'-phosphorothioate
  modified_base 3: mod_base = OTHER; note = 2'-O-methyluridine-3'-phosphate
  modified_base 4: mod_base = OTHER; note = 2'-O-methylguanosine-3'-phosphate
  modified_base 5: mod_base = OTHER; note = 2'-O-methyladenosine-3'-phosphate
  modified_base 6: mod_base = OTHER; note = 2'-O-methylcytidine-3'-phosphate
  modified_base 7: mod_base = OTHER; note = 2'-deoxy-2'-fluoroadenosine-3'-phosphate
  modified_base 8: mod_base = OTHER; note = 2'-O-methyladenosine-3'-phosphate
  modified_base 9: mod_base = OTHER; note = 2'-deoxy-2'-fluoroadenosine-3'-phosphate
  modified_base 10: mod_base = OTHER; note = 2'-deoxy-2'-fluoroguanosine-3'-phosphate
  modified_base 11: mod_base = OTHER; note = 2'-deoxy-2'-fluorouridine-3'-phosphate
  modified_base 12: mod_base = OTHER; note = 2'-O-methyladenosine-3'-phosphate
  modified_base 13: mod_base = OTHER; note = 2'-O-methyladenosine-3'-phosphate
  modified_base 14: mod_base = OTHER; note = 2'-O-methyluridine-3'-phosphate
  modified_base 15: mod_base = OTHER; note = 2'-O-methyluridine-3'-phosphate
  modified_base 16: mod_base = OTHER; note = 2'-O-methylcytidine-3'-phosphate
  modified_base 17: mod_base = OTHER; note = 2'-O-methylcytidine-3'-phosphate
  modified_base 18: mod_base = OTHER; note = 2'-O-methyladenosine-3'-phosphate
  modified_base 19: mod_base = OTHER; note = 2'-O-methylguanosine-3'-phosphate
  modified_base 20: mod_base = OTHER; note = 2'-O-methylcytidine-3'-phosphate
  modified_base 21: mod_base = OTHER; note = 2'-O-methyladenosine-3'-phosphate ((2S,4R)-1-[29-[[2-(acetylamino)-2-deoxy-beta-D-galactopyra nosyl]oxy]-14,14-bis[[3-[[3-[[5-[[2-(acetylamino)-2-deoxy-b eta-D-galactopyranosyl]oxy]-1-oxopentyl]amino]propyl]amino] -3-oxopropoxy]methyl]-1,12,19,25-tetraoxo-16-oxa-13,20,24-t riazanonacos-1-yl]-4-hydroxy-2-pyrrolidinyl)methyl ester
actgacaaagtaattccagca

SEQ ID NO: 838 - RNA, 21 nt, synthetic construct
  source 1..21: mol_type = other RNA
  modified_base 1: mod_base = OTHER; note = 2'-O-methyluridine-3'-phosphorothioate
  modified_base 2: mod_base = OTHER; note = 2'-O-methylguanosine-3'-phosphorothioate
  modified_base 3: mod_base = OTHER; note = 2'-O-methyladenosine-3'-phosphate
  modified_base 4: mod_base = OTHER; note = 2'-O-methylcytidine-3'-phosphate
  modified_base 5: mod_base = OTHER; note = 2'-O-methyladenosine-3'-phosphate
  modified_base 6: mod_base = OTHER; note = 2'-O-methyladenosine-3'-phosphate
  modified_base 7: mod_base = OTHER; note = 2'-deoxy-2'-fluoroadenosine-3'-phosphate
  modified_base 8: mod_base = OTHER; note = 2'-O-methylguanosine-3'-phosphate
  modified_base 9: mod_base = OTHER; note = 2'-deoxy-2'-fluorouridine-3'-phosphate
  modified_base 10: mod_base = OTHER; note = 2'-deoxy-2'-fluoroadenosine-3'-phosphate
  modified_base 11: mod_base = OTHER; note = 2'-deoxy-2'-fluoroadenosine-3'-phosphate
  modified_base 12: mod_base = OTHER; note = 2'-O-methyluridine-3'-phosphate
  modified_base 13: mod_base = OTHER; note = 2'-O-methylcytidine-3'-phosphate
  modified_base 14: mod_base = OTHER; note = 2'-O-methylcytidine-3'-phosphate
  modified_base 15: mod_base = OTHER; note = 2'-O-methylcytidine-3'-phosphate
  modified_base 16: mod_base = OTHER; note = 2'-O-methyladenosine-3'-phosphate
  modified_base 17: mod_base = OTHER; note = 2'-O-methylguanosine-3'-phosphate
  modified_base 18: mod_base = OTHER; note = 2'-O-methylcytidine-3'-phosphate
  modified_base 19: mod_base = OTHER; note = 2'-O-methyluridine-3'-phosphate
  modified_base 20: mod_base = OTHER; note = 2'-O-methyluridine-3'-phosphate
  modified_base 21: mod_base = OTHER; note = 2'-O-methyladenosine-3'-phosphate ((2S,4R)-1-[29-[[2-(acetylamino)-2-deoxy-beta-D-galactopyra nosyl]oxy]-14,14-bis[[3-[[3-[[5-[[2-(acetylamino)-2-deoxy-b eta-D-galactopyranosyl]oxy]-1-oxopentyl]amino]propyl]amino] -3-oxopropoxy]methyl]-1,12,19,25-tetraoxo-16-oxa-13,20,24-t riazanonacos-1-yl]-4-hydroxy-2-pyrrolidinyl)methyl ester
tgacaaagtaatcccagctta

SEQ ID NO: 839 - RNA, 21 nt, synthetic construct
  source 1..21: mol_type = other RNA
  modified_base 1: mod_base = OTHER; note = 2'-O-methyluridine-3'-phosphorothioate
  modified_base 2: mod_base = OTHER; note = 2'-O-methylguanosine-3'-phosphorothioate
  modified_base 3: mod_base = OTHER; note = 2'-O-methyladenosine-3'-phosphate
  modified_base 4: mod_base = OTHER; note = 2'-O-methylcytidine-3'-phosphate
  modified_base 5: mod_base = OTHER; note = 2'-O-methyladenosine-3'-phosphate
  modified_base 6: mod_base = OTHER; note = 2'-O-methyladenosine-3'-phosphate
  modified_base 7: mod_base = OTHER; note = 2'-deoxy-2'-fluoroadenosine-3'-phosphate
  modified_base 8: mod_base = OTHER; note = 2'-O-methylguanosine-3'-phosphate
  modified_base 9: mod_base = OTHER; note = 2'-deoxy-2'-fluorouridine-3'-phosphate
  modified_base 10: mod_base = OTHER; note = 2'-deoxy-2'-fluoroadenosine-3'-phosphate
  modified_base 11: mod_base = OTHER; note = 2'-deoxy-2'-fluoroadenosine-3'-phosphate
  modified_base 12: mod_base = OTHER; note = 2'-O-methyluridine-3'-phosphate
  modified_base 13: mod_base = OTHER; note = 2'-O-methylcytidine-3'-phosphate
  modified_base 14: mod_base = OTHER; note = 2'-O-methylcytidine-3'-phosphate
  modified_base 15: mod_base = OTHER; note = 2'-O-methyluridine-3'-phosphate
  modified_base 16: mod_base = OTHER; note = 2'-O-methyladenosine-3'-phosphate
  modified_base 17: mod_base = OTHER; note = 2'-O-methylguanosine-3'-phosphate
  modified_base 18: mod_base = OTHER; note = 2'-O-methylcytidine-3'-phosphate
  modified_base 19: mod_base = OTHER; note = 2'-O-methyluridine-3'-phosphate
  modified_base 20: mod_base = OTHER; note = 2'-O-methyluridine-3'-phosphate
  modified_base 21: mod_base = OTHER; note = 2'-O-methyladenosine-3'-phosphate ((2S,4R)-1-[29-[[2-(acetylamino)-2-deoxy-beta-D-galactopyra nosyl]oxy]-14,14-bis[[3-[[3-[[5-[[2-(acetylamino)-2-deoxy-b eta-D-galactopyranosyl]oxy]-1-oxopentyl]amino]propyl]amino] -3-oxopropoxy]methyl]-1,12,19,25-tetraoxo-16-oxa-13,20,24-t riazanonacos-1-yl]-4-hydroxy-2-pyrrolidinyl)methyl ester
tgacaaagtaatcctagctta

SEQ ID NO: 840 - RNA, 21 nt, synthetic construct
  source 1..21: mol_type = other RNA
  modified_base 1: mod_base = OTHER; note = 2'-O-methylguanosine-3'-phosphorothioate
  modified_base 2: mod_base = OTHER; note = 2'-O-methyladenosine-3'-phosphorothioate
  modified_base 3: mod_base = OTHER; note = 2'-O-methylcytidine-3'-phosphate
  modified_base 4: mod_base = OTHER; note = 2'-O-methyladenosine-3'-phosphate
  modified_base 5: mod_base = OTHER; note = 2'-O-methyladenosine-3'-phosphate
  modified_base 6: mod_base = OTHER; note = 2'-O-methyladenosine-3'-phosphate
  modified_base 7: mod_base = OTHER; note = 2'-deoxy-2'-fluoroguanosine-3'-phosphate
  modified_base 8: mod_base = OTHER; note = 2'-O-methyluridine-3'-phosphate
  modified_base 9: mod_base = OTHER; note = 2'-deoxy-2'-fluoroadenosine-3'-phosphate
  modified_base 10: mod_base = OTHER; note = 2'-deoxy-2'-fluoroadenosine-3'-phosphate
  modified_base 11: mod_base = OTHER; note = 2'-deoxy-2'-fluorouridine-3'-phosphate
  modified_base 12: mod_base = OTHER; note = 2'-O-methylcytidine-3'-phosphate
  modified_base 13: mod_base = OTHER; note = 2'-O-methylcytidine-3'-phosphate
  modified_base 14: mod_base = OTHER; note = 2'-O-methylcytidine-3'-phosphate
  modified_base 15: mod_base = OTHER; note = 2'-O-methyladenosine-3'-phosphate
  modified_base 16: mod_base = OTHER; note = 2'-O-methylguanosine-3'-phosphate
  modified_base 17: mod_base = OTHER; note = 2'-O-methylcytidine-3'-phosphate
  modified_base 18: mod_base = OTHER; note = 2'-O-methyluridine-3'-phosphate
  modified_base 19: mod_base = OTHER; note = 2'-O-methyluridine-3'-phosphate
  modified_base 20: mod_base = OTHER; note = 2'-O-methylguanosine-3'-phosphate
  modified_base 21: mod_base = OTHER; note = 2'-O-methyladenosine-3'-phosphate ((2S,4R)-1-[29-[[2-(acetylamino)-2-deoxy-beta-D-galactopyra nosyl]oxy]-14,14-bis[[3-[[3-[[5-[[2-(acetylamino)-2-deoxy-b eta-D-galactopyranosyl]oxy]-1-oxopentyl]amino]propyl]amino] -3-oxopropoxy]methyl]-1,12,19,25-tetraoxo-16-oxa-13,20,24-t riazanonacos-1-yl]-4-hydroxy-2-pyrrolidinyl)methyl ester
gacaaagtaatcccagcttga

SEQ ID NO: 841 - RNA, 21 nt, synthetic construct
  source 1..21: mol_type = other RNA
  modified_base 1: mod_base = OTHER; note = 2'-O-methyladenosine-3'-phosphorothioate
  modified_base 2: mod_base = OTHER; note = 2'-O-methylcytidine-3'-phosphorothioate
  modified_base 3: mod_base = OTHER; note = 2'-O-methyladenosine-3'-phosphate
  modified_base 4: mod_base = OTHER; note = 2'-O-methyladenosine-3'-phosphate
  modified_base 5: mod_base = OTHER; note = 2'-O-methyladenosine-3'-phosphate
  modified_base 6: mod_base = OTHER; note = 2'-O-methylguanosine-3'-phosphate
  modified_base 7: mod_base = OTHER; note = 2'-deoxy-2'-fluorouridine-3'-phosphate
  modified_base 8: mod_base = OTHER; note = 2'-O-methyladenosine-3'-phosphate
  modified_base 9: mod_base = OTHER; note = 2'-deoxy-2'-fluoroadenosine-3'-phosphate
  modified_base 10: mod_base = OTHER; note = 2'-deoxy-2'-fluorouridine-3'-phosphate
  modified_base 11: mod_base = OTHER; note = 2'-deoxy-2'-fluorocytidine-3'-phosphate
  modified_base 12: mod_base = OTHER; note = 2'-O-methylcytidine-3'-phosphate
  modified_base 13: mod_base = OTHER; note = 2'-O-methylcytidine-3'-phosphate
  modified_base 14: mod_base = OTHER; note = 2'-O-methyladenosine-3'-phosphate
  modified_base 15: mod_base = OTHER; note = 2'-O-methylguanosine-3'-phosphate
  modified_base 16: mod_base = OTHER; note = 2'-O-methylcytidine-3'-phosphate
  modified_base 17: mod_base = OTHER; note = 2'-O-methyluridine-3'-phosphate
  modified_base 18: mod_base = OTHER; note = 2'-O-methyluridine-3'-phosphate
  modified_base 19: mod_base = OTHER; note = 2'-O-methylguanosine-3'-phosphate
  modified_base 20: mod_base = OTHER; note = 2'-O-methyluridine-3'-phosphate
  modified_base 21: mod_base = OTHER; note = 2'-O-methyladenosine-3'-phosphate ((2S,4R)-1-[29-[[2-(acetylamino)-2-deoxy-beta-D-galactopyra nosyl]oxy]-14,14-bis[[3-[[3-[[5-[[2-(acetylamino)-2-deoxy-b eta-D-galactopyranosyl]oxy]-1-oxopentyl]amino]propyl]amino] -3-oxopropoxy]methyl]-1,12,19,25-tetraoxo-16-oxa-13,20,24-t riazanonacos-1-yl]-4-hydroxy-2-pyrrolidinyl)methyl ester
acaaagtaatcccagcttgta

SEQ ID NO: 842 - RNA, 21 nt, synthetic construct
  source 1..21: mol_type = other RNA
  modified_base 1: mod_base = OTHER; note = 2'-O-methyladenosine-3'-phosphorothioate
  modified_base 2: mod_base = OTHER; note = 2'-O-methylcytidine-3'-phosphorothioate
  modified_base 3: mod_base = OTHER; note = 2'-O-methyladenosine-3'-phosphate
  modified_base 4: mod_base = OTHER; note = 2'-O-methyladenosine-3'-phosphate
  modified_base 5: mod_base = OTHER; note = 2'-O-methyladenosine-3'-phosphate
  modified_base 6: mod_base = OTHER; note = 2'-O-methylguanosine-3'-phosphate
  modified_base 7: mod_base = OTHER; note = 2'-deoxy-2'-fluorouridine-3'-phosphate
  modified_base 8: mod_base = OTHER; note = 2'-O-methyladenosine-3'-phosphate
  modified_base 9: mod_base = OTHER; note = 2'-deoxy-2'-fluoroadenosine-3'-phosphate
  modified_base 10: mod_base = OTHER; note = 2'-deoxy-2'-fluorouridine-3'-phosphate
  modified_base 11: mod_base = OTHER; note = 2'-deoxy-2'-fluorocytidine-3'-phosphate
  modified_base 12: mod_base = OTHER; note = 2'-O-methylcytidine-3'-phosphate
  modified_base 13: mod_base = OTHER; note = 2'-O-methylcytidine-3'-phosphate
  modified_base 14: mod_base = OTHER; note = 2'-O-methyladenosine-3'-phosphate
  modified_base 15: mod_base = OTHER; note = 2'-O-methyluridine-3'-phosphate
  modified_base 16: mod_base = OTHER; note = 2'-O-methylcytidine-3'-phosphate
  modified_base 17: mod_base = OTHER; note = 2'-O-methyluridine-3'-phosphate
  modified_base 18: mod_base = OTHER; note = 2'-O-methyluridine-3'-phosphate
  modified_base 19: mod_base = OTHER; note = 2'-O-methylguanosine-3'-phosphate
  modified_base 20: mod_base = OTHER; note = 2'-O-methyluridine-3'-phosphate
  modified_base 21: mod_base = OTHER; note = 2'-O-methyladenosine-3'-phosphate ((2S,4R)-1-[29-[[2-(acetylamino)-2-deoxy-beta-D-galactopyra nosyl]oxy]-14,14-bis[[3-[[3-[[5-[[2-(acetylamino)-2-deoxy-b eta-D-galactopyranosyl]oxy]-1-oxopentyl]amino]propyl]amino] -3-oxopropoxy]methyl]-1,12,19,25-tetraoxo-16-oxa-13,20,24-t riazanonacos-1-yl]-4-hydroxy-2-pyrrolidinyl)methyl ester
acaaagtaatcccatcttgta

SEQ ID NO: 843 - RNA, 21 nt, synthetic construct
  source 1..21: mol_type = other RNA
  modified_base 1: mod_base = OTHER; note = 2'-O-methylcytidine-3'-phosphorothioate
  modified_base 2: mod_base = OTHER; note = 2'-O-methyladenosine-3'-phosphorothioate
  modified_base 3: mod_base = OTHER; note = 2'-O-methyladenosine-3'-phosphate
  modified_base 4: mod_base = OTHER; note = 2'-O-methyladenosine-3'-phosphate
  modified_base 5: mod_base = OTHER; note = 2'-O-methylguanosine-3'-phosphate
  modified_base 6: mod_base = OTHER; note = 2'-O-methyluridine-3'-phosphate
  modified_base 7: mod_base = OTHER; note = 2'-deoxy-2'-fluoroadenosine-3'-phosphate
  modified_base 8: mod_base = OTHER; note = 2'-O-methyladenosine-3'-phosphate
  modified_base 9: mod_base = OTHER; note = 2'-deoxy-2'-fluorouridine-3'-phosphate
  modified_base 10: mod_base = OTHER; note = 2'-deoxy-2'-fluorocytidine-3'-phosphate
  modified_base 11: mod_base = OTHER; note = 2'-deoxy-2'-fluorocytidine-3'-phosphate
  modified_base 12: mod_base = OTHER; note = 2'-O-methylcytidine-3'-phosphate
  modified_base 13: mod_base = OTHER; note = 2'-O-methyladenosine-3'-phosphate
  modified_base 14: mod_base = OTHER; note = 2'-O-methylguanosine-3'-phosphate
  modified_base 15: mod_base = OTHER; note = 2'-O-methylcytidine-3'-phosphate
  modified_base 16: mod_base = OTHER; note = 2'-O-methyluridine-3'-phosphate
  modified_base 17: mod_base = OTHER; note = 2'-O-methyluridine-3'-phosphate
  modified_base 18: mod_base = OTHER; note = 2'-O-methylguanosine-3'-phosphate
  modified_base 19: mod_base = OTHER; note = 2'-O-methyluridine-3'-phosphate
  modified_base 20: mod_base = OTHER; note = 2'-O-methylcytidine-3'-phosphate
  modified_base 21: mod_base = OTHER; note = 2'-O-methyladenosine-3'-phosphate ((2S,4R)-1-[29-[[2-(acetylamino)-2-deoxy-beta-D-galactopyra nosyl]oxy]-14,14-bis[[3-[[3-[[5-[[2-(acetylamino)-2-deoxy-b eta-D-galactopyranosyl]oxy]-1-oxopentyl]amino]propyl]amino] -3-oxopropoxy]methyl]-1,12,19,25-tetraoxo-16-oxa-13,20,24-t riazanonacos-1-yl]-4-hydroxy-2-pyrrolidinyl)methyl ester
caaagtaatcccagcttgtca

SEQ ID NO: 844 - RNA, 21 nt, synthetic construct
  source 1..21: mol_type = other RNA
  modified_base 1: mod_base = OTHER; note = 2'-O-methyladenosine-3'-phosphorothioate
  modified_base 2: mod_base = OTHER; note = 2'-O-methyladenosine-3'-phosphorothioate
  modified_base 3: mod_base = OTHER; note = 2'-O-methyladenosine-3'-phosphate
  modified_base 4: mod_base = OTHER; note = 2'-O-methylguanosine-3'-phosphate
  modified_base 5: mod_base = OTHER; note = 2'-O-methyluridine-3'-phosphate
  modified_base 6: mod_base = OTHER; note = 2'-O-methyladenosine-3'-phosphate
  modified_base 7: mod_base = OTHER; note = 2'-deoxy-2'-fluoroadenosine-3'-phosphate
  modified_base 8: mod_base = OTHER; note = 2'-O-methyluridine-3'-phosphate
  modified_base 9: mod_base = OTHER; note = 2'-deoxy-2'-fluorocytidine-3'-phosphate
  modified_base 10: mod_base = OTHER; note = 2'-deoxy-2'-fluorocytidine-3'-phosphate
  modified_base 11: mod_base = OTHER; note = 2'-deoxy-2'-fluorocytidine-3'-phosphate
  modified_base 12: mod_base = OTHER; note = 2'-O-methyladenosine-3'-phosphate
  modified_base 13: mod_base = OTHER; note = 2'-O-methylguanosine-3'-phosphate
  modified_base 14: mod_base = OTHER; note = 2'-O-methylcytidine-3'-phosphate
  modified_base 15: mod_base = OTHER; note = 2'-O-methyluridine-3'-phosphate
  modified_base 16: mod_base = OTHER; note = 2'-O-methyluridine-3'-phosphate
  modified_base 17: mod_base = OTHER; note = 2'-O-methylguanosine-3'-phosphate
  modified_base 18: mod_base = OTHER; note = 2'-O-methyluridine-3'-phosphate
  modified_base 19: mod_base = OTHER; note = 2'-O-methylcytidine-3'-phosphate
  modified_base 20: mod_base = OTHER; note = 2'-O-methyluridine-3'-phosphate
  modified_base 21: mod_base = OTHER; note = 2'-O-methyladenosine-3'-phosphate ((2S,4R)-1-[29-[[2-(acetylamino)-2-deoxy-beta-D-galactopyra nosyl]oxy]-14,14-bis[[3-[[3-[[5-[[2-(acetylamino)-2-deoxy-b eta-D-galactopyranosyl]oxy]-1-oxopentyl]amino]propyl]amino] -3-oxopropoxy]methyl]-1,12,19,25-tetraoxo-16-oxa-13,20,24-t riazanonacos-1-yl]-4-hydroxy-2-pyrrolidinyl)methyl ester
aaagtaatcccagcttgtcta

SEQ ID NO: 845 - RNA, 21 nt, synthetic construct
  source 1..21: mol_type = other RNA
  modified_base 1: mod_base = OTHER; note = 2'-O-methylcytidine-3'-phosphorothioate
  modified_base 2: mod_base = OTHER; note = 2'-O-methyluridine-3'-phosphorothioate
  modified_base 3: mod_base = OTHER; note = 2'-O-methylguanosine-3'-phosphate
  modified_base 4: mod_base = OTHER; note = 2'-O-methyladenosine-3'-phosphate
  modified_base 5: mod_base = OTHER; note = 2'-O-methylcytidine-3'-phosphate
  modified_base 6: mod_base = OTHER; note = 2'-O-methylcytidine-3'-phosphate
  modified_base 7: mod_base = OTHER; note = 2'-deoxy-2'-fluoroguanosine-3'-phosphate
  modified_base 8: mod_base = OTHER; note = 2'-O-methylguanosine-3'-phosphate
  modified_base 9: mod_base = OTHER; note = 2'-deoxy-2'-fluoroadenosine-3'-phosphate
  modified_base 10: mod_base = OTHER; note = 2'-deoxy-2'-fluorocytidine-3'-phosphate
  modified_base 11: mod_base = OTHER; note = 2'-deoxy-2'-fluorocytidine-3'-phosphate
  modified_base 12: mod_base = OTHER; note = 2'-O-methylguanosine-3'-phosphate
  modified_base 13: mod_base = OTHER; note = 2'-O-methyladenosine-3'-phosphate
  modified_base 14: mod_base = OTHER; note = 2'-O-methyladenosine-3'-phosphate
  modified_base 15: mod_base = OTHER; note = 2'-O-methyluridine-3'-phosphate
  modified_base 16: mod_base = OTHER; note = 2'-O-methylguanosine-3'-phosphate
  modified_base 17: mod_base = OTHER; note = 2'-O-methyluridine-3'-phosphate
  modified_base 18: mod_base = OTHER; note = 2'-O-methyluridine-3'-phosphate
  modified_base 19: mod_base = OTHER; note = 2'-O-methyluridine-3'-phosphate
  modified_base 20: mod_base = OTHER; note = 2'-O-methylcytidine-3'-phosphate
  modified_base 21: mod_base = OTHER; note = 2'-O-methyladenosine-3'-phosphate ((2S,4R)-1-[29-[[2-(acetylamino)-2-deoxy-beta-D-galactopyra nosyl]oxy]-14,14-bis[[3-[[3-[[5-[[2-(acetylamino)-2-deoxy-b eta-D-galactopyranosyl]oxy]-1-oxopentyl]amino]propyl]amino] -3-oxopropoxy]methyl]-1,12,19,25-tetraoxo-16-oxa-13,20,24-t riazanonacos-1-yl]-4-hydroxy-2-pyrrolidinyl)methyl ester
ctgaccggaccgaatgtttca

SEQ ID NO: 846 - RNA, 21 nt, synthetic construct
  source 1..21: mol_type = other RNA
  modified_base 1: mod_base = OTHER; note = 2'-O-methylcytidine-3'-phosphorothioate
  modified_base 2: mod_base = OTHER; note = 2'-O-methyluridine-3'-phosphorothioate
  modified_base 3: mod_base = OTHER; note = 2'-O-methylguanosine-3'-phosphate
  modified_base 4: mod_base = OTHER; note = 2'-O-methyladenosine-3'-phosphate
  modified_base 5: mod_base = OTHER; note = 2'-O-methylcytidine-3'-phosphate
  modified_base 6: mod_base = OTHER; note = 2'-O-methylcytidine-3'-phosphate
  modified_base 7: mod_base = OTHER; note = 2'-deoxy-2'-fluoroguanosine-3'-phosphate
  modified_base 8: mod_base = OTHER; note = 2'-O-methylguanosine-3'-phosphate
  modified_base 9: mod_base = OTHER; note = 2'-deoxy-2'-fluoroadenosine-3'-phosphate
  modified_base 10: mod_base = OTHER; note = 2'-deoxy-2'-fluorocytidine-3'-phosphate
  modified_base 11: mod_base = OTHER; note = 2'-deoxy-2'-fluorocytidine-3'-phosphate
  modified_base 12: mod_base = OTHER; note = 2'-O-methylguanosine-3'-phosphate
  modified_base 13: mod_base = OTHER; note = 2'-O-methyladenosine-3'-phosphate
  modified_base 14: mod_base = OTHER; note = 2'-O-methyladenosine-3'-phosphate
  modified_base 15: mod_base = OTHER; note = 2'-O-methyluridine-3'-phosphate
  modified_base 16: mod_base = OTHER; note = 2'-O-methyluridine-3'-phosphate
  modified_base 17: mod_base = OTHER; note = 2'-O-methyluridine-3'-phosphate
  modified_base 18: mod_base = OTHER; note = 2'-O-methyluridine-3'-phosphate
  modified_base 19: mod_base = OTHER; note = 2'-O-methyluridine-3'-phosphate
  modified_base 20: mod_base = OTHER; note = 2'-O-methylcytidine-3'-phosphate
  modified_base 21: mod_base = OTHER; note = 2'-O-methyladenosine-3'-phosphate ((2S,4R)-1-[29-[[2-(acetylamino)-2-deoxy-beta-D-galactopyra nosyl]oxy]-14,14-bis[[3-[[3-[[5-[[2-(acetylamino)-2-deoxy-b eta-D-galactopyranosyl]oxy]-1-oxopentyl]amino]propyl]amino] -3-oxopropoxy]methyl]-1,12,19,25-tetraoxo-16-oxa-13,20,24-t riazanonacos-1-yl]-4-hydroxy-2-pyrrolidinyl)methyl ester
ctgaccggaccgaatttttca

SEQ ID NO: 847 - RNA, 21 nt, synthetic construct
  source 1..21: mol_type = other RNA
  modified_base 1: mod_base = OTHER; note = 2'-O-methyladenosine-3'-phosphorothioate
  modified_base 2: mod_base = OTHER; note = 2'-O-methylcytidine-3'-phosphorothioate
  modified_base 3: mod_base = OTHER; note = 2'-O-methylcytidine-3'-phosphate
  modified_base 4: mod_base = OTHER; note = 2'-O-methylguanosine-3'-phosphate
  modified_base 5: mod_base = OTHER; note = 2'-O-methylguanosine-3'-phosphate
  modified_base 6: mod_base = OTHER; note = 2'-O-methyladenosine-3'-phosphate
  modified_base 7: mod_base = OTHER; note = 2'-deoxy-2'-fluorocytidine-3'-phosphate
  modified_base 8: mod_base = OTHER; note = 2'-O-methylcytidine-3'-phosphate
  modified_base 9: mod_base = OTHER; note = 2'-deoxy-2'-fluoroguanosine-3'-phosphate
  modified_base 10: mod_base = OTHER; note = 2'-deoxy-2'-fluoroadenosine-3'-phosphate
  modified_base 11: mod_base = OTHER; note = 2'-deoxy-2'-fluoroadenosine-3'-phosphate
  modified_base 12: mod_base = OTHER; note = 2'-O-methyluridine-3'-phosphate
  modified_base 13: mod_base = OTHER; note = 2'-O-methylguanosine-3'-phosphate
  modified_base 14: mod_base = OTHER; note = 2'-O-methyluridine-3'-phosphate
  modified_base 15: mod_base = OTHER; note = 2'-O-methyluridine-3'-phosphate
  modified_base 16: mod_base = OTHER; note = 2'-O-methyluridine-3'-phosphate
  modified_base 17: mod_base = OTHER; note = 2'-O-methylcytidine-3'-phosphate
  modified_base 18: mod_base = OTHER; note = 2'-O-methyladenosine-3'-phosphate
  modified_base 19: mod_base = OTHER; note = 2'-O-methyluridine-3'-phosphate
  modified_base 20: mod_base = OTHER; note = 2'-O-methylcytidine-3'-phosphate
  modified_base 21: mod_base = OTHER; note = 2'-O-methyladenosine-3'-phosphate ((2S,4R)-1-[29-[[2-(acetylamino)-2-deoxy-beta-D-galactopyra nosyl]oxy]-14,14-bis[[3-[[3-[[5-[[2-(acetylamino)-2-deoxy-b eta-D-galactopyranosyl]oxy]-1-oxopentyl]amino]propyl]amino] -3-oxopropoxy]methyl]-1,12,19,25-tetraoxo-16-oxa-13,20,24-t riazanonacos-1-yl]-4-hydroxy-2-pyrrolidinyl)methyl ester
accggaccgaatgtttcatca

SEQ ID NO: 848 - RNA, 21 nt, synthetic construct
  source 1..21: mol_type = other RNA
  modified_base 1: mod_base = OTHER; note = 2'-O-methylcytidine-3'-phosphorothioate
  modified_base 2: mod_base = OTHER; note = 2'-O-methylcytidine-3'-phosphorothioate
  modified_base 3: mod_base = OTHER; note = 2'-O-methylguanosine-3'-phosphate
  modified_base 4: mod_base = OTHER; note = 2'-O-methylguanosine-3'-phosphate
  modified_base 5: mod_base = OTHER; note = 2'-O-methyladenosine-3'-phosphate
  modified_base 6: mod_base = OTHER; note = 2'-O-methylcytidine-3'-phosphate
  modified_base 7: mod_base = OTHER; note = 2'-deoxy-2'-fluorocytidine-3'-phosphate
  modified_base 8: mod_base = OTHER; note = 2'-O-methylguanosine-3'-phosphate
  modified_base 9: mod_base = OTHER; note = 2'-deoxy-2'-fluoroadenosine-3'-phosphate
  modified_base 10: mod_base = OTHER; note = 2'-deoxy-2'-fluoroadenosine-3'-phosphate
  modified_base 11: mod_base = OTHER; note = 2'-deoxy-2'-fluorouridine-3'-phosphate
  modified_base 12: mod_base = OTHER; note = 2'-O-methylguanosine-3'-phosphate
  modified_base 13: mod_base = OTHER; note = 2'-O-methyluridine-3'-phosphate
  modified_base 14: mod_base = OTHER; note = 2'-O-methyluridine-3'-phosphate
  modified_base 15: mod_base = OTHER; note = 2'-O-methyluridine-3'-phosphate
  modified_base 16: mod_base = OTHER; note = 2'-O-methylcytidine-3'-phosphate
  modified_base 17: mod_base = OTHER; note = 2'-O-methyladenosine-3'-phosphate
  modified_base 18: mod_base = OTHER; note = 2'-O-methyluridine-3'-phosphate
  modified_base 19: mod_base = OTHER; note = 2'-O-methylcytidine-3'-phosphate
  modified_base 20: mod_base = OTHER; note = 2'-O-methyladenosine-3'-phosphate
  modified_base 21: mod_base = OTHER; note = 2'-O-methyladenosine-3'-phosphate ((2S,4R)-1-[29-[[2-(acetylamino)-2-deoxy-beta-D-galactopyra nosyl]oxy]-14,14-bis[[3-[[3-[[5-[[2-(acetylamino)-2-deoxy-b eta-D-galactopyranosyl]oxy]-1-oxopentyl]amino]propyl]amino] -3-oxopropoxy]methyl]-1,12,19,25-tetraoxo-16-oxa-13,20,24-t riazanonacos-1-yl]-4-hydroxy-2-pyrrolidinyl)methyl ester
ccggaccgaatgtttcatcaa

SEQ ID NO: 849 - RNA, 21 nt, synthetic construct
  source 1..21: mol_type = other RNA
  modified_base 1: mod_base = OTHER; note = 2'-O-methylcytidine-3'-phosphorothioate
  modified_base 2: mod_base = OTHER; note = 2'-O-methylcytidine-3'-phosphorothioate
  modified_base 3: mod_base = OTHER; note = 2'-O-methylguanosine-3'-phosphate
  modified_base 4: mod_base = OTHER; note = 2'-O-methylguanosine-3'-phosphate
  modified_base 5: mod_base = OTHER; note = 2'-O-methyladenosine-3'-phosphate
  modified_base 6: mod_base = OTHER; note = 2'-O-methylcytidine-3'-phosphate
  modified_base 7: mod_base = OTHER; note = 2'-deoxy-2'-fluorocytidine-3'-phosphate
  modified_base 8: mod_base = OTHER; note = 2'-O-methylguanosine-3'-phosphate
  modified_base 9: mod_base = OTHER; note = 2'-deoxy-2'-fluoroadenosine-3'-phosphate
  modified_base 10: mod_base = OTHER; note = 2'-deoxy-2'-fluoroadenosine-3'-phosphate
  modified_base 11: mod_base = OTHER; note = 2'-deoxy-2'-fluorouridine-3'-phosphate
  modified_base 12: mod_base = OTHER; note = 2'-O-methylguanosine-3'-phosphate
  modified_base 13: mod_base = OTHER; note = 2'-O-methyluridine-3'-phosphate
  modified_base 14: mod_base = OTHER; note = 2'-O-methyluridine-3'-phosphate
  modified_base 15: mod_base = OTHER; note = 2'-O-methyluridine-3'-phosphate
  modified_base 16: mod_base = OTHER; note = 2'-O-methyluridine-3'-phosphate
  modified_base 17: mod_base = OTHER; note = 2'-O-methyladenosine-3'-phosphate
  modified_base 18: mod_base = OTHER; note = 2'-O-methyluridine-3'-phosphate
  modified_base 19: mod_base = OTHER; note = 2'-O-methylcytidine-3'-phosphate
  modified_base 20: mod_base = OTHER; note = 2'-O-methyladenosine-3'-phosphate
  modified_base 21: mod_base = OTHER; note = 2'-O-methyladenosine-3'-phosphate ((2S,4R)-1-[29-[[2-(acetylamino)-2-deoxy-beta-D-galactopyra nosyl]oxy]-14,14-bis[[3-[[3-[[5-[[2-(acetylamino)-2-deoxy-b eta-D-galactopyranosyl]oxy]-1-oxopentyl]amino]propyl]amino] -3-oxopropoxy]methyl]-1,12,19,25-tetraoxo-16-oxa-13,20,24-t riazanonacos-1-yl]-4-hydroxy-2-pyrrolidinyl)methyl ester
ccggaccgaatgttttatcaa

SEQ ID NO: 850 - RNA, 21 nt, synthetic construct
  source 1..21: mol_type = other RNA
  modified_base 1: mod_base = OTHER; note = 2'-O-methylcytidine-3'-phosphorothioate
  modified_base 2: mod_base = OTHER; note = 2'-O-methylguanosine-3'-phosphorothioate
  modified_base 3: mod_base = OTHER; note = 2'-O-methylguanosine-3'-phosphate
  modified_base 4: mod_base = OTHER; note = 2'-O-methyladenosine-3'-phosphate
  modified_base 5: mod_base = OTHER; note = 2'-O-methylcytidine-3'-phosphate
  modified_base 6: mod_base = OTHER; note = 2'-O-methylcytidine-3'-phosphate
  modified_base 7: mod_base = OTHER; note = 2'-deoxy-2'-fluoroguanosine-3'-phosphate
  modified_base 8: mod_base = OTHER; note = 2'-O-methyladenosine-3'-phosphate
  modified_base 9: mod_base = OTHER; note = 2'-deoxy-2'-fluoroadenosine-3'-phosphate
  modified_base 10: mod_base = OTHER; note = 2'-deoxy-2'-fluorouridine-3'-phosphate
  modified_base 11: mod_base = OTHER; note = 2'-deoxy-2'-fluoroguanosine-3'-phosphate
  modified_base 12: mod_base = OTHER; note = 2'-O-methyluridine-3'-phosphate
  modified_base 13: mod_base = OTHER; note = 2'-O-methyluridine-3'-phosphate
  modified_base 14: mod_base = OTHER; note = 2'-O-methyluridine-3'-phosphate
  modified_base 15: mod_base = OTHER; note = 2'-O-methylcytidine-3'-phosphate
  modified_base 16: mod_base = OTHER; note = 2'-O-methyladenosine-3'-phosphate
  modified_base 17: mod_base = OTHER; note = 2'-O-methyluridine-3'-phosphate
  modified_base 18: mod_base = OTHER; note = 2'-O-methylcytidine-3'-phosphate
  modified_base 19: mod_base = OTHER; note = 2'-O-methyladenosine-3'-phosphate
  modified_base 20: mod_base = OTHER; note = 2'-O-methylcytidine-3'-phosphate
  modified_base 21: mod_base = OTHER; note = 2'-O-methyladenosine-3'-phosphate ((2S,4R)-1-[29-[[2-(acetylamino)-2-deoxy-beta-D-galactopyra nosyl]oxy]-14,14-bis[[3-[[3-[[5-[[2-(acetylamino)-2-deoxy-b eta-D-galactopyranosyl]oxy]-1-oxopentyl]amino]propyl]amino] -3-oxopropoxy]methyl]-1,12,19,25-tetraoxo-16-oxa-13,20,24-t riazanonacos-1-yl]-4-hydroxy-2-pyrrolidinyl)methyl ester
cggaccgaatgtttcatcaca

SEQ ID NO: 851 - RNA, 21 nt, synthetic construct
  source 1..21: mol_type = other RNA
  modified_base 1: mod_base = OTHER; note = 2'-O-methylcytidine-3'-phosphorothioate
  modified_base 2: mod_base = OTHER; note = 2'-O-methylguanosine-3'-phosphorothioate
  modified_base 3: mod_base = OTHER; note = 2'-O-methylguanosine-3'-phosphate
  modified_base 4: mod_base = OTHER; note = 2'-O-methyladenosine-3'-phosphate
  modified_base 5: mod_base = OTHER; note = 2'-O-methylcytidine-3'-phosphate
  modified_base 6: mod_base = OTHER; note = 2'-O-methylcytidine-3'-phosphate
  modified_base 7: mod_base = OTHER; note = 2'-deoxy-2'-fluoroguanosine-3'-phosphate
  modified_base 8: mod_base = OTHER; note = 2'-O-methyladenosine-3'-phosphate
  modified_base 9: mod_base = OTHER; note = 2'-deoxy-2'-fluoroadenosine-3'-phosphate
  modified_base 10: mod_base = OTHER; note = 2'-deoxy-2'-fluorouridine-3'-phosphate
  modified_base 11: mod_base = OTHER; note = 2'-deoxy-2'-fluoroguanosine-3'-phosphate
  modified_base 12: mod_base = OTHER; note = 2'-O-methyluridine-3'-phosphate
  modified_base 13: mod_base = OTHER; note = 2'-O-methyluridine-3'-phosphate
  modified_base 14: mod_base = OTHER; note = 2'-O-methyluridine-3'-phosphate
  modified_base 15: mod_base = OTHER; note = 2'-O-methyluridine-3'-phosphate
  modified_base 16: mod_base = OTHER; note = 2'-O-methyladenosine-3'-phosphate
  modified_base 17: mod_base = OTHER; note = 2'-O-methyluridine-3'-phosphate
  modified_base 18: mod_base = OTHER; note = 2'-O-methylcytidine-3'-phosphate
  modified_base 19: mod_base = OTHER; note = 2'-O-methyladenosine-3'-phosphate
  modified_base 20: mod_base = OTHER; note = 2'-O-methylcytidine-3'-phosphate
  modified_base 21: mod_base = OTHER; note = 2'-O-methyladenosine-3'-phosphate ((2S,4R)-1-[29-[[2-(acetylamino)-2-deoxy-beta-D-galactopyra nosyl]oxy]-14,14-bis[[3-[[3-[[5-[[2-(acetylamino)-2-deoxy-b eta-D-galactopyranosyl]oxy]-1-oxopentyl]amino]propyl]amino] -3-oxopropoxy]methyl]-1,12,19,25-tetraoxo-16-oxa-13,20,24-t riazanonacos-1-yl]-4-hydroxy-2-pyrrolidinyl)methyl ester
cggaccgaatgttttatcaca

SEQ ID NO: 852 - RNA, 21 nt, synthetic construct
  source 1..21: mol_type = other RNA
  modified_base 1: mod_base = OTHER; note = 2'-O-methylguanosine-3'-phosphorothioate
  modified_base 2: mod_base = OTHER; note = 2'-O-methylguanosine-3'-phosphorothioate
  modified_base 3: mod_base = OTHER; note = 2'-O-methyladenosine-3'-phosphate
  modified_base 4: mod_base = OTHER; note = 2'-O-methylcytidine-3'-phosphate
  modified_base 5: mod_base = OTHER; note = 2'-O-methylcytidine-3'-phosphate
  modified_base 6: mod_base = OTHER; note = 2'-O-methylguanosine-3'-phosphate
  modified_base 7: mod_base = OTHER; note = 2'-deoxy-2'-fluoroadenosine-3'-phosphate
  modified_base 8: mod_base = OTHER; note = 2'-O-methyladenosine-3'-phosphate
  modified_base 9: mod_base = OTHER; note = 2'-deoxy-2'-fluorouridine-3'-phosphate
  modified_base 10: mod_base = OTHER; note = 2'-deoxy-2'-fluoroguanosine-3'-phosphate
  modified_base 11: mod_base = OTHER; note = 2'-deoxy-2'-fluorouridine-3'-phosphate
  modified_base 12: mod_base = OTHER; note = 2'-O-methyluridine-3'-phosphate
  modified_base 13: mod_base = OTHER; note = 2'-O-methyluridine-3'-phosphate
  modified_base 14: mod_base = OTHER; note = 2'-O-methylcytidine-3'-phosphate
  modified_base 15: mod_base = OTHER; note = 2'-O-methyladenosine-3'-phosphate
  modified_base 16: mod_base = OTHER; note = 2'-O-methyluridine-3'-phosphate
  modified_base 17: mod_base = OTHER; note = 2'-O-methylcytidine-3'-phosphate
  modified_base 18: mod_base = OTHER; note = 2'-O-methyladenosine-3'-phosphate
  modified_base 19: mod_base = OTHER; note = 2'-O-methylcytidine-3'-phosphate
  modified_base 20: mod_base = OTHER; note = 2'-O-methyluridine-3'-phosphate
  modified_base 21: mod_base = OTHER; note = 2'-O-methyladenosine-3'-phosphate ((2S,4R)-1-[29-[[2-(acetylamino)-2-deoxy-beta-D-galactopyra nosyl]oxy]-14,14-bis[[3-[[3-[[5-[[2-(acetylamino)-2-deoxy-b eta-D-galactopyranosyl]oxy]-1-oxopentyl]amino]propyl]amino] -3-oxopropoxy]methyl]-1,12,19,25-tetraoxo-16-oxa-13,20,24-t riazanonacos-1-yl]-4-hydroxy-2-pyrrolidinyl)methyl ester
ggaccgaatgtttcatcacta

SEQ ID NO: 853 - RNA, 21 nt, synthetic construct
  source 1..21: mol_type = other RNA
  modified_base 1: mod_base = OTHER; note = 2'-O-methylguanosine-3'-phosphorothioate
  modified_base 2: mod_base = OTHER; note = 2'-O-methylguanosine-3'-phosphorothioate
  modified_base 3: mod_base = OTHER; note = 2'-O-methyladenosine-3'-phosphate
  modified_base 4: mod_base = OTHER; note = 2'-O-methylcytidine-3'-phosphate
  modified_base 5: mod_base = OTHER; note = 2'-O-methylcytidine-3'-phosphate
  modified_base 6: mod_base = OTHER; note = 2'-O-methylguanosine-3'-phosphate
  modified_base 7: mod_base = OTHER; note = 2'-deoxy-2'-fluoroadenosine-3'-phosphate
  modified_base 8: mod_base = OTHER; note = 2'-O-methyladenosine-3'-phosphate
  modified_base 9: mod_base = OTHER; note = 2'-deoxy-2'-fluorouridine-3'-phosphate
  modified_base 10: mod_base = OTHER; note = 2'-deoxy-2'-fluoroguanosine-3'-phosphate
  modified_base 11: mod_base = OTHER; note = 2'-deoxy-2'-fluorouridine-3'-phosphate
  modified_base 12: mod_base = OTHER; note = 2'-O-methyluridine-3'-phosphate
  modified_base 13: mod_base = OTHER; note = 2'-O-methyluridine-3'-phosphate
  modified_base 14: mod_base = OTHER; note = 2'-O-methylcytidine-3'-phosphate
  modified_base 15: mod_base = OTHER; note = 2'-O-methyluridine-3'-phosphate
  modified_base 16: mod_base = OTHER; note = 2'-O-methyluridine-3'-phosphate
  modified_base 17: mod_base = OTHER; note = 2'-O-methylcytidine-3'-phosphate
  modified_base 18: mod_base = OTHER; note = 2'-O-methyladenosine-3'-phosphate
  modified_base 19: mod_base = OTHER; note = 2'-O-methylcytidine-3'-phosphate
  modified_base 20: mod_base = OTHER; note = 2'-O-methyluridine-3'-phosphate
  modified_base 21: mod_base = OTHER; note = 2'-O-methyladenosine-3'-phosphate ((2S,4R)-1-[29-[[2-(acetylamino)-2-deoxy-beta-D-galactopyra nosyl]oxy]-14,14-bis[[3-[[3-[[5-[[2-(acetylamino)-2-deoxy-b eta-D-galactopyranosyl]oxy]-1-oxopentyl]amino]propyl]amino] -3-oxopropoxy]methyl]-1,12,19,25-tetraoxo-16-oxa-13,20,24-t riazanonacos-1-yl]-4-hydroxy-2-pyrrolidinyl)methyl ester
ggaccgaatgtttcttcacta

SEQ ID NO: 854 - RNA, 21 nt, synthetic construct
  source 1..21: mol_type = other RNA
  modified_base 1: mod_base = OTHER; note = 2'-O-methylguanosine-3'-phosphorothioate
  modified_base 2: mod_base = OTHER; note = 2'-O-methyladenosine-3'-phosphorothioate
  modified_base 3: mod_base = OTHER; note = 2'-O-methylcytidine-3'-phosphate
  modified_base 4: mod_base = OTHER; note = 2'-O-methylcytidine-3'-phosphate
  modified_base 5: mod_base = OTHER; note = 2'-O-methylguanosine-3'-phosphate
  modified_base 6: mod_base = OTHER; note = 2'-O-methyladenosine-3'-phosphate
  modified_base 7: mod_base = OTHER; note = 2'-deoxy-2'-fluoroadenosine-3'-phosphate
  modified_base 8: mod_base = OTHER; note = 2'-O-methyluridine-3'-phosphate
  modified_base 9: mod_base = OTHER; note = 2'-deoxy-2'-fluoroguanosine-3'-phosphate
  modified_base 10: mod_base = OTHER; note = 2'-deoxy-2'-fluorouridine-3'-phosphate
  modified_base 11: mod_base = OTHER; note = 2'-deoxy-2'-fluorouridine-3'-phosphate
  modified_base 12: mod_base = OTHER; note = 2'-O-methyluridine-3'-phosphate
  modified_base 13: mod_base = OTHER; note = 2'-O-methylcytidine-3'-phosphate
  modified_base 14: mod_base = OTHER; note = 2'-O-methyladenosine-3'-phosphate
  modified_base 15: mod_base = OTHER; note = 2'-O-methyluridine-3'-phosphate
  modified_base 16: mod_base = OTHER; note = 2'-O-methylcytidine-3'-phosphate
  modified_base 17: mod_base = OTHER; note = 2'-O-methyladenosine-3'-phosphate
  modified_base 18: mod_base = OTHER; note = 2'-O-methylcytidine-3'-phosphate
  modified_base 19: mod_base = OTHER; note = 2'-O-methyluridine-3'-phosphate
  modified_base 20: mod_base = OTHER; note = 2'-O-methylguanosine-3'-phosphate
  modified_base 21: mod_base = OTHER; note = 2'-O-methyladenosine-3'-phosphate ((2S,4R)-1-[29-[[2-(acetylamino)-2-deoxy-beta-D-galactopyra nosyl]oxy]-14,14-bis[[3-[[3-[[5-[[2-(acetylamino)-2-deoxy-b eta-D-galactopyranosyl]oxy]-1-oxopentyl]amino]propyl]amino] -3-oxopropoxy]methyl]-1,12,19,25-tetraoxo-16-oxa-13,20,24-t riazanonacos-1-yl]-4-hydroxy-2-pyrrolidinyl)methyl ester
gaccgaatgtttcatcactga

SEQ ID NO: 855 - RNA, 21 nt, synthetic construct
  source 1..21: mol_type = other RNA
  modified_base 1: mod_base = OTHER; note = 2'-O-methylguanosine-3'-phosphorothioate
  modified_base 2: mod_base = OTHER; note = 2'-O-methyladenosine-3'-phosphorothioate
  modified_base 3: mod_base = OTHER; note = 2'-O-methylcytidine-3'-phosphate
  modified_base 4: mod_base = OTHER; note = 2'-O-methylcytidine-3'-phosphate
  modified_base 5: mod_base = OTHER; note = 2'-O-methylguanosine-3'-phosphate
  modified_base 6: mod_base = OTHER; note = 2'-O-methyladenosine-3'-phosphate
  modified_base 7: mod_base = OTHER; note = 2'-deoxy-2'-fluoroadenosine-3'-phosphate
  modified_base 8: mod_base = OTHER; note = 2'-O-methyluridine-3'-phosphate
  modified_base 9: mod_base = OTHER; note = 2'-deoxy-2'-fluoroguanosine-3'-phosphate
  modified_base 10: mod_base = OTHER; note = 2'-deoxy-2'-fluorouridine-3'-phosphate
  modified_base 11: mod_base = OTHER; note = 2'-deoxy-2'-fluorouridine-3'-phosphate
  modified_base 12: mod_base = OTHER; note = 2'-O-methyluridine-3'-phosphate
  modified_base 13: mod_base = OTHER; note = 2'-O-methylcytidine-3'-phosphate
  modified_base 14: mod_base = OTHER; note = 2'-O-methyladenosine-3'-phosphate
  modified_base 15: mod_base = OTHER; note = 2'-O-methyluridine-3'-phosphate
  modified_base 16: mod_base = OTHER; note = 2'-O-methyluridine-3'-phosphate
  modified_base 17: mod_base = OTHER; note = 2'-O-methyladenosine-3'-phosphate
  modified_base 18: mod_base = OTHER; note = 2'-O-methylcytidine-3'-phosphate
  modified_base 19: mod_base = OTHER; note = 2'-O-methyluridine-3'-phosphate
  modified_base 20: mod_base = OTHER; note = 2'-O-methylguanosine-3'-phosphate
  modified_base 21: mod_base = OTHER; note = 2'-O-methyladenosine-3'-phosphate ((2S,4R)-1-[29-[[2-(acetylamino)-2-deoxy-beta-D-galactopyra nosyl]oxy]-14,14-bis[[3-[[3-[[5-[[2-(acetylamino)-2-deoxy-b eta-D-galactopyranosyl]oxy]-1-oxopentyl]amino]propyl]amino] -3-oxopropoxy]methyl]-1,12,19,25-tetraoxo-16-oxa-13,20,24-t riazanonacos-1-yl]-4-hydroxy-2-pyrrolidinyl)methyl ester
gaccgaatgtttcattactga

SEQ ID NO: 856 - RNA, 21 nt, synthetic construct
  source 1..21: mol_type = other RNA
  modified_base 1: mod_base = OTHER; note = 2'-O-methylcytidine-3'-phosphorothioate
  modified_base 2: mod_base = OTHER; note = 2'-O-methylguanosine-3'-phosphorothioate
  modified_base 3: mod_base = OTHER; note = 2'-O-methyladenosine-3'-phosphate
  modified_base 4: mod_base = OTHER; note = 2'-O-methyladenosine-3'-phosphate
  modified_base 5: mod_base = OTHER; note = 2'-O-methyluridine-3'-phosphate
  modified_base 6: mod_base = OTHER; note = 2'-O-methylguanosine-3'-phosphate
  modified_base 7: mod_base = OTHER; note = 2'-deoxy-2'-fluorouridine-3'-phosphate
  modified_base 8: mod_base = OTHER; note = 2'-O-methyluridine-3'-phosphate
  modified_base 9: mod_base = OTHER; note = 2'-deoxy-2'-fluorouridine-3'-phosphate
  modified_base 10: mod_base = OTHER; note = 2'-deoxy-2'-fluorocytidine-3'-phosphate
  modified_base 11: mod_base = OTHER; note = 2'-deoxy-2'-fluoroadenosine-3'-phosphate
  modified_base 12: mod_base = OTHER; note = 2'-O-methyluridine-3'-phosphate
  modified_base 13: mod_base = OTHER; note = 2'-O-methylcytidine-3'-phosphate
  modified_base 14: mod_base = OTHER; note = 2'-O-methyladenosine-3'-phosphate
  modified_base 15: mod_base = OTHER; note = 2'-O-methylcytidine-3'-phosphate
  modified_base 16: mod_base = OTHER; note = 2'-O-methyluridine-3'-phosphate
  modified_base 17: mod_base = OTHER; note = 2'-O-methylguanosine-3'-phosphate
  modified_base 18: mod_base = OTHER; note = 2'-O-methylguanosine-3'-phosphate
  modified_base 19: mod_base = OTHER; note = 2'-O-methylcytidine-3'-phosphate
  modified_base 20: mod_base = OTHER; note = 2'-O-methyluridine-3'-phosphate
  modified_base 21: mod_base = OTHER; note = 2'-O-methyladenosine-3'-phosphate ((2S,4R)-1-[29-[[2-(acetylamino)-2-deoxy-beta-D-galactopyra nosyl]oxy]-14,14-bis[[3-[[3-[[5-[[2-(acetylamino)-2-deoxy-b eta-D-galactopyranosyl]oxy]-1-oxopentyl]amino]propyl]amino] -3-oxopropoxy]methyl]-1,12,19,25-tetraoxo-16-oxa-13,20,24-t riazanonacos-1-yl]-4-hydroxy-2-pyrrolidinyl)methyl ester
cgaatgtttcatcactggcta

SEQ ID NO: 857 - RNA, 21 nt, synthetic construct
  source 1..21: mol_type = other RNA
  modified_base 1: mod_base = OTHER; note = 2'-O-methylcytidine-3'-phosphorothioate
  modified_base 2: mod_base = OTHER; note = 2'-O-methylguanosine-3'-phosphorothioate
  modified_base 3: mod_base = OTHER; note = 2'-O-methyladenosine-3'-phosphate
  modified_base 4: mod_base = OTHER; note = 2'-O-methyladenosine-3'-phosphate
  modified_base 5: mod_base = OTHER; note = 2'-O-methyluridine-3'-phosphate
  modified_base 6: mod_base = OTHER; note = 2'-O-methylguanosine-3'-phosphate
  modified_base 7: mod_base = OTHER; note = 2'-deoxy-2'-fluorouridine-3'-phosphate
  modified_base 8: mod_base = OTHER; note = 2'-O-methyluridine-3'-phosphate
  modified_base 9: mod_base = OTHER; note = 2'-deoxy-2'-fluorouridine-3'-phosphate
  modified_base 10: mod_base = OTHER; note = 2'-deoxy-2'-fluorocytidine-3'-phosphate
  modified_base 11: mod_base = OTHER; note = 2'-deoxy-2'-fluoroadenosine-3'-phosphate
  modified_base 12: mod_base = OTHER; note = 2'-O-methyluridine-3'-phosphate
  modified_base 13: mod_base = OTHER; note = 2'-O-methylcytidine-3'-phosphate
  modified_base 14: mod_base = OTHER; note = 2'-O-methyladenosine-3'-phosphate
  modified_base 15: mod_base = OTHER; note = 2'-O-methyluridine-3'-phosphate
  modified_base 16: mod_base = OTHER; note = 2'-O-methyluridine-3'-phosphate
  modified_base 17: mod_base = OTHER; note = 2'-O-methylguanosine-3'-phosphate
  modified_base 18: mod_base = OTHER; note = 2'-O-methylguanosine-3'-phosphate
  modified_base 19: mod_base = OTHER; note = 2'-O-methylcytidine-3'-phosphate
  modified_base 20: mod_base = OTHER; note = 2'-O-methyluridine-3'-phosphate
  modified_base 21: mod_base = OTHER; note = 2'-O-methyladenosine-3'-phosphate ((2S,4R)-1-[29-[[2-(acetylamino)-2-deoxy-beta-D-galactopyra nosyl]oxy]-14,14-bis[[3-[[3-[[5-[[2-(acetylamino)-2-deoxy-b eta-D-galactopyranosyl]oxy]-1-oxopentyl]amino]propyl]amino] -3-oxopropoxy]methyl]-1,12,19,25-tetraoxo-16-oxa-13,20,24-t riazanonacos-1-yl]-4-hydroxy-2-pyrrolidinyl)methyl ester
cgaatgtttcatcattggcta

SEQ ID NO: 858 - RNA, 21 nt, synthetic construct
  source 1..21: mol_type = other RNA
  modified_base 1: mod_base = OTHER; note = 2'-O-methylcytidine-3'-phosphorothioate
  modified_base 2: mod_base = OTHER; note = 2'-O-methyluridine-3'-phosphorothioate
  modified_base 3: mod_base = OTHER; note = 2'-O-methylguanosine-3'-phosphate
  modified_base 4: mod_base = OTHER; note = 2'-O-methyluridine-3'-phosphate
  modified_base 5: mod_base = OTHER; note = 2'-O-methylguanosine-3'-phosphate
  modified_base 6: mod_base = OTHER; note = 2'-O-methyladenosine-3'-phosphate
  modified_base 7: mod_base = OTHER; note = 2'-deoxy-2'-fluorouridine-3'-phosphate
  modified_base 8: mod_base = OTHER; note = 2'-O-methyluridine-3'-phosphate
  modified_base 9: mod_base = OTHER; note = 2'-deoxy-2'-fluoroguanosine-3'-phosphate
  modified_base 10: mod_base = OTHER; note = 2'-deoxy-2'-fluoroadenosine-3'-phosphate
  modified_base 11: mod_base = OTHER; note = 2'-deoxy-2'-fluoroguanosine-3'-phosphate
  modified_base 12: mod_base = OTHER; note = 2'-O-methyladenosine-3'-phosphate
  modified_base 13: mod_base = OTHER; note = 2'-O-methyladenosine-3'-phosphate
  modified_base 14: mod_base = OTHER; note = 2'-O-methyluridine-3'-phosphate
  modified_base 15: mod_base = OTHER; note = 2'-O-methyladenosine-3'-phosphate
  modified_base 16: mod_base = OTHER; note = 2'-O-methyladenosine-3'-phosphate
  modified_base 17: mod_base = OTHER; note = 2'-O-methyladenosine-3'-phosphate
  modified_base 18: mod_base = OTHER; note = 2'-O-methylguanosine-3'-phosphate
  modified_base 19: mod_base = OTHER; note = 2'-O-methyluridine-3'-phosphate
  modified_base 20: mod_base = OTHER; note = 2'-O-methylguanosine-3'-phosphate
  modified_base 21: mod_base = OTHER; note = 2'-O-methyladenosine-3'-phosphate ((2S,4R)-1-[29-[[2-(acetylamino)-2-deoxy-beta-D-galactopyra nosyl]oxy]-14,14-bis[[3-[[3-[[5-[[2-(acetylamino)-2-deoxy-b eta-D-galactopyranosyl]oxy]-1-oxopentyl]amino]propyl]amino] -3-oxopropoxy]methyl]-1,12,19,25-tetraoxo-16-oxa-13,20,24-t riazanonacos-1-yl]-4-hydroxy-2-pyrrolidinyl)methyl ester
ctgtgattgagaataaagtga

SEQ ID NO: 859 - RNA, 21 nt, synthetic construct
  source 1..21: mol_type = other RNA
  modified_base 1: mod_base = OTHER; note = 2'-O-methyluridine-3'-phosphorothioate
  modified_base 2: mod_base = OTHER; note = 2'-O-methylguanosine-3'-phosphorothioate
  modified_base 3: mod_base = OTHER; note = 2'-O-methyluridine-3'-phosphate
  modified_base 4: mod_base = OTHER; note = 2'-O-methylguanosine-3'-phosphate
  modified_base 5: mod_base = OTHER; note = 2'-O-methyladenosine-3'-phosphate
  modified_base 6: mod_base = OTHER; note = 2'-O-methyluridine-3'-phosphate
  modified_base 7: mod_base = OTHER; note = 2'-deoxy-2'-fluorouridine-3'-phosphate
  modified_base 8: mod_base = OTHER; note = 2'-O-methylguanosine-3'-phosphate
  modified_base 9: mod_base = OTHER; note = 2'-deoxy-2'-fluoroadenosine-3'-phosphate
  modified_base 10: mod_base = OTHER; note = 2'-deoxy-2'-fluoroguanosine-3'-phosphate
  modified_base 11: mod_base = OTHER; note = 2'-deoxy-2'-fluoroadenosine-3'-phosphate
  modified_base 12: mod_base = OTHER; note = 2'-O-methyladenosine-3'-phosphate
  modified_base 13: mod_base = OTHER; note = 2'-O-methyluridine-3'-phosphate
  modified_base 14: mod_base = OTHER; note = 2'-O-methyladenosine-3'-phosphate
  modified_base 15: mod_base = OTHER; note = 2'-O-methyladenosine-3'-phosphate
  modified_base 16: mod_base = OTHER; note = 2'-O-methyladenosine-3'-phosphate
  modified_base 17: mod_base = OTHER; note = 2'-O-methylguanosine-3'-phosphate
  modified_base 18: mod_base = OTHER; note = 2'-O-methyluridine-3'-phosphate
  modified_base 19: mod_base = OTHER; note = 2'-O-methylguanosine-3'-phosphate
  modified_base 20: mod_base = OTHER; note = 2'-O-methyluridine-3'-phosphate
  modified_base 21: mod_base = OTHER; note = 2'-O-methyladenosine-3'-phosphate ((2S,4R)-1-[29-[[2-(acetylamino)-2-deoxy-beta-D-galactopyra nosyl]oxy]-14,14-bis[[3-[[3-[[5-[[2-(acetylamino)-2-deoxy-b eta-D-galactopyranosyl]oxy]-1-oxopentyl]amino]propyl]amino] -3-oxopropoxy]methyl]-1,12,19,25-tetraoxo-16-oxa-13,20,24-t riazanonacos-1-yl]-4-hydroxy-2-pyrrolidinyl)methyl ester
tgtgattgagaataaagtgta

SEQ ID NO: 860 - RNA, 21 nt, synthetic construct
  source 1..21: mol_type = other RNA
  modified_base 1: mod_base = OTHER; note = 2'-O-methylguanosine-3'-phosphorothioate
  modified_base 2: mod_base = OTHER; note = 2'-O-methyluridine-3'-phosphorothioate
  modified_base 3: mod_base = OTHER; note = 2'-O-methylguanosine-3'-phosphate
  modified_base 4: mod_base = OTHER; note = 2'-O-methyladenosine-3'-phosphate
  modified_base 5: mod_base = OTHER; note = 2'-O-methyluridine-3'-phosphate
  modified_base 6: mod_base = OTHER; note = 2'-O-methyluridine-3'-phosphate
  modified_base 7: mod_base = OTHER; note = 2'-deoxy-2'-fluoroguanosine-3'-phosphate
  modified_base 8: mod_base = OTHER; note = 2'-O-methyladenosine-3'-phosphate
  modified_base 9: mod_base = OTHER; note = 2'-deoxy-2'-fluoroguanosine-3'-phosphate
  modified_base 10: mod_base = OTHER; note = 2'-deoxy-2'-fluoroadenosine-3'-phosphate
  modified_base 11: mod_base = OTHER; note = 2'-deoxy-2'-fluoroadenosine-3'-phosphate
  modified_base 12: mod_base = OTHER; note = 2'-O-methyluridine-3'-phosphate
  modified_base 13: mod_base = OTHER; note = 2'-O-methyladenosine-3'-phosphate
  modified_base 14: mod_base = OTHER; note = 2'-O-methyladenosine-3'-phosphate
  modified_base 15: mod_base = OTHER; note = 2'-O-methyladenosine-3'-phosphate
  modified_base 16: mod_base = OTHER; note = 2'-O-methylguanosine-3'-phosphate
  modified_base 17: mod_base = OTHER; note = 2'-O-methyluridine-3'-phosphate
  modified_base 18: mod_base = OTHER; note = 2'-O-methylguanosine-3'-phosphate
  modified_base 19: mod_base = OTHER; note = 2'-O-methyluridine-3'-phosphate
  modified_base 20: mod_base = OTHER; note = 2'-O-methylguanosine-3'-phosphate
  modified_base 21: mod_base = OTHER; note = 2'-O-methyladenosine-3'-phosphate ((2S,4R)-1-[29-[[2-(acetylamino)-2-deoxy-beta-D-galactopyra nosyl]oxy]-14,14-bis[[3-[[3-[[5-[[2-(acetylamino)-2-deoxy-b eta-D-galactopyranosyl]oxy]-1-oxopentyl]amino]propyl]amino] -3-oxopropoxy]methyl]-1,12,19,25-tetraoxo-16-oxa-13,20,24-t riazanonacos-1-yl]-4-hydroxy-2-pyrrolidinyl)methyl ester
gtgattgagaataaagtgtga

SEQ ID NO: 861 - RNA, 21 nt, synthetic construct
  source 1..21: mol_type = other RNA
  modified_base 1: mod_base = OTHER; note = 2'-O-methyluridine-3'-phosphorothioate
  modified_base 2: mod_base = OTHER; note = 2'-O-methylguanosine-3'-phosphorothioate
  modified_base 3: mod_base = OTHER; note = 2'-O-methyladenosine-3'-phosphate
  modified_base 4: mod_base = OTHER; note = 2'-O-methyluridine-3'-phosphate
  modified_base 5: mod_base = OTHER; note = 2'-O-methyluridine-3'-phosphate
  modified_base 6: mod_base = OTHER; note = 2'-O-methylguanosine-3'-phosphate
  modified_base 7: mod_base = OTHER; note = 2'-deoxy-2'-fluoroadenosine-3'-phosphate
  modified_base 8: mod_base = OTHER; note = 2'-O-methylguanosine-3'-phosphate
  modified_base 9: mod_base = OTHER; note = 2'-deoxy-2'-fluoroadenosine-3'-phosphate
  modified_base 10: mod_base = OTHER; note = 2'-deoxy-2'-fluoroadenosine-3'-phosphate
  modified_base 11: mod_base = OTHER; note = 2'-deoxy-2'-fluorouridine-3'-phosphate
  modified_base 12: mod_base = OTHER; note = 2'-O-methyladenosine-3'-phosphate
  modified_base 13: mod_base = OTHER; note = 2'-O-methyladenosine-3'-phosphate
  modified_base 14: mod_base = OTHER; note = 2'-O-methyladenosine-3'-phosphate
  modified_base 15: mod_base = OTHER; note = 2'-O-methylguanosine-3'-phosphate
  modified_base 16: mod_base = OTHER; note = 2'-O-methyluridine-3'-phosphate
  modified_base 17: mod_base = OTHER; note = 2'-O-methylguanosine-3'-phosphate
  modified_base 18: mod_base = OTHER; note = 2'-O-methyluridine-3'-phosphate
  modified_base 19: mod_base = OTHER; note = 2'-O-methylguanosine-3'-phosphate
  modified_base 20: mod_base = OTHER; note = 2'-O-methylcytidine-3'-phosphate
  modified_base 21: mod_base = OTHER; note = 2'-O-methyladenosine-3'-phosphate ((2S,4R)-1-[29-[[2-(acetylamino)-2-deoxy-beta-D-galactopyra nosyl]oxy]-14,14-bis[[3-[[3-[[5-[[2-(acetylamino)-2-deoxy-b eta-D-galactopyranosyl]oxy]-1-oxopentyl]amino]propyl]amino] -3-oxopropoxy]methyl]-1,12,19,25-tetraoxo-16-oxa-13,20,24-t riazanonacos-1-yl]-4-hydroxy-2-pyrrolidinyl)methyl ester
tgattgagaataaagtgtgca

SEQ ID NO: 862 - RNA, 21 nt, synthetic construct
  source 1..21: mol_type = other RNA
  modified_base 1: mod_base = OTHER; note = 2'-O-methylguanosine-3'-phosphorothioate
  modified_base 2: mod_base = OTHER; note = 2'-O-methyladenosine-3'-phosphorothioate
  modified_base 3: mod_base = OTHER; note = 2'-O-methyluridine-3'-phosphate
  modified_base 4: mod_base = OTHER; note = 2'-O-methyluridine-3'-phosphate
  modified_base 5: mod_base = OTHER; note = 2'-O-methylguanosine-3'-phosphate
  modified_base 6: mod_base = OTHER; note = 2'-O-methyladenosine-3'-phosphate
  modified_base 7: mod_base = OTHER; note = 2'-deoxy-2'-fluoroguanosine-3'-phosphate
  modified_base 8: mod_base = OTHER; note = 2'-O-methyladenosine-3'-phosphate
  modified_base 9: mod_base = OTHER; note = 2'-deoxy-2'-fluoroadenosine-3'-phosphate
  modified_base 10: mod_base = OTHER; note = 2'-deoxy-2'-fluorouridine-3'-phosphate
  modified_base 11: mod_base = OTHER; note = 2'-deoxy-2'-fluoroadenosine-3'-phosphate
  modified_base 12: mod_base = OTHER; note = 2'-O-methyladenosine-3'-phosphate
  modified_base 13: mod_base = OTHER; note = 2'-O-methyladenosine-3'-phosphate
  modified_base 14: mod_base = OTHER; note = 2'-O-methylguanosine-3'-phosphate
  modified_base 15: mod_base = OTHER; note = 2'-O-methyluridine-3'-phosphate
  modified_base 16: mod_base = OTHER; note = 2'-O-methylguanosine-3'-phosphate
  modified_base 17: mod_base = OTHER; note = 2'-O-methyluridine-3'-phosphate
  modified_base 18: mod_base = OTHER; note = 2'-O-methylguanosine-3'-phosphate
  modified_base 19: mod_base = OTHER; note = 2'-O-methylcytidine-3'-phosphate
  modified_base 20: mod_base = OTHER; note = 2'-O-methyladenosine-3'-phosphate
  modified_base 21: mod_base = OTHER; note = 2'-O-methyladenosine-3'-phosphate ((2S,4R)-1-[29-[[2-(acetylamino)-2-deoxy-beta-D-galactopyra nosyl]oxy]-14,14-bis[[3-[[3-[[5-[[2-(acetylamino)-2-deoxy-b eta-D-galactopyranosyl]oxy]-1-oxopentyl]amino]propyl]amino] -3-oxopropoxy]methyl]-1,12,19,25-tetraoxo-16-oxa-13,20,24-t riazanonacos-1-yl]-4-hydroxy-2-pyrrolidinyl)methyl ester
gattgagaataaagtgtgcaa

SEQ ID NO: 863 - RNA, 21 nt, synthetic construct
  source 1..21: mol_type = other RNA
  modified_base 1: mod_base = OTHER; note = 2'-O-methylguanosine-3'-phosphorothioate
  modified_base 2: mod_base = OTHER; note = 2'-O-methyladenosine-3'-phosphorothioate
  modified_base 3: mod_base = OTHER; note = 2'-O-methyluridine-3'-phosphate
  modified_base 4: mod_base = OTHER; note = 2'-O-methyluridine-3'-phosphate
  modified_base 5: mod_base = OTHER; note = 2'-O-methylguanosine-3'-phosphate
  modified_base 6: mod_base = OTHER; note = 2'-O-methyladenosine-3'-phosphate
  modified_base 7: mod_base = OTHER; note = 2'-deoxy-2'-fluoroguanosine-3'-phosphate
  modified_base 8: mod_base = OTHER; note = 2'-O-methyladenosine-3'-phosphate
  modified_base 9: mod_base = OTHER; note = 2'-deoxy-2'-fluoroadenosine-3'-phosphate
  modified_base 10: mod_base = OTHER; note = 2'-deoxy-2'-fluorouridine-3'-phosphate
  modified_base 11: mod_base = OTHER; note = 2'-deoxy-2'-fluoroadenosine-3'-phosphate
  modified_base 12: mod_base = OTHER; note = 2'-O-methyladenosine-3'-phosphate
  modified_base 13: mod_base = OTHER; note = 2'-O-methyladenosine-3'-phosphate
  modified_base 14: mod_base = OTHER; note = 2'-O-methylguanosine-3'-phosphate
  modified_base 15: mod_base = OTHER; note = 2'-O-methyluridine-3'-phosphate
  modified_base 16: mod_base = OTHER; note = 2'-O-methyluridine-3'-phosphate
  modified_base 17: mod_base = OTHER; note = 2'-O-methyluridine-3'-phosphate
  modified_base 18: mod_base = OTHER; note = 2'-O-methylguanosine-3'-phosphate
  modified_base 19: mod_base = OTHER; note = 2'-O-methylcytidine-3'-phosphate
  modified_base 20: mod_base = OTHER; note = 2'-O-methyladenosine-3'-phosphate
  modified_base 21: mod_base = OTHER; note = 2'-O-methyladenosine-3'-phosphate ((2S,4R)-1-[29-[[2-(acetylamino)-2-deoxy-beta-D-galactopyra nosyl]oxy]-14,14-bis[[3-[[3-[[5-[[2-(acetylamino)-2-deoxy-b eta-D-galactopyranosyl]oxy]-1-oxopentyl]amino]propyl]amino] -3-oxopropoxy]methyl]-1,12,19,25-tetraoxo-16-oxa-13,20,24-t riazanonacos-1-yl]-4-hydroxy-2-pyrrolidinyl)methyl ester
gattgagaataaagtttgcaa

SEQ ID NO: 864 - RNA, 21 nt, synthetic construct
  source 1..21: mol_type = other RNA
  modified_base 1: mod_base = OTHER; note = 2'-O-methyluridine-3'-phosphorothioate
  modified_base 2: mod_base = OTHER; note = 2'-O-methyluridine-3'-phosphorothioate
  modified_base 3: mod_base = OTHER; note = 2'-O-methylguanosine-3'-phosphate
  modified_base 4: mod_base = OTHER; note = 2'-O-methyladenosine-3'-phosphate
  modified_base 5: mod_base = OTHER; note = 2'-O-methylguanosine-3'-phosphate
  modified_base 6: mod_base = OTHER; note = 2'-O-methyladenosine-3'-phosphate
  modified_base 7: mod_base = OTHER; note = 2'-deoxy-2'-fluoroadenosine-3'-phosphate
  modified_base 8: mod_base = OTHER; note = 2'-O-methyluridine-3'-phosphate
  modified_base 9: mod_base = OTHER; note = 2'-deoxy-2'-fluoroadenosine-3'-phosphate
  modified_base 10: mod_base = OTHER; note = 2'-deoxy-2'-fluoroadenosine-3'-phosphate
  modified_base 11: mod_base = OTHER; note = 2'-deoxy-2'-fluoroadenosine-3'-phosphate
  modified_base 12: mod_base = OTHER; note = 2'-O-methylguanosine-3'-phosphate
  modified_base 13: mod_base = OTHER; note = 2'-O-methyluridine-3'-phosphate
  modified_base 14: mod_base = OTHER; note = 2'-O-methylguanosine-3'-phosphate
  modified_base 15: mod_base = OTHER; note = 2'-O-methyluridine-3'-phosphate
  modified_base 16: mod_base = OTHER; note = 2'-O-methylguanosine-3'-phosphate
  modified_base 17: mod_base = OTHER; note = 2'-O-methylcytidine-3'-phosphate
  modified_base 18: mod_base = OTHER; note = 2'-O-methyladenosine-3'-phosphate
  modified_base 19: mod_base = OTHER; note = 2'-O-methyladenosine-3'-phosphate
  modified_base 20: mod_base = OTHER; note = 2'-O-methyluridine-3'-phosphate
  modified_base 21: mod_base = OTHER; note = 2'-O-methyladenosine-3'-phosphate ((2S,4R)-1-[29-[[2-(acetylamino)-2-deoxy-beta-D-galactopyra nosyl]oxy]-14,14-bis[[3-[[3-[[5-[[2-(acetylamino)-2-deoxy-b eta-D-galactopyranosyl]oxy]-1-oxopentyl]amino]propyl]amino] -3-oxopropoxy]methyl]-1,12,19,25-tetraoxo-16-oxa-13,20,24-t riazanonacos-1-yl]-4-hydroxy-2-pyrrolidinyl)methyl ester
ttgagaataaagtgtgcaata

SEQ ID NO: 865 - RNA, 21 nt, synthetic construct
  source 1..21: mol_type = other RNA
  modified_base 1: mod_base = OTHER; note = 2'-O-methyluridine-3'-phosphorothioate
  modified_base 2: mod_base = OTHER; note = 2'-O-methyluridine-3'-phosphorothioate
  modified_base 3: mod_base = OTHER; note = 2'-O-methylguanosine-3'-phosphate
  modified_base 4: mod_base = OTHER; note = 2'-O-methyladenosine-3'-phosphate
  modified_base 5: mod_base = OTHER; note = 2'-O-methylguanosine-3'-phosphate
  modified_base 6: mod_base = OTHER; note = 2'-O-methyladenosine-3'-phosphate
  modified_base 7: mod_base = OTHER; note = 2'-deoxy-2'-fluoroadenosine-3'-phosphate
  modified_base 8: mod_base = OTHER; note = 2'-O-methyluridine-3'-phosphate
  modified_base 9: mod_base = OTHER; note = 2'-deoxy-2'-fluoroadenosine-3'-phosphate
  modified_base 10: mod_base = OTHER; note = 2'-deoxy-2'-fluoroadenosine-3'-phosphate
  modified_base 11: mod_base = OTHER; note = 2'-deoxy-2'-fluoroadenosine-3'-phosphate
  modified_base 12: mod_base = OTHER; note = 2'-O-methylguanosine-3'-phosphate
  modified_base 13: mod_base = OTHER; note = 2'-O-methyluridine-3'-phosphate
  modified_base 14: mod_base = OTHER; note = 2'-O-methylguanosine-3'-phosphate
  modified_base 15: mod_base = OTHER; note = 2'-O-methyluridine-3'-phosphate
  modified_base 16: mod_base = OTHER; note = 2'-O-methyluridine-3'-phosphate
  modified_base 17: mod_base = OTHER; note = 2'-O-methylcytidine-3'-phosphate
  modified_base 18: mod_base = OTHER; note = 2'-O-methyladenosine-3'-phosphate
  modified_base 19: mod_base = OTHER; note = 2'-O-methyladenosine-3'-phosphate
  modified_base 20: mod_base = OTHER; note = 2'-O-methyluridine-3'-phosphate
  modified_base 21: mod_base = OTHER; note = 2'-O-methyladenosine-3'-phosphate ((2S,4R)-1-[29-[[2-(acetylamino)-2-deoxy-beta-D-galactopyra nosyl]oxy]-14,14-bis[[3-[[3-[[5-[[2-(acetylamino)-2-deoxy-b eta-D-galactopyranosyl]oxy]-1-oxopentyl]amino]propyl]amino] -3-oxopropoxy]methyl]-1,12,19,25-tetraoxo-16-oxa-13,20,24-t riazanonacos-1-yl]-4-hydroxy-2-pyrrolidinyl)methyl ester
ttgagaataaagtgttcaata

SEQ ID NO: 866 - RNA, 21 nt, synthetic construct
  source 1..21: mol_type = other RNA
  modified_base 1: mod_base = OTHER; note = 2'-O-methylguanosine-3'-phosphorothioate
  modified_base 2: mod_base = OTHER; note = 2'-O-methyladenosine-3'-phosphorothioate
  modified_base 3: mod_base = OTHER; note = 2'-O-methylguanosine-3'-phosphate
  modified_base 4: mod_base = OTHER; note = 2'-O-methyladenosine-3'-phosphate
  modified_base 5: mod_base = OTHER; note = 2'-O-methyladenosine-3'-phosphate
  modified_base 6: mod_base = OTHER; note = 2'-O-methyluridine-3'-phosphate
  modified_base 7: mod_base = OTHER; note = 2'-deoxy-2'-fluoroadenosine-3'-phosphate
  modified_base 8: mod_base = OTHER; note = 2'-O-methyladenosine-3'-phosphate
  modified_base 9: mod_base = OTHER; note = 2'-deoxy-2'-fluoroadenosine-3'-phosphate
  modified_base 10: mod_base = OTHER; note = 2'-deoxy-2'-fluoroguanosine-3'-phosphate
  modified_base 11: mod_base = OTHER; note = 2'-deoxy-2'-fluorouridine-3'-phosphate
  modified_base 12: mod_base = OTHER; note = 2'-O-methylguanosine-3'-phosphate
  modified_base 13: mod_base = OTHER; note = 2'-O-methyluridine-3'-phosphate
  modified_base 14: mod_base = OTHER; note = 2'-O-methylguanosine-3'-phosphate
  modified_base 15: mod_base = OTHER; note = 2'-O-methylcytidine-3'-phosphate
  modified_base 16: mod_base = OTHER; note = 2'-O-methyladenosine-3'-phosphate
  modified_base 17: mod_base = OTHER; note = 2'-O-methyladenosine-3'-phosphate
  modified_base 18: mod_base = OTHER; note = 2'-O-methyluridine-3'-phosphate
  modified_base 19: mod_base = OTHER; note = 2'-O-methylcytidine-3'-phosphate
  modified_base 20: mod_base = OTHER; note = 2'-O-methylguanosine-3'-phosphate
  modified_base 21: mod_base = OTHER; note = 2'-O-methyladenosine-3'-phosphate ((2S,4R)-1-[29-[[2-(acetylamino)-2-deoxy-beta-D-galactopyra nosyl]oxy]-14,14-bis[[3-[[3-[[5-[[2-(acetylamino)-2-deoxy-b eta-D-galactopyranosyl]oxy]-1-oxopentyl]amino]propyl]amino] -3-oxopropoxy]methyl]-1,12,19,25-tetraoxo-16-oxa-13,20,24-t riazanonacos-1-yl]-4-hydroxy-2-pyrrolidinyl)methyl ester
gagaataaagtgtgcaatcga

SEQ ID NO: 867 - RNA, 21 nt, synthetic construct
  source 1..21: mol_type = other RNA
  modified_base 1: mod_base = OTHER; note = 2'-O-methylguanosine-3'-phosphorothioate
  modified_base 2: mod_base = OTHER; note = 2'-O-methyladenosine-3'-phosphorothioate
  modified_base 3: mod_base = OTHER; note = 2'-O-methylguanosine-3'-phosphate
  modified_base 4: mod_base = OTHER; note = 2'-O-methyladenosine-3'-phosphate
  modified_base 5: mod_base = OTHER; note = 2'-O-methyladenosine-3'-phosphate
  modified_base 6: mod_base = OTHER; note = 2'-O-methyluridine-3'-phosphate
  modified_base 7: mod_base = OTHER; note = 2'-deoxy-2'-fluoroadenosine-3'-phosphate
  modified_base 8: mod_base = OTHER; note = 2'-O-methyladenosine-3'-phosphate
  modified_base 9: mod_base = OTHER; note = 2'-deoxy-2'-fluoroadenosine-3'-phosphate
  modified_base 10: mod_base = OTHER; note = 2'-deoxy-2'-fluoroguanosine-3'-phosphate
  modified_base 11: mod_base = OTHER; note = 2'-deoxy-2'-fluorouridine-3'-phosphate
  modified_base 12: mod_base = OTHER; note = 2'-O-methylguanosine-3'-phosphate
  modified_base 13: mod_base = OTHER; note = 2'-O-methyluridine-3'-phosphate
  modified_base 14: mod_base = OTHER; note = 2'-O-methylguanosine-3'-phosphate
  modified_base 15: mod_base = OTHER; note = 2'-O-methyluridine-3'-phosphate
  modified_base 16: mod_base = OTHER; note = 2'-O-methyladenosine-3'-phosphate
  modified_base 17: mod_base = OTHER; note = 2'-O-methyladenosine-3'-phosphate
  modified_base 18: mod_base = OTHER; note = 2'-O-methyluridine-3'-phosphate
  modified_base 19: mod_base = OTHER; note = 2'-O-methylcytidine-3'-phosphate
  modified_base 20: mod_base = OTHER; note = 2'-O-methylguanosine-3'-phosphate
  modified_base 21: mod_base = OTHER; note = 2'-O-methyladenosine-3'-phosphate ((2S,4R)-1-[29-[[2-(acetylamino)-2-deoxy-beta-D-galactopyra nosyl]oxy]-14,14-bis[[3-[[3-[[5-[[2-(acetylamino)-2-deoxy-b eta-D-galactopyranosyl]oxy]-1-oxopentyl]amino]propyl]amino] -3-oxopropoxy]methyl]-1,12,19,25-tetraoxo-16-oxa-13,20,24-t riazanonacos-1-yl]-4-hydroxy-2-pyrrolidinyl)methyl ester
gagaataaagtgtgtaatcga

SEQ ID NO: 868 - RNA, 21 nt, synthetic construct
  source 1..21: mol_type = other RNA
  modified_base 1: mod_base = OTHER; note = 2'-O-methylguanosine-3'-phosphorothioate
  modified_base 2: mod_base = OTHER; note = 2'-O-methyladenosine-3'-phosphorothioate
  modified_base 3: mod_base = OTHER; note = 2'-O-methyladenosine-3'-phosphate
  modified_base 4: mod_base = OTHER; note = 2'-O-methyluridine-3'-phosphate
  modified_base 5: mod_base = OTHER; note = 2'-O-methyladenosine-3'-phosphate
  modified_base 6: mod_base = OTHER; note = 2'-O-methyladenosine-3'-phosphate
  modified_base 7: mod_base = OTHER; note = 2'-deoxy-2'-fluoroadenosine-3'-phosphate
  modified_base 8: mod_base = OTHER; note = 2'-O-methylguanosine-3'-phosphate
  modified_base 9: mod_base = OTHER; note = 2'-deoxy-2'-fluorouridine-3'-phosphate
  modified_base 10: mod_base = OTHER; note = 2'-deoxy-2'-fluoroguanosine-3'-phosphate
  modified_base 11: mod_base = OTHER; note = 2'-deoxy-2'-fluorouridine-3'-phosphate
  modified_base 12: mod_base = OTHER; note = 2'-O-methylguanosine-3'-phosphate
  modified_base 13: mod_base = OTHER; note = 2'-O-methylcytidine-3'-phosphate
  modified_base 14: mod_base = OTHER; note = 2'-O-methyladenosine-3'-phosphate
  modified_base 15: mod_base = OTHER; note = 2'-O-methyladenosine-3'-phosphate
  modified_base 16: mod_base = OTHER; note = 2'-O-methyluridine-3'-phosphate
  modified_base 17: mod_base = OTHER; note = 2'-O-methylcytidine-3'-phosphate
  modified_base 18: mod_base = OTHER; note = 2'-O-methylguanosine-3'-phosphate
  modified_base 19: mod_base = OTHER; note = 2'-O-methylcytidine-3'-phosphate
  modified_base 20: mod_base = OTHER; note = 2'-O-methyluridine-3'-phosphate
  modified_base 21: mod_base = OTHER; note = 2'-O-methyladenosine-3'-phosphate ((2S,4R)-1-[29-[[2-(acetylamino)-2-deoxy-beta-D-galactopyra nosyl]oxy]-14,14-bis[[3-[[3-[[5-[[2-(acetylamino)-2-deoxy-b eta-D-galactopyranosyl]oxy]-1-oxopentyl]amino]propyl]amino] -3-oxopropoxy]methyl]-1,12,19,25-tetraoxo-16-oxa-13,20,24-t riazanonacos-1-yl]-4-hydroxy-2-pyrrolidinyl)methyl ester
gaataaagtgtgcaatcgcta

SEQ ID NO: 869 - RNA, 21 nt, synthetic construct
  source 1..21: mol_type = other RNA
  modified_base 1: mod_base = OTHER; note = 2'-O-methyladenosine-3'-phosphorothioate
  modified_base 2: mod_base = OTHER; note = 2'-O-methyladenosine-3'-phosphorothioate
  modified_base 3: mod_base = OTHER; note = 2'-O-methyluridine-3'-phosphate
  modified_base 4: mod_base = OTHER; note = 2'-O-methyladenosine-3'-phosphate
  modified_base 5: mod_base = OTHER; note = 2'-O-methyladenosine-3'-phosphate
  modified_base 6: mod_base = OTHER; note = 2'-O-methyladenosine-3'-phosphate
  modified_base 7: mod_base = OTHER; note = 2'-deoxy-2'-fluoroguanosine-3'-phosphate
  modified_base 8: mod_base = OTHER; note = 2'-O-methyluridine-3'-phosphate
  modified_base 9: mod_base = OTHER; note = 2'-deoxy-2'-fluoroguanosine-3'-phosphate
  modified_base 10: mod_base = OTHER; note = 2'-deoxy-2'-fluorouridine-3'-phosphate
  modified_base 11: mod_base = OTHER; note = 2'-deoxy-2'-fluoroguanosine-3'-phosphate
  modified_base 12: mod_base = OTHER; note = 2'-O-methylcytidine-3'-phosphate
  modified_base 13: mod_base = OTHER; note = 2'-O-methyladenosine-3'-phosphate
  modified_base 14: mod_base = OTHER; note = 2'-O-methyladenosine-3'-phosphate
  modified_base 15: mod_base = OTHER; note = 2'-O-methyluridine-3'-phosphate
  modified_base 16: mod_base = OTHER; note = 2'-O-methylcytidine-3'-phosphate
  modified_base 17: mod_base = OTHER; note = 2'-O-methylguanosine-3'-phosphate
  modified_base 18: mod_base = OTHER; note = 2'-O-methylcytidine-3'-phosphate
  modified_base 19: mod_base = OTHER; note = 2'-O-methyluridine-3'-phosphate
  modified_base 20: mod_base = OTHER; note = 2'-O-methyladenosine-3'-phosphate
  modified_base 21: mod_base = OTHER; note = 2'-O-methyladenosine-3'-phosphate ((2S,4R)-1-[29-[[2-(acetylamino)-2-deoxy-beta-D-galactopyra nosyl]oxy]-14,14-bis[[3-[[3-[[5-[[2-(acetylamino)-2-deoxy-b eta-D-galactopyranosyl]oxy]-1-oxopentyl]amino]propyl]amino] -3-oxopropoxy]methyl]-1,12,19,25-tetraoxo-16-oxa-13,20,24-t riazanonacos-1-yl]-4-hydroxy-2-pyrrolidinyl)methyl ester
aataaagtgtgcaatcgctaa

SEQ ID NO: 870 - RNA, 21 nt, synthetic construct
  source 1..21: mol_type = other RNA
  modified_base 1: mod_base = OTHER; note = 2'-O-methyluridine-3'-phosphorothioate
  modified_base 2: mod_base = OTHER; note = 2'-O-methyladenosine-3'-phosphorothioate
  modified_base 3: mod_base = OTHER; note = 2'-O-methyladenosine-3'-phosphate
  modified_base 4: mod_base = OTHER; note = 2'-O-methyladenosine-3'-phosphate
  modified_base 5: mod_base = OTHER; note = 2'-O-methylguanosine-3'-phosphate
  modified_base 6: mod_base = OTHER; note = 2'-O-methyluridine-3'-phosphate
  modified_base 7: mod_base = OTHER; note = 2'-deoxy-2'-fluoroguanosine-3'-phosphate
  modified_base 8: mod_base = OTHER; note = 2'-O-methyluridine-3'-phosphate
  modified_base 9: mod_base = OTHER; note = 2'-deoxy-2'-fluoroguanosine-3'-phosphate
  modified_base 10: mod_base = OTHER; note = 2'-deoxy-2'-fluorocytidine-3'-phosphate
  modified_base 11: mod_base = OTHER; note = 2'-deoxy-2'-fluoroadenosine-3'-phosphate
  modified_base 12: mod_base = OTHER; note = 2'-O-methyladenosine-3'-phosphate
  modified_base 13: mod_base = OTHER; note = 2'-O-methyluridine-3'-phosphate
  modified_base 14: mod_base = OTHER; note = 2'-O-methylcytidine-3'-phosphate
  modified_base 15: mod_base = OTHER; note = 2'-O-methylguanosine-3'-phosphate
  modified_base 16: mod_base = OTHER; note = 2'-O-methylcytidine-3'-phosphate
  modified_base 17: mod_base = OTHER; note = 2'-O-methyluridine-3'-phosphate
  modified_base 18: mod_base = OTHER; note = 2'-O-methyladenosine-3'-phosphate
  modified_base 19: mod_base = OTHER; note = 2'-O-methyluridine-3'-phosphate
  modified_base 20: mod_base = OTHER; note = 2'-O-methylguanosine-3'-phosphate
  modified_base 21: mod_base = OTHER; note = 2'-O-methyladenosine-3'-phosphate ((2S,4R)-1-[29-[[2-(acetylamino)-2-deoxy-beta-D-galactopyra nosyl]oxy]-14,14-bis[[3-[[3-[[5-[[2-(acetylamino)-2-deoxy-b eta-D-galactopyranosyl]oxy]-1-oxopentyl]amino]propyl]amino] -3-oxopropoxy]methyl]-1,12,19,25-tetraoxo-16-oxa-13,20,24-t riazanonacos-1-yl]-4-hydroxy-2-pyrrolidinyl)methyl ester
taaagtgtgcaatcgctatga

SEQ ID NO: 871 - RNA, 21 nt, synthetic construct
  source 1..21: mol_type = other RNA
  modified_base 1: mod_base = OTHER; note = 2'-O-methyladenosine-3'-phosphorothioate
  modified_base 2: mod_base = OTHER; note = 2'-O-methyladenosine-3'-phosphorothioate
  modified_base 3: mod_base = OTHER; note = 2'-O-methyladenosine-3'-phosphate
  modified_base 4: mod_base = OTHER; note = 2'-O-methylguanosine-3'-phosphate
  modified_base 5: mod_base = OTHER; note = 2'-O-methyluridine-3'-phosphate
  modified_base 6: mod_base = OTHER; note = 2'-O-methylguanosine-3'-phosphate
  modified_base 7: mod_base = OTHER; note = 2'-deoxy-2'-fluorouridine-3'-phosphate
  modified_base 8: mod_base = OTHER; note = 2'-O-methylguanosine-3'-phosphate
  modified_base 9: mod_base = OTHER; note = 2'-deoxy-2'-fluorocytidine-3'-phosphate
  modified_base 10: mod_base = OTHER; note = 2'-deoxy-2'-fluoroadenosine-3'-phosphate
  modified_base 11: mod_base = OTHER; note = 2'-deoxy-2'-fluoroadenosine-3'-phosphate
  modified_base 12: mod_base = OTHER; note = 2'-O-methyluridine-3'-phosphate
  modified_base 13: mod_base = OTHER; note = 2'-O-methylcytidine-3'-phosphate
  modified_base 14: mod_base = OTHER; note = 2'-O-methylguanosine-3'-phosphate
  modified_base 15: mod_base = OTHER; note = 2'-O-methylcytidine-3'-phosphate
  modified_base 16: mod_base = OTHER; note = 2'-O-methyluridine-3'-phosphate
  modified_base 17: mod_base = OTHER; note = 2'-O-methyladenosine-3'-phosphate
  modified_base 18: mod_base = OTHER; note = 2'-O-methyluridine-3'-phosphate
  modified_base 19: mod_base = OTHER; note = 2'-O-methylguanosine-3'-phosphate
  modified_base 20: mod_base = OTHER; note = 2'-O-methyladenosine-3'-phosphate
  modified_base 21: mod_base = OTHER; note = 2'-O-methyladenosine-3'-phosphate ((2S,4R)-1-[29-[[2-(acetylamino)-2-deoxy-beta-D-galactopyra nosyl]oxy]-14,14-bis[[3-[[3-[[5-[[2-(acetylamino)-2-deoxy-b eta-D-galactopyranosyl]oxy]-1-oxopentyl]amino]propyl]amino] -3-oxopropoxy]methyl]-1,12,19,25-tetraoxo-16-oxa-13,20,24-t riazanonacos-1-yl]-4-hydroxy-2-pyrrolidinyl)methyl ester
aaagtgtgcaatcgctatgaa

SEQ ID NO: 872 - RNA, 21 nt, synthetic construct
  source 1..21: mol_type = other RNA
  modified_base 1: mod_base = OTHER; note = 2'-O-methyladenosine-3'-phosphorothioate
  modified_base 2: mod_base = OTHER; note = 2'-O-methyladenosine-3'-phosphorothioate
  modified_base 3: mod_base = OTHER; note = 2'-O-methyladenosine-3'-phosphate
  modified_base 4: mod_base = OTHER; note = 2'-O-methylguanosine-3'-phosphate
  modified_base 5: mod_base = OTHER; note = 2'-O-methyluridine-3'-phosphate
  modified_base 6: mod_base = OTHER; note = 2'-O-methylguanosine-3'-phosphate
  modified_base 7: mod_base = OTHER; note = 2'-deoxy-2'-fluorouridine-3'-phosphate
  modified_base 8: mod_base = OTHER; note = 2'-O-methylguanosine-3'-phosphate
  modified_base 9: mod_base = OTHER; note = 2'-deoxy-2'-fluorocytidine-3'-phosphate
  modified_base 10: mod_base = OTHER; note = 2'-deoxy-2'-fluoroadenosine-3'-phosphate
  modified_base 11: mod_base = OTHER; note = 2'-deoxy-2'-fluoroadenosine-3'-phosphate
  modified_base 12: mod_base = OTHER; note = 2'-O-methyluridine-3'-phosphate
  modified_base 13: mod_base = OTHER; note = 2'-O-methylcytidine-3'-phosphate
  modified_base 14: mod_base = OTHER; note = 2'-O-methylguanosine-3'-phosphate
  modified_base 15: mod_base = OTHER; note = 2'-O-methyluridine-3'-phosphate
  modified_base 16: mod_base = OTHER; note = 2'-O-methyluridine-3'-phosphate
  modified_base 17: mod_base = OTHER; note = 2'-O-methyladenosine-3'-phosphate
  modified_base 18: mod_base = OTHER; note = 2'-O-methyluridine-3'-phosphate
  modified_base 19: mod_base = OTHER; note = 2'-O-methylguanosine-3'-phosphate
  modified_base 20: mod_base = OTHER; note = 2'-O-methyladenosine-3'-phosphate
  modified_base 21: mod_base = OTHER; note = 2'-O-methyladenosine-3'-phosphate ((2S,4R)-1-[29-[[2-(acetylamino)-2-deoxy-beta-D-galactopyra nosyl]oxy]-14,14-bis[[3-[[3-[[5-[[2-(acetylamino)-2-deoxy-b eta-D-galactopyranosyl]oxy]-1-oxopentyl]amino]propyl]amino] -3-oxopropoxy]methyl]-1,12,19,25-tetraoxo-16-oxa-13,20,24-t riazanonacos-1-yl]-4-hydroxy-2-pyrrolidinyl)methyl ester
aaagtgtgcaatcgttatgaa

SEQ ID NO: 873 - RNA, 21 nt, synthetic construct
  source 1..21: mol_type = other RNA
  modified_base 1: mod_base = OTHER; note = 2'-O-methyladenosine-3'-phosphorothioate
  modified_base 2: mod_base = OTHER; note = 2'-O-methyladenosine-3'-phosphorothioate
  modified_base 3: mod_base = OTHER; note = 2'-O-methylguanosine-3'-phosphate
  modified_base 4: mod_base = OTHER; note = 2'-O-methyluridine-3'-phosphate
  modified_base 5: mod_base = OTHER; note = 2'-O-methylguanosine-3'-phosphate
  modified_base 6: mod_base = OTHER; note = 2'-O-methyluridine-3'-phosphate
  modified_base 7: mod_base = OTHER; note = 2'-deoxy-2'-fluoroguanosine-3'-phosphate
  modified_base 8: mod_base = OTHER; note = 2'-O-methylcytidine-3'-phosphate
  modified_base 9: mod_base = OTHER; note = 2'-deoxy-2'-fluoroadenosine-3'-phosphate
  modified_base 10: mod_base = OTHER; note = 2'-deoxy-2'-fluoroadenosine-3'-phosphate
  modified_base 11: mod_base = OTHER; note = 2'-deoxy-2'-fluorouridine-3'-phosphate
  modified_base 12: mod_base = OTHER; note = 2'-O-methylcytidine-3'-phosphate
  modified_base 13: mod_base = OTHER; note = 2'-O-methylguanosine-3'-phosphate
  modified_base 14: mod_base = OTHER; note = 2'-O-methylcytidine-3'-phosphate
  modified_base 15: mod_base = OTHER; note = 2'-O-methyluridine-3'-phosphate
  modified_base 16: mod_base = OTHER; note = 2'-O-methyladenosine-3'-phosphate
  modified_base 17: mod_base = OTHER; note = 2'-O-methyluridine-3'-phosphate
  modified_base 18: mod_base = OTHER; note = 2'-O-methylguanosine-3'-phosphate
  modified_base 19: mod_base = OTHER; note = 2'-O-methyladenosine-3'-phosphate
  modified_base 20: mod_base = OTHER; note = 2'-O-methylguanosine-3'-phosphate
  modified_base 21: mod_base = OTHER; note = 2'-O-methyladenosine-3'-phosphate ((2S,4R)-1-[29-[[2-(acetylamino)-2-deoxy-beta-D-galactopyra nosyl]oxy]-14,14-bis[[3-[[3-[[5-[[2-(acetylamino)-2-deoxy-b eta-D-galactopyranosyl]oxy]-1-oxopentyl]amino]propyl]amino] -3-oxopropoxy]methyl]-1,12,19,25-tetraoxo-16-oxa-13,20,24-t riazanonacos-1-yl]-4-hydroxy-2-pyrrolidinyl)methyl ester
aagtgtgcaatcgctatgaga

SEQ ID NO: 874 - RNA, 21 nt, synthetic construct
  source 1..21: mol_type = other RNA
  modified_base 1: mod_base = OTHER; note = 2'-O-methyladenosine-3'-phosphorothioate
  modified_base 2: mod_base = OTHER; note = 2'-O-methylguanosine-3'-phosphorothioate
  modified_base 3: mod_base = OTHER; note = 2'-O-methyluridine-3'-phosphate
  modified_base 4: mod_base = OTHER; note = 2'-O-methylguanosine-3'-phosphate
  modified_base 5: mod_base = OTHER; note = 2'-O-methyluridine-3'-phosphate
  modified_base 6: mod_base = OTHER; note = 2'-O-methylguanosine-3'-phosphate
  modified_base 7: mod_base = OTHER; note = 2'-deoxy-2'-fluorocytidine-3'-phosphate
  modified_base 8: mod_base = OTHER; note = 2'-O-methyladenosine-3'-phosphate
  modified_base 9: mod_base = OTHER; note = 2'-deoxy-2'-fluoroadenosine-3'-phosphate
  modified_base 10: mod_base = OTHER; note = 2'-deoxy-2'-fluorouridine-3'-phosphate
  modified_base 11: mod_base = OTHER; note = 2'-deoxy-2'-fluorocytidine-3'-phosphate
  modified_base 12: mod_base = OTHER; note = 2'-O-methylguanosine-3'-phosphate
  modified_base 13: mod_base = OTHER; note = 2'-O-methylcytidine-3'-phosphate
  modified_base 14: mod_base = OTHER; note = 2'-O-methyluridine-3'-phosphate
  modified_base 15: mod_base = OTHER; note = 2'-O-methyladenosine-3'-phosphate
  modified_base 16: mod_base = OTHER; note = 2'-O-methyluridine-3'-phosphate
  modified_base 17: mod_base = OTHER; note = 2'-O-methylguanosine-3'-phosphate
  modified_base 18: mod_base = OTHER; note = 2'-O-methyladenosine-3'-phosphate
  modified_base 19: mod_base = OTHER; note = 2'-O-methylguanosine-3'-phosphate
  modified_base 20: mod_base = OTHER; note = 2'-O-methyluridine-3'-phosphate
  modified_base 21: mod_base = OTHER; note = 2'-O-methyladenosine-3'-phosphate ((2S,4R)-1-[29-[[2-(acetylamino)-2-deoxy-beta-D-galactopyra nosyl]oxy]-14,14-bis[[3-[[3-[[5-[[2-(acetylamino)-2-deoxy-b eta-D-galactopyranosyl]oxy]-1-oxopentyl]amino]propyl]amino] -3-oxopropoxy]methyl]-1,12,19,25-tetraoxo-16-oxa-13,20,24-t riazanonacos-1-yl]-4-hydroxy-2-pyrrolidinyl)methyl ester
agtgtgcaatcgctatgagta

SEQ ID NO: 875 - RNA, 21 nt, synthetic construct
  source 1..21: mol_type = other RNA
  modified_base 1: mod_base = OTHER; note = 2'-O-methylguanosine-3'-phosphorothioate
  modified_base 2: mod_base = OTHER; note = 2'-O-methyluridine-3'-phosphorothioate
  modified_base 3: mod_base = OTHER; note = 2'-O-methylguanosine-3'-phosphate
  modified_base 4: mod_base = OTHER; note = 2'-O-methyluridine-3'-phosphate
  modified_base 5: mod_base = OTHER; note = 2'-O-methylguanosine-3'-phosphate
  modified_base 6: mod_base = OTHER; note = 2'-O-methylcytidine-3'-phosphate
  modified_base 7: mod_base = OTHER; note = 2'-deoxy-2'-fluoroadenosine-3'-phosphate
  modified_base 8: mod_base = OTHER; note = 2'-O-methyladenosine-3'-phosphate
  modified_base 9: mod_base = OTHER; note = 2'-deoxy-2'-fluorouridine-3'-phosphate
  modified_base 10: mod_base = OTHER; note = 2'-deoxy-2'-fluorocytidine-3'-phosphate
  modified_base 11: mod_base = OTHER; note = 2'-deoxy-2'-fluoroguanosine-3'-phosphate
  modified_base 12: mod_base = OTHER; note = 2'-O-methylcytidine-3'-phosphate
  modified_base 13: mod_base = OTHER; note = 2'-O-methyluridine-3'-phosphate
  modified_base 14: mod_base = OTHER; note = 2'-O-methyladenosine-3'-phosphate
  modified_base 15: mod_base = OTHER; note = 2'-O-methyluridine-3'-phosphate
  modified_base 16: mod_base = OTHER; note = 2'-O-methylguanosine-3'-phosphate
  modified_base 17: mod_base = OTHER; note = 2'-O-methyladenosine-3'-phosphate
  modified_base 18: mod_base = OTHER; note = 2'-O-methylguanosine-3'-phosphate
  modified_base 19: mod_base = OTHER; note = 2'-O-methyluridine-3'-phosphate
  modified_base 20: mod_base = OTHER; note = 2'-O-methyluridine-3'-phosphate
  modified_base 21: mod_base = OTHER; note = 2'-O-methyladenosine-3'-phosphate ((2S,4R)-1-[29-[[2-(acetylamino)-2-deoxy-beta-D-galactopyra nosyl]oxy]-14,14-bis[[3-[[3-[[5-[[2-(acetylamino)-2-deoxy-b eta-D-galactopyranosyl]oxy]-1-oxopentyl]amino]propyl]amino] -3-oxopropoxy]methyl]-1,12,19,25-tetraoxo-16-oxa-13,20,24-t riazanonacos-1-yl]-4-hydroxy-2-pyrrolidinyl)methyl ester
gtgtgcaatcgctatgagtta

SEQ ID NO: 876 - RNA, 21 nt, synthetic construct
  source 1..21: mol_type = other RNA
  modified_base 1: mod_base = OTHER; note = 2'-O-methylguanosine-3'-phosphorothioate
  modified_base 2: mod_base = OTHER; note = 2'-O-methyluridine-3'-phosphorothioate
  modified_base 3: mod_base = OTHER; note = 2'-O-methylguanosine-3'-phosphate
  modified_base 4: mod_base = OTHER; note = 2'-O-methyluridine-3'-phosphate
  modified_base 5: mod_base = OTHER; note = 2'-O-methylguanosine-3'-phosphate
  modified_base 6: mod_base = OTHER; note = 2'-O-methylcytidine-3'-phosphate
  modified_base 7: mod_base = OTHER; note = 2'-deoxy-2'-fluoroadenosine-3'-phosphate
  modified_base 8: mod_base = OTHER; note = 2'-O-methyladenosine-3'-phosphate
  modified_base 9: mod_base = OTHER; note = 2'-deoxy-2'-fluorouridine-3'-phosphate
  modified_base 10: mod_base = OTHER; note = 2'-deoxy-2'-fluorocytidine-3'-phosphate
  modified_base 11: mod_base = OTHER; note = 2'-deoxy-2'-fluoroguanosine-3'-phosphate
  modified_base 12: mod_base = OTHER; note = 2'-O-methylcytidine-3'-phosphate
  modified_base 13: mod_base = OTHER; note = 2'-O-methyluridine-3'-phosphate
  modified_base 14: mod_base = OTHER; note = 2'-O-methyladenosine-3'-phosphate
  modified_base 15: mod_base = OTHER; note = 2'-O-methyluridine-3'-phosphate
  modified_base 16: mod_base = OTHER; note = 2'-O-methyluridine-3'-phosphate
  modified_base 17: mod_base = OTHER; note = 2'-O-methyladenosine-3'-phosphate
  modified_base 18: mod_base = OTHER; note = 2'-O-methylguanosine-3'-phosphate
  modified_base 19: mod_base = OTHER; note = 2'-O-methyluridine-3'-phosphate
  modified_base 20: mod_base = OTHER; note = 2'-O-methyluridine-3'-phosphate
  modified_base 21: mod_base = OTHER; note = 2'-O-methyladenosine-3'-phosphate ((2S,4R)-1-[29-[[2-(acetylamino)-2-deoxy-beta-D-galactopyra nosyl]oxy]-14,14-bis[[3-[[3-[[5-[[2-(acetylamino)-2-deoxy-b eta-D-galactopyranosyl]oxy]-1-oxopentyl]amino]propyl]amino] -3-oxopropoxy]methyl]-1,12,19,25-tetraoxo-16-oxa-13,20,24-t riazanonacos-1-yl]-4-hydroxy-2-pyrrolidinyl)methyl ester
gtgtgcaatcgctattagtta

SEQ ID NO: 877 - RNA, 21 nt, synthetic construct
  source 1..21: mol_type = other RNA
  modified_base 1: mod_base = OTHER; note = 2'-O-methyluridine-3'-phosphorothioate
  modified_base 2: mod_base = OTHER; note = 2'-O-methylguanosine-3'-phosphorothioate
  modified_base 3: mod_base = OTHER; note = 2'-O-methyluridine-3'-phosphate
  modified_base 4: mod_base = OTHER; note = 2'-O-methylguanosine-3'-phosphate
  modified_base 5: mod_base = OTHER; note = 2'-O-methylcytidine-3'-phosphate
  modified_base 6: mod_base = OTHER; note = 2'-O-methyladenosine-3'-phosphate
  modified_base 7: mod_base = OTHER; note = 2'-deoxy-2'-fluoroadenosine-3'-phosphate
  modified_base 8: mod_base = OTHER; note = 2'-O-methyluridine-3'-phosphate
  modified_base 9: mod_base = OTHER; note = 2'-deoxy-2'-fluorocytidine-3'-phosphate
  modified_base 10: mod_base = OTHER; note = 2'-deoxy-2'-fluoroguanosine-3'-phosphate
  modified_base 11: mod_base = OTHER; note = 2'-deoxy-2'-fluorocytidine-3'-phosphate
  modified_base 12: mod_base = OTHER; note = 2'-O-methyluridine-3'-phosphate
  modified_base 13: mod_base = OTHER; note = 2'-O-methyladenosine-3'-phosphate
  modified_base 14: mod_base = OTHER; note = 2'-O-methyluridine-3'-phosphate
  modified_base 15: mod_base = OTHER; note = 2'-O-methylguanosine-3'-phosphate
  modified_base 16: mod_base = OTHER; note = 2'-O-methyladenosine-3'-phosphate
  modified_base 17: mod_base = OTHER; note = 2'-O-methylguanosine-3'-phosphate
  modified_base 18: mod_base = OTHER; note = 2'-O-methyluridine-3'-phosphate
  modified_base 19: mod_base = OTHER; note = 2'-O-methyluridine-3'-phosphate
  modified_base 20: mod_base = OTHER; note = 2'-O-methyluridine-3'-phosphate
  modified_base 21: mod_base = OTHER; note = 2'-O-methyladenosine-3'-phosphate ((2S,4R)-1-[29-[[2-(acetylamino)-2-deoxy-beta-D-galactopyra nosyl]oxy]-14,14-bis[[3-[[3-[[5-[[2-(acetylamino)-2-deoxy-b eta-D-galactopyranosyl]oxy]-1-oxopentyl]amino]propyl]amino] -3-oxopropoxy]methyl]-1,12,19,25-tetraoxo-16-oxa-13,20,24-t riazanonacos-1-yl]-4-hydroxy-2-pyrrolidinyl)methyl ester
tgtgcaatcgctatgagttta

SEQ ID NO: 878 - RNA, 21 nt, synthetic construct
  source 1..21: mol_type = other RNA
  modified_base 1: mod_base = OTHER; note = 2'-O-methyluridine-3'-phosphorothioate
  modified_base 2: mod_base = OTHER; note = 2'-O-methylguanosine-3'-phosphorothioate
  modified_base 3: mod_base = OTHER; note = 2'-O-methyluridine-3'-phosphate
  modified_base 4: mod_base = OTHER; note = 2'-O-methylguanosine-3'-phosphate
  modified_base 5: mod_base = OTHER; note = 2'-O-methylcytidine-3'-phosphate
  modified_base 6: mod_base = OTHER; note = 2'-O-methyladenosine-3'-phosphate
  modified_base 7: mod_base = OTHER; note = 2'-deoxy-2'-fluoroadenosine-3'-phosphate
  modified_base 8: mod_base = OTHER; note = 2'-O-methyluridine-3'-phosphate
  modified_base 9: mod_base = OTHER; note = 2'-deoxy-2'-fluorocytidine-3'-phosphate
  modified_base 10: mod_base = OTHER; note = 2'-deoxy-2'-fluoroguanosine-3'-phosphate
  modified_base 11: mod_base = OTHER; note = 2'-deoxy-2'-fluorocytidine-3'-phosphate
  modified_base 12: mod_base = OTHER; note = 2'-O-methyluridine-3'-phosphate
  modified_base 13: mod_base = OTHER; note = 2'-O-methyladenosine-3'-phosphate
  modified_base 14: mod_base = OTHER; note = 2'-O-methyluridine-3'-phosphate
  modified_base 15: mod_base = OTHER; note = 2'-O-methyluridine-3'-phosphate
  modified_base 16: mod_base = OTHER; note = 2'-O-methyladenosine-3'-phosphate
  modified_base 17: mod_base = OTHER; note = 2'-O-methylguanosine-3'-phosphate
  modified_base 18: mod_base = OTHER; note = 2'-O-methyluridine-3'-phosphate
  modified_base 19: mod_base = OTHER; note = 2'-O-methyluridine-3'-phosphate
  modified_base 20: mod_base = OTHER; note = 2'-O-methyluridine-3'-phosphate
  modified_base 21: mod_base = OTHER; note = 2'-O-methyladenosine-3'-phosphate ((2S,4R)-1-[29-[[2-(acetylamino)-2-deoxy-beta-D-galactopyra nosyl]oxy]-14,14-bis[[3-[[3-[[5-[[2-(acetylamino)-2-deoxy-b eta-D-galactopyranosyl]oxy]-1-oxopentyl]amino]propyl]amino] -3-oxopropoxy]methyl]-1,12,19,25-tetraoxo-16-oxa-13,20,24-t riazanonacos-1-yl]-4-hydroxy-2-pyrrolidinyl)methyl ester
tgtgcaatcgctattagttta

SEQ ID NO: 879 - RNA, 21 nt, synthetic construct
  source 1..21: mol_type = other RNA
  modified_base 1: mod_base = OTHER; note = 2'-O-methylguanosine-3'-phosphorothioate
  modified_base 2: mod_base = OTHER; note = 2'-O-methyluridine-3'-phosphorothioate
  modified_base 3: mod_base = OTHER; note = 2'-O-methylguanosine-3'-phosphate
  modified_base 4: mod_base = OTHER; note = 2'-O-methylcytidine-3'-phosphate
  modified_base 5: mod_base = OTHER; note = 2'-O-methyladenosine-3'-phosphate
  modified_base 6: mod_base = OTHER; note = 2'-O-methyladenosine-3'-phosphate
  modified_base 7: mod_base = OTHER; note = 2'-deoxy-2'-fluorouridine-3'-phosphate
  modified_base 8: mod_base = OTHER; note = 2'-O-methylcytidine-3'-phosphate
  modified_base 9: mod_base = OTHER; note = 2'-deoxy-2'-fluoroguanosine-3'-phosphate
  modified_base 10: mod_base = OTHER; note = 2'-deoxy-2'-fluorocytidine-3'-phosphate
  modified_base 11: mod_base = OTHER; note = 2'-deoxy-2'-fluorouridine-3'-phosphate
  modified_base 12: mod_base = OTHER; note = 2'-O-methyladenosine-3'-phosphate
  modified_base 13: mod_base = OTHER; note = 2'-O-methyluridine-3'-phosphate
  modified_base 14: mod_base = OTHER; note = 2'-O-methylguanosine-3'-phosphate
  modified_base 15: mod_base = OTHER; note = 2'-O-methyladenosine-3'-phosphate
  modified_base 16: mod_base = OTHER; note = 2'-O-methylguanosine-3'-phosphate
  modified_base 17: mod_base = OTHER; note = 2'-O-methyluridine-3'-phosphate
  modified_base 18: mod_base = OTHER; note = 2'-O-methyluridine-3'-phosphate
  modified_base 19: mod_base = OTHER; note = 2'-O-methyluridine-3'-phosphate
  modified_base 20: mod_base = OTHER; note = 2'-O-methylcytidine-3'-phosphate
  modified_base 21: mod_base = OTHER; note = 2'-O-methyladenosine-3'-phosphate ((2S,4R)-1-[29-[[2-(acetylamino)-2-deoxy-beta-D-galactopyra nosyl]oxy]-14,14-bis[[3-[[3-[[5-[[2-(acetylamino)-2-deoxy-b eta-D-galactopyranosyl]oxy]-1-oxopentyl]amino]propyl]amino] -3-oxopropoxy]methyl]-1,12,19,25-tetraoxo-16-oxa-13,20,24-t riazanonacos-1-yl]-4-hydroxy-2-pyrrolidinyl)methyl ester
gtgcaatcgctatgagtttca

SEQ ID NO: 880 - RNA, 21 nt, synthetic construct
  source 1..21: mol_type = other RNA
  modified_base 1: mod_base = OTHER; note = 2'-O-methylguanosine-3'-phosphorothioate
  modified_base 2: mod_base = OTHER; note = 2'-O-methyluridine-3'-phosphorothioate
  modified_base 3: mod_base = OTHER; note = 2'-O-methylguanosine-3'-phosphate
  modified_base 4: mod_base = OTHER; note = 2'-O-methylcytidine-3'-phosphate
  modified_base 5: mod_base = OTHER; note = 2'-O-methyladenosine-3'-phosphate
  modified_base 6: mod_base = OTHER; note = 2'-O-methyladenosine-3'-phosphate
  modified_base 7: mod_base = OTHER; note = 2'-deoxy-2'-fluorouridine-3'-phosphate
  modified_base 8: mod_base = OTHER; note = 2'-O-methylcytidine-3'-phosphate
  modified_base 9: mod_base = OTHER; note = 2'-deoxy-2'-fluoroguanosine-3'-phosphate
  modified_base 10: mod_base = OTHER; note = 2'-deoxy-2'-fluorocytidine-3'-phosphate
  modified_base 11: mod_base = OTHER; note = 2'-deoxy-2'-fluorouridine-3'-phosphate
  modified_base 12: mod_base = OTHER; note = 2'-O-methyladenosine-3'-phosphate
  modified_base 13: mod_base = OTHER; note = 2'-O-methyluridine-3'-phosphate
  modified_base 14: mod_base = OTHER; note = 2'-O-methylguanosine-3'-phosphate
  modified_base 15: mod_base = OTHER; note = 2'-O-methyluridine-3'-phosphate
  modified_base 16: mod_base = OTHER; note = 2'-O-methylguanosine-3'-phosphate
  modified_base 17: mod_base = OTHER; note = 2'-O-methyluridine-3'-phosphate
  modified_base 18: mod_base = OTHER; note = 2'-O-methyluridine-3'-phosphate
  modified_base 19: mod_base = OTHER; note = 2'-O-methyluridine-3'-phosphate
  modified_base 20: mod_base = OTHER; note = 2'-O-methylcytidine-3'-phosphate
  modified_base 21: mod_base = OTHER; note = 2'-O-methyladenosine-3'-phosphate ((2S,4R)-1-[29-[[2-(acetylamino)-2-deoxy-beta-D-galactopyra nosyl]oxy]-14,14-bis[[3-[[3-[[5-[[2-(acetylamino)-2-deoxy-b eta-D-galactopyranosyl]oxy]-1-oxopentyl]amino]propyl]amino] -3-oxopropoxy]methyl]-1,12,19,25-tetraoxo-16-oxa-13,20,24-t riazanonacos-1-yl]-4-hydroxy-2-pyrrolidinyl)methyl ester
gtgcaatcgctatgtgtttca

SEQ ID NO: 881 - RNA, 21 nt, synthetic construct
  source 1..21: mol_type = other RNA
  modified_base 1: mod_base = OTHER; note = 2'-O-methyluridine-3'-phosphorothioate
  modified_base 2: mod_base = OTHER; note = 2'-O-methylguanosine-3'-phosphorothioate
  modified_base 3: mod_base = OTHER; note = 2'-O-methylcytidine-3'-phosphate
  modified_base 4: mod_base = OTHER; note = 2'-O-methyladenosine-3'-phosphate
  modified_base 5: mod_base = OTHER; note = 2'-O-methyladenosine-3'-phosphate
  modified_base 6: mod_base = OTHER; note = 2'-O-methyluridine-3'-phosphate
  modified_base 7: mod_base = OTHER; note = 2'-deoxy-2'-fluorocytidine-3'-phosphate
  modified_base 8: mod_base = OTHER; note = 2'-O-methylguanosine-3'-phosphate
  modified_base 9: mod_base = OTHER; note = 2'-deoxy-2'-fluorocytidine-3'-phosphate
  modified_base 10: mod_base = OTHER; note = 2'-deoxy-2'-fluorouridine-3'-phosphate
  modified_base 11: mod_base = OTHER; note = 2'-deoxy-2'-fluoroadenosine-3'-phosphate
  modified_base 12: mod_base = OTHER; note = 2'-O-methyluridine-3'-phosphate
  modified_base 13: mod_base = OTHER; note = 2'-O-methylguanosine-3'-phosphate
  modified_base 14: mod_base = OTHER; note = 2'-O-methyladenosine-3'-phosphate
  modified_base 15: mod_base = OTHER; note = 2'-O-methylguanosine-3'-phosphate
  modified_base 16: mod_base = OTHER; note = 2'-O-methyluridine-3'-phosphate
  modified_base 17: mod_base = OTHER; note = 2'-O-methyluridine-3'-phosphate
  modified_base 18: mod_base = OTHER; note = 2'-O-methyluridine-3'-phosphate
  modified_base 19: mod_base = OTHER; note = 2'-O-methylcytidine-3'-phosphate
  modified_base 20: mod_base = OTHER; note = 2'-O-methyluridine-3'-phosphate
  modified_base 21: mod_base = OTHER; note = 2'-O-methyladenosine-3'-phosphate ((2S,4R)-1-[29-[[2-(acetylamino)-2-deoxy-beta-D-galactopyra nosyl]oxy]-14,14-bis[[3-[[3-[[5-[[2-(acetylamino)-2-deoxy-b eta-D-galactopyranosyl]oxy]-1-oxopentyl]amino]propyl]amino] -3-oxopropoxy]methyl]-1,12,19,25-tetraoxo-16-oxa-13,20,24-t riazanonacos-1-yl]-4-hydroxy-2-pyrrolidinyl)methyl ester
tgcaatcgctatgagtttcta

SEQ ID NO: 882 - RNA, 21 nt, synthetic construct
  source 1..21: mol_type = other RNA
  modified_base 1: mod_base = OTHER; note = 2'-O-methylcytidine-3'-phosphorothioate
  modified_base 2: mod_base = OTHER; note = 2'-O-methyladenosine-3'-phosphorothioate
  modified_base 3: mod_base = OTHER; note = 2'-O-methyladenosine-3'-phosphate
  modified_base 4: mod_base = OTHER; note = 2'-O-methyluridine-3'-phosphate
  modified_base 5: mod_base = OTHER; note = 2'-O-methylcytidine-3'-phosphate
  modified_base 6: mod_base = OTHER; note = 2'-O-methylguanosine-3'-phosphate
  modified_base 7: mod_base = OTHER; note = 2'-deoxy-2'-fluorocytidine-3'-phosphate
  modified_base 8: mod_base = OTHER; note = 2'-O-methyluridine-3'-phosphate
  modified_base 9: mod_base = OTHER; note = 2'-deoxy-2'-fluoroadenosine-3'-phosphate
  modified_base 10: mod_base = OTHER; note = 2'-deoxy-2'-fluorouridine-3'-phosphate
  modified_base 11: mod_base = OTHER; note = 2'-deoxy-2'-fluoroguanosine-3'-phosphate
  modified_base 12: mod_base = OTHER; note = 2'-O-methyladenosine-3'-phosphate
  modified_base 13: mod_base = OTHER; note = 2'-O-methylguanosine-3'-phosphate
  modified_base 14: mod_base = OTHER; note = 2'-O-methyluridine-3'-phosphate
  modified_base 15: mod_base = OTHER; note = 2'-O-methyluridine-3'-phosphate
  modified_base 16: mod_base = OTHER; note = 2'-O-methyluridine-3'-phosphate
  modified_base 17: mod_base = OTHER; note = 2'-O-methylcytidine-3'-phosphate
  modified_base 18: mod_base = OTHER; note = 2'-O-methyluridine-3'-phosphate
  modified_base 19: mod_base = OTHER; note = 2'-O-methylguanosine-3'-phosphate
  modified_base 20: mod_base = OTHER; note = 2'-O-methyladenosine-3'-phosphate
  modified_base 21: mod_base = OTHER; note = 2'-O-methyladenosine-3'-phosphate ((2S,4R)-1-[29-[[2-(acetylamino)-2-deoxy-beta-D-galactopyra nosyl]oxy]-14,14-bis[[3-[[3-[[5-[[2-(acetylamino)-2-deoxy-b eta-D-galactopyranosyl]oxy]-1-oxopentyl]amino]propyl]amino] -3-oxopropoxy]methyl]-1,12,19,25-tetraoxo-16-oxa-13,20,24-t riazanonacos-1-yl]-4-hydroxy-2-pyrrolidinyl)methyl ester
caatcgctatgagtttctgaa

SEQ ID NO: 883 - RNA, 21 nt, synthetic construct
  source 1..21: mol_type = other RNA
  modified_base 1: mod_base = OTHER; note = 2'-O-methyladenosine-3'-phosphorothioate
  modified_base 2: mod_base = OTHER; note = 2'-O-methyladenosine-3'-phosphorothioate
  modified_base 3: mod_base = OTHER; note = 2'-O-methyluridine-3'-phosphate
  modified_base 4: mod_base = OTHER; note = 2'-O-methylcytidine-3'-phosphate
  modified_base 5: mod_base = OTHER; note = 2'-O-methylguanosine-3'-phosphate
  modified_base 6: mod_base = OTHER; note = 2'-O-methylcytidine-3'-phosphate
  modified_base 7: mod_base = OTHER; note = 2'-deoxy-2'-fluorouridine-3'-phosphate
  modified_base 8: mod_base = OTHER; note = 2'-O-methyladenosine-3'-phosphate
  modified_base 9: mod_base = OTHER; note = 2'-deoxy-2'-fluorouridine-3'-phosphate
  modified_base 10: mod_base = OTHER; note = 2'-deoxy-2'-fluoroguanosine-3'-phosphate
  modified_base 11: mod_base = OTHER; note = 2'-deoxy-2'-fluoroadenosine-3'-phosphate
  modified_base 12: mod_base = OTHER; note = 2'-O-methylguanosine-3'-phosphate
  modified_base 13: mod_base = OTHER; note = 2'-O-methyluridine-3'-phosphate
  modified_base 14: mod_base = OTHER; note = 2'-O-methyluridine-3'-phosphate
  modified_base 15: mod_base = OTHER; note = 2'-O-methyluridine-3'-phosphate
  modified_base 16: mod_base = OTHER; note = 2'-O-methylcytidine-3'-phosphate
  modified_base 17: mod_base = OTHER; note = 2'-O-methyluridine-3'-phosphate
  modified_base 18: mod_base = OTHER; note = 2'-O-methylguanosine-3'-phosphate
  modified_base 19: mod_base = OTHER; note = 2'-O-methyladenosine-3'-phosphate
  modified_base 20: mod_base = OTHER; note = 2'-O-methyladenosine-3'-phosphate
  modified_base 21: mod_base = OTHER; note = 2'-O-methyladenosine-3'-phosphate ((2S,4R)-1-[29-[[2-(acetylamino)-2-deoxy-beta-D-galactopyra nosyl]oxy]-14,14-bis[[3-[[3-[[5-[[2-(acetylamino)-2-deoxy-b eta-D-galactopyranosyl]oxy]-1-oxopentyl]amino]propyl]amino] -3-oxopropoxy]methyl]-1,12,19,25-tetraoxo-16-oxa-13,20,24-t riazanonacos-1-yl]-4-hydroxy-2-pyrrolidinyl)methyl ester
aatcgctatgagtttctgaaa

SEQ ID NO: 884 - RNA, 21 nt, synthetic construct
  source 1..21: mol_type = other RNA
  modified_base 1: mod_base = OTHER; note = 2'-O-methyladenosine-3'-phosphorothioate
  modified_base 2: mod_base = OTHER; note = 2'-O-methyladenosine-3'-phosphorothioate
  modified_base 3: mod_base = OTHER; note = 2'-O-methyluridine-3'-phosphate
  modified_base 4: mod_base = OTHER; note = 2'-O-methylcytidine-3'-phosphate
  modified_base 5: mod_base = OTHER; note = 2'-O-methylguanosine-3'-phosphate
  modified_base 6: mod_base = OTHER; note = 2'-O-methylcytidine-3'-phosphate
  modified_base 7: mod_base = OTHER; note = 2'-deoxy-2'-fluorouridine-3'-phosphate
  modified_base 8: mod_base = OTHER; note = 2'-O-methyladenosine-3'-phosphate
  modified_base 9: mod_base = OTHER; note = 2'-deoxy-2'-fluorouridine-3'-phosphate
  modified_base 10: mod_base = OTHER; note = 2'-deoxy-2'-fluoroguanosine-3'-phosphate
  modified_base 11: mod_base = OTHER; note = 2'-deoxy-2'-fluoroadenosine-3'-phosphate
  modified_base 12: mod_base = OTHER; note = 2'-O-methylguanosine-3'-phosphate
  modified_base 13: mod_base = OTHER; note = 2'-O-methyluridine-3'-phosphate
  modified_base 14: mod_base = OTHER; note = 2'-O-methyluridine-3'-phosphate
  modified_base 15: mod_base = OTHER; note = 2'-O-methyluridine-3'-phosphate
  modified_base 16: mod_base = OTHER; note = 2'-O-methyluridine-3'-phosphate
  modified_base 17: mod_base = OTHER; note = 2'-O-methyluridine-3'-phosphate
  modified_base 18: mod_base = OTHER; note = 2'-O-methylguanosine-3'-phosphate
  modified_base 19: mod_base = OTHER; note = 2'-O-methyladenosine-3'-phosphate
  modified_base 20: mod_base = OTHER; note = 2'-O-methyladenosine-3'-phosphate
  modified_base 21: mod_base = OTHER; note = 2'-O-methyladenosine-3'-phosphate ((2S,4R)-1-[29-[[2-(acetylamino)-2-deoxy-beta-D-galactopyra nosyl]oxy]-14,14-bis[[3-[[3-[[5-[[2-(acetylamino)-2-deoxy-b eta-D-galactopyranosyl]oxy]-1-oxopentyl]amino]propyl]amino] -3-oxopropoxy]methyl]-1,12,19,25-tetraoxo-16-oxa-13,20,24-t riazanonacos-1-yl]-4-hydroxy-2-pyrrolidinyl)methyl ester
aatcgctatgagtttttgaaa

SEQ ID NO: 885 - RNA, 21 nt, synthetic construct
  source 1..21: mol_type = other RNA
  modified_base 1: mod_base = OTHER; note = 2'-O-methyladenosine-3'-phosphorothioate
  modified_base 2: mod_base = OTHER; note = 2'-O-methyluridine-3'-phosphorothioate
  modified_base 3: mod_base = OTHER; note = 2'-O-methylcytidine-3'-phosphate
  modified_base 4: mod_base = OTHER; note = 2'-O-methylguanosine-3'-phosphate
  modified_base 5: mod_base = OTHER; note = 2'-O-methylcytidine-3'-phosphate
  modified_base 6: mod_base = OTHER; note = 2'-O-methyluridine-3'-phosphate
  modified_base 7: mod_base = OTHER; note = 2'-deoxy-2'-fluoroadenosine-3'-phosphate
  modified_base 8: mod_base = OTHER; note = 2'-O-methyluridine-3'-phosphate
  modified_base 9: mod_base = OTHER; note = 2'-deoxy-2'-fluoroguanosine-3'-phosphate
  modified_base 10: mod_base = OTHER; note = 2'-deoxy-2'-fluoroadenosine-3'-phosphate
  modified_base 11: mod_base = OTHER; note = 2'-deoxy-2'-fluoroguanosine-3'-phosphate
  modified_base 12: mod_base = OTHER; note = 2'-O-methyluridine-3'-phosphate
  modified_base 13: mod_base = OTHER; note = 2'-O-methyluridine-3'-phosphate
  modified_base 14: mod_base = OTHER; note = 2'-O-methyluridine-3'-phosphate
  modified_base 15: mod_base = OTHER; note = 2'-O-methylcytidine-3'-phosphate
  modified_base 16: mod_base = OTHER; note = 2'-O-methyluridine-3'-phosphate
  modified_base 17: mod_base = OTHER; note = 2'-O-methylguanosine-3'-phosphate
  modified_base 18: mod_base = OTHER; note = 2'-O-methyladenosine-3'-phosphate
  modified_base 19: mod_base = OTHER; note = 2'-O-methyladenosine-3'-phosphate
  modified_base 20: mod_base = OTHER; note = 2'-O-methyluridine-3'-phosphate
  modified_base 21: mod_base = OTHER; note = 2'-O-methyladenosine-3'-phosphate ((2S,4R)-1-[29-[[2-(acetylamino)-2-deoxy-beta-D-galactopyra nosyl]oxy]-14,14-bis[[3-[[3-[[5-[[2-(acetylamino)-2-deoxy-b eta-D-galactopyranosyl]oxy]-1-oxopentyl]amino]propyl]amino] -3-oxopropoxy]methyl]-1,12,19,25-tetraoxo-16-oxa-13,20,24-t riazanonacos-1-yl]-4-hydroxy-2-pyrrolidinyl)methyl ester
atcgctatgagtttctgaata

SEQ ID NO: 886 - RNA, 21 nt, synthetic construct
  source 1..21: mol_type = other RNA
  modified_base 1: mod_base = OTHER; note = 2'-O-methyladenosine-3'-phosphorothioate
  modified_base 2: mod_base = OTHER; note = 2'-O-methyluridine-3'-phosphorothioate
  modified_base 3: mod_base = OTHER; note = 2'-O-methylcytidine-3'-phosphate
  modified_base 4: mod_base = OTHER; note = 2'-O-methylguanosine-3'-phosphate
  modified_base 5: mod_base = OTHER; note = 2'-O-methylcytidine-3'-phosphate
  modified_base 6: mod_base = OTHER; note = 2'-O-methyluridine-3'-phosphate
  modified_base 7: mod_base = OTHER; note = 2'-deoxy-2'-fluoroadenosine-3'-phosphate
  modified_base 8: mod_base = OTHER; note = 2'-O-methyluridine-3'-phosphate
  modified_base 9: mod_base = OTHER; note = 2'-deoxy-2'-fluoroguanosine-3'-phosphate
  modified_base 10: mod_base = OTHER; note = 2'-deoxy-2'-fluoroadenosine-3'-phosphate
  modified_base 11: mod_base = OTHER; note = 2'-deoxy-2'-fluoroguanosine-3'-phosphate
  modified_base 12: mod_base = OTHER; note = 2'-O-methyluridine-3'-phosphate
  modified_base 13: mod_base = OTHER; note = 2'-O-methyluridine-3'-phosphate
  modified_base 14: mod_base = OTHER; note = 2'-O-methyluridine-3'-phosphate
  modified_base 15: mod_base = OTHER; note = 2'-O-methyluridine-3'-phosphate
  modified_base 16: mod_base = OTHER; note = 2'-O-methyluridine-3'-phosphate
  modified_base 17: mod_base = OTHER; note = 2'-O-methylguanosine-3'-phosphate
  modified_base 18: mod_base = OTHER; note = 2'-O-methyladenosine-3'-phosphate
  modified_base 19: mod_base = OTHER; note = 2'-O-methyladenosine-3'-phosphate
  modified_base 20: mod_base = OTHER; note = 2'-O-methyluridine-3'-phosphate
  modified_base 21: mod_base = OTHER; note = 2'-O-methyladenosine-3'-phosphate ((2S,4R)-1-[29-[[2-(acetylamino)-2-deoxy-beta-D-galactopyra nosyl]oxy]-14,14-bis[[3-[[3-[[5-[[2-(acetylamino)-2-deoxy-b eta-D-galactopyranosyl]oxy]-1-oxopentyl]amino]propyl]amino] -3-oxopropoxy]methyl]-1,12,19,25-tetraoxo-16-oxa-13,20,24-t riazanonacos-1-yl]-4-hydroxy-2-pyrrolidinyl)methyl ester
atcgctatgagtttttgaata

SEQ ID NO: 887 - RNA, 21 nt, synthetic construct
  source 1..21: mol_type = other RNA
  modified_base 1: mod_base = OTHER; note = 2'-O-methyluridine-3'-phosphorothioate
  modified_base 2: mod_base = OTHER; note = 2'-O-methylcytidine-3'-phosphorothioate
  modified_base 3: mod_base = OTHER; note = 2'-O-methylguanosine-3'-phosphate
  modified_base 4: mod_base = OTHER; note = 2'-O-methylcytidine-3'-phosphate
  modified_base 5: mod_base = OTHER; note = 2'-O-methyluridine-3'-phosphate
  modified_base 6: mod_base = OTHER; note = 2'-O-methyladenosine-3'-phosphate
  modified_base 7: mod_base = OTHER; note = 2'-deoxy-2'-fluorouridine-3'-phosphate
  modified_base 8: mod_base = OTHER; note = 2'-O-methylguanosine-3'-phosphate
  modified_base 9: mod_base = OTHER; note = 2'-deoxy-2'-fluoroadenosine-3'-phosphate
  modified_base 10: mod_base = OTHER; note = 2'-deoxy-2'-fluoroguanosine-3'-phosphate
  modified_base 11: mod_base = OTHER; note = 2'-deoxy-2'-fluorouridine-3'-phosphate
  modified_base 12: mod_base = OTHER; note = 2'-O-methyluridine-3'-phosphate
  modified_base 13: mod_base = OTHER; note = 2'-O-methyluridine-3'-phosphate
  modified_base 14: mod_base = OTHER; note = 2'-O-methylcytidine-3'-phosphate
  modified_base 15: mod_base = OTHER; note = 2'-O-methyluridine-3'-phosphate
  modified_base 16: mod_base = OTHER; note = 2'-O-methylguanosine-3'-phosphate
  modified_base 17: mod_base = OTHER; note = 2'-O-methyladenosine-3'-phosphate
  modified_base 18: mod_base = OTHER; note = 2'-O-methyladenosine-3'-phosphate
  modified_base 19: mod_base = OTHER; note = 2'-O-methyluridine-3'-phosphate
  modified_base 20: mod_base = OTHER; note = 2'-O-methylguanosine-3'-phosphate
  modified_base 21: mod_base = OTHER; note = 2'-O-methyladenosine-3'-phosphate ((2S,4R)-1-[29-[[2-(acetylamino)-2-deoxy-beta-D-galactopyra nosyl]oxy]-14,14-bis[[3-[[3-[[5-[[2-(acetylamino)-2-deoxy-b eta-D-galactopyranosyl]oxy]-1-oxopentyl]amino]propyl]amino] -3-oxopropoxy]methyl]-1,12,19,25-tetraoxo-16-oxa-13,20,24-t riazanonacos-1-yl]-4-hydroxy-2-pyrrolidinyl)methyl ester
tcgctatgagtttctgaatga

SEQ ID NO: 888 - RNA, 21 nt, synthetic construct
  source 1..21: mol_type = other RNA
  modified_base 1: mod_base = OTHER; note = 2'-O-methyluridine-3'-phosphorothioate
  modified_base 2: mod_base = OTHER; note = 2'-O-methylcytidine-3'-phosphorothioate
  modified_base 3: mod_base = OTHER; note = 2'-O-methylguanosine-3'-phosphate
  modified_base 4: mod_base = OTHER; note = 2'-O-methylcytidine-3'-phosphate
  modified_base 5: mod_base = OTHER; note = 2'-O-methyluridine-3'-phosphate
  modified_base 6: mod_base = OTHER; note = 2'-O-methyladenosine-3'-phosphate
  modified_base 7: mod_base = OTHER; note = 2'-deoxy-2'-fluorouridine-3'-phosphate
  modified_base 8: mod_base = OTHER; note = 2'-O-methylguanosine-3'-phosphate
  modified_base 9: mod_base = OTHER; note = 2'-deoxy-2'-fluoroadenosine-3'-phosphate
  modified_base 10: mod_base = OTHER; note = 2'-deoxy-2'-fluoroguanosine-3'-phosphate
  modified_base 11: mod_base = OTHER; note = 2'-deoxy-2'-fluorouridine-3'-phosphate
  modified_base 12: mod_base = OTHER; note = 2'-O-methyluridine-3'-phosphate
  modified_base 13: mod_base = OTHER; note = 2'-O-methyluridine-3'-phosphate
  modified_base 14: mod_base = OTHER; note = 2'-O-methylcytidine-3'-phosphate
  modified_base 15: mod_base = OTHER; note = 2'-O-methyluridine-3'-phosphate
  modified_base 16: mod_base = OTHER; note = 2'-O-methyluridine-3'-phosphate
  modified_base 17: mod_base = OTHER; note = 2'-O-methyladenosine-3'-phosphate
  modified_base 18: mod_base = OTHER; note = 2'-O-methyladenosine-3'-phosphate
  modified_base 19: mod_base = OTHER; note = 2'-O-methyluridine-3'-phosphate
  modified_base 20: mod_base = OTHER; note = 2'-O-methylguanosine-3'-phosphate
  modified_base 21: mod_base = OTHER; note = 2'-O-methyladenosine-3'-phosphate ((2S,4R)-1-[29-[[2-(acetylamino)-2-deoxy-beta-D-galactopyra nosyl]oxy]-14,14-bis[[3-[[3-[[5-[[2-(acetylamino)-2-deoxy-b eta-D-galactopyranosyl]oxy]-1-oxopentyl]amino]propyl]amino] -3-oxopropoxy]methyl]-1,12,19,25-tetraoxo-16-oxa-13,20,24-t riazanonacos-1-yl]-4-hydroxy-2-pyrrolidinyl)methyl ester
tcgctatgagtttcttaatga

SEQ ID NO: 889 - RNA, 21 nt, synthetic construct
  source 1..21: mol_type = other RNA
  modified_base 1: mod_base = OTHER; note = 2'-O-methylcytidine-3'-phosphorothioate
  modified_base 2: mod_base = OTHER; note = 2'-O-methylguanosine-3'-phosphorothioate
  modified_base 3: mod_base = OTHER; note = 2'-O-methylcytidine-3'-phosphate
  modified_base 4: mod_base = OTHER; note = 2'-O-methyluridine-3'-phosphate
  modified_base 5: mod_base = OTHER; note = 2'-O-methyladenosine-3'-phosphate
  modified_base 6: mod_base = OTHER; note = 2'-O-methyluridine-3'-phosphate
  modified_base 7: mod_base = OTHER; note = 2'-deoxy-2'-fluoroguanosine-3'-phosphate
  modified_base 8: mod_base = OTHER; note = 2'-O-methyladenosine-3'-phosphate
  modified_base 9: mod_base = OTHER; note = 2'-deoxy-2'-fluoroguanosine-3'-phosphate
  modified_base 10: mod_base = OTHER; note = 2'-deoxy-2'-fluorouridine-3'-phosphate
  modified_base 11: mod_base = OTHER; note = 2'-deoxy-2'-fluorouridine-3'-phosphate
  modified_base 12: mod_base = OTHER; note = 2'-O-methyluridine-3'-phosphate
  modified_base 13: mod_base = OTHER; note = 2'-O-methylcytidine-3'-phosphate
  modified_base 14: mod_base = OTHER; note = 2'-O-methyluridine-3'-phosphate
  modified_base 15: mod_base = OTHER; note = 2'-O-methylguanosine-3'-phosphate
  modified_base 16: mod_base = OTHER; note = 2'-O-methyladenosine-3'-phosphate
  modified_base 17: mod_base = OTHER; note = 2'-O-methyladenosine-3'-phosphate
  modified_base 18: mod_base = OTHER; note = 2'-O-methyluridine-3'-phosphate
  modified_base 19: mod_base = OTHER; note = 2'-O-methylguanosine-3'-phosphate
  modified_base 20: mod_base = OTHER; note = 2'-O-methylguanosine-3'-phosphate
  modified_base 21: mod_base = OTHER; note = 2'-O-methyladenosine-3'-phosphate ((2S,4R)-1-[29-[[2-(acetylamino)-2-deoxy-beta-D-galactopyra nosyl]oxy]-14,14-bis[[3-[[3-[[5-[[2-(acetylamino)-2-deoxy-b eta-D-galactopyranosyl]oxy]-1-oxopentyl]amino]propyl]amino] -3-oxopropoxy]methyl]-1,12,19,25-tetraoxo-16-oxa-13,20,24-t riazanonacos-1-yl]-4-hydroxy-2-pyrrolidinyl)methyl ester
cgctatgagtttctgaatgga

SEQ ID NO: 890 - RNA, 21 nt, synthetic construct
  source 1..21: mol_type = other RNA
  modified_base 1: mod_base = OTHER; note = 2'-O-methylguanosine-3'-phosphorothioate
  modified_base 2: mod_base = OTHER; note = 2'-O-methylcytidine-3'-phosphorothioate
  modified_base 3: mod_base = OTHER; note = 2'-O-methyluridine-3'-phosphate
  modified_base 4: mod_base = OTHER; note = 2'-O-methyladenosine-3'-phosphate
  modified_base 5: mod_base = OTHER; note = 2'-O-methyluridine-3'-phosphate
  modified_base 6: mod_base = OTHER; note = 2'-O-methylguanosine-3'-phosphate
  modified_base 7: mod_base = OTHER; note = 2'-deoxy-2'-fluoroadenosine-3'-phosphate
  modified_base 8: mod_base = OTHER; note = 2'-O-methylguanosine-3'-phosphate
  modified_base 9: mod_base = OTHER; note = 2'-deoxy-2'-fluorouridine-3'-phosphate
  modified_base 10: mod_base = OTHER; note = 2'-deoxy-2'-fluorouridine-3'-phosphate
  modified_base 11: mod_base = OTHER; note = 2'-deoxy-2'-fluorouridine-3'-phosphate
  modified_base 12: mod_base = OTHER; note = 2'-O-methylcytidine-3'-phosphate
  modified_base 13: mod_base = OTHER; note = 2'-O-methyluridine-3'-phosphate
  modified_base 14: mod_base = OTHER; note = 2'-O-methylguanosine-3'-phosphate
  modified_base 15: mod_base = OTHER; note = 2'-O-methyladenosine-3'-phosphate
  modified_base 16: mod_base = OTHER; note = 2'-O-methyladenosine-3'-phosphate
  modified_base 17: mod_base = OTHER; note = 2'-O-methyluridine-3'-phosphate
  modified_base 18: mod_base = OTHER; note = 2'-O-methylguanosine-3'-phosphate
  modified_base 19: mod_base = OTHER; note = 2'-O-methylguanosine-3'-phosphate
  modified_base 20: mod_base = OTHER; note = 2'-O-methyladenosine-3'-phosphate
  modified_base 21: mod_base = OTHER; note = 2'-O-methyladenosine-3'-phosphate ((2S,4R)-1-[29-[[2-(acetylamino)-2-deoxy-beta-D-galactopyra nosyl]oxy]-14,14-bis[[3-[[3-[[5-[[2-(acetylamino)-2-deoxy-b eta-D-galactopyranosyl]oxy]-1-oxopentyl]amino]propyl]amino] -3-oxopropoxy]methyl]-1,12,19,25-tetraoxo-16-oxa-13,20,24-t riazanonacos-1-yl]-4-hydroxy-2-pyrrolidinyl)methyl ester
gctatgagtttctgaatggaa

SEQ ID NO: 891 - RNA, 21 nt, synthetic construct
  source 1..21: mol_type = other RNA
  modified_base 1: mod_base = OTHER; note = 2'-O-methylcytidine-3'-phosphorothioate
  modified_base 2: mod_base = OTHER; note = 2'-O-methyluridine-3'-phosphorothioate
  modified_base 3: mod_base = OTHER; note = 2'-O-methyladenosine-3'-phosphate
  modified_base 4: mod_base = OTHER; note = 2'-O-methyluridine-3'-phosphate
  modified_base 5: mod_base = OTHER; note = 2'-O-methylguanosine-3'-phosphate
  modified_base 6: mod_base = OTHER; note = 2'-O-methyladenosine-3'-phosphate
  modified_base 7: mod_base = OTHER; note = 2'-deoxy-2'-fluoroguanosine-3'-phosphate
  modified_base 8: mod_base = OTHER; note = 2'-O-methyluridine-3'-phosphate
  modified_base 9: mod_base = OTHER; note = 2'-deoxy-2'-fluorouridine-3'-phosphate
  modified_base 10: mod_base = OTHER; note = 2'-deoxy-2'-fluorouridine-3'-phosphate
  modified_base 11: mod_base = OTHER; note = 2'-deoxy-2'-fluorocytidine-3'-phosphate
  modified_base 12: mod_base = OTHER; note = 2'-O-methyluridine-3'-phosphate
  modified_base 13: mod_base = OTHER; note = 2'-O-methylguanosine-3'-phosphate
  modified_base 14: mod_base = OTHER; note = 2'-O-methyladenosine-3'-phosphate
  modified_base 15: mod_base = OTHER; note = 2'-O-methyladenosine-3'-phosphate
  modified_base 16: mod_base = OTHER; note = 2'-O-methyluridine-3'-phosphate
  modified_base 17: mod_base = OTHER; note = 2'-O-methylguanosine-3'-phosphate
  modified_base 18: mod_base = OTHER; note = 2'-O-methylguanosine-3'-phosphate
  modified_base 19: mod_base = OTHER; note = 2'-O-methyladenosine-3'-phosphate
  modified_base 20: mod_base = OTHER; note = 2'-O-methyladenosine-3'-phosphate
  modified_base 21: mod_base = OTHER; note = 2'-O-methyladenosine-3'-phosphate ((2S,4R)-1-[29-[[2-(acetylamino)-2-deoxy-beta-D-galactopyra nosyl]oxy]-14,14-bis[[3-[[3-[[5-[[2-(acetylamino)-2-deoxy-b eta-D-galactopyranosyl]oxy]-1-oxopentyl]amino]propyl]amino] -3-oxopropoxy]methyl]-1,12,19,25-tetraoxo-16-oxa-13,20,24-t riazanonacos-1-yl]-4-hydroxy-2-pyrrolidinyl)methyl ester
ctatgagtttctgaatggaaa

SEQ ID NO: 892 - RNA, 21 nt, synthetic construct
  source 1..21: mol_type = other RNA
  modified_base 1: mod_base = OTHER; note = 2'-O-methylcytidine-3'-phosphorothioate
  modified_base 2: mod_base = OTHER; note = 2'-O-methyluridine-3'-phosphorothioate
  modified_base 3: mod_base = OTHER; note = 2'-O-methyladenosine-3'-phosphate
  modified_base 4: mod_base = OTHER; note = 2'-O-methyluridine-3'-phosphate
  modified_base 5: mod_base = OTHER; note = 2'-O-methylguanosine-3'-phosphate
  modified_base 6: mod_base = OTHER; note = 2'-O-methyladenosine-3'-phosphate
  modified_base 7: mod_base = OTHER; note = 2'-deoxy-2'-fluoroguanosine-3'-phosphate
  modified_base 8: mod_base = OTHER; note = 2'-O-methyluridine-3'-phosphate
  modified_base 9: mod_base = OTHER; note = 2'-deoxy-2'-fluorouridine-3'-phosphate
  modified_base 10: mod_base = OTHER; note = 2'-deoxy-2'-fluorouridine-3'-phosphate
  modified_base 11: mod_base = OTHER; note = 2'-deoxy-2'-fluorocytidine-3'-phosphate
  modified_base 12: mod_base = OTHER; note = 2'-O-methyluridine-3'-phosphate
  modified_base 13: mod_base = OTHER; note = 2'-O-methylguanosine-3'-phosphate
  modified_base 14: mod_base = OTHER; note = 2'-O-methyladenosine-3'-phosphate
  modified_base 15: mod_base = OTHER; note = 2'-O-methyluridine-3'-phosphate
  modified_base 16: mod_base = OTHER; note = 2'-O-methyluridine-3'-phosphate
  modified_base 17: mod_base = OTHER; note = 2'-O-methylguanosine-3'-phosphate
  modified_base 18: mod_base = OTHER; note = 2'-O-methylguanosine-3'-phosphate
  modified_base 19: mod_base = OTHER; note = 2'-O-methyladenosine-3'-phosphate
  modified_base 20: mod_base = OTHER; note = 2'-O-methyladenosine-3'-phosphate
  modified_base 21: mod_base = OTHER; note = 2'-O-methyladenosine-3'-phosphate ((2S,4R)-1-[29-[[2-(acetylamino)-2-deoxy-beta-D-galactopyra nosyl]oxy]-14,14-bis[[3-[[3-[[5-[[2-(acetylamino)-2-deoxy-b eta-D-galactopyranosyl]oxy]-1-oxopentyl]amino]propyl]amino] -3-oxopropoxy]methyl]-1,12,19,25-tetraoxo-16-oxa-13,20,24-t riazanonacos-1-yl]-4-hydroxy-2-pyrrolidinyl)methyl ester
ctatgagtttctgattggaaa

SEQ ID NO: 893 - RNA, 21 nt, synthetic construct
  source 1..21: mol_type = other RNA
  modified_base 1: mod_base = OTHER; note = 2'-O-methyluridine-3'-phosphorothioate
  modified_base 2: mod_base = OTHER; note = 2'-O-methyladenosine-3'-phosphorothioate
  modified_base 3: mod_base = OTHER; note = 2'-O-methyluridine-3'-phosphate
  modified_base 4: mod_base = OTHER; note = 2'-O-methylguanosine-3'-phosphate
  modified_base 5: mod_base = OTHER; note = 2'-O-methyladenosine-3'-phosphate
  modified_base 6: mod_base = OTHER; note = 2'-O-methylguanosine-3'-phosphate
  modified_base 7: mod_base = OTHER; note = 2'-deoxy-2'-fluorouridine-3'-phosphate
  modified_base 8: mod_base = OTHER; note = 2'-O-methyluridine-3'-phosphate
  modified_base 9: mod_base = OTHER; note = 2'-deoxy-2'-fluorouridine-3'-phosphate
  modified_base 10: mod_base = OTHER; note = 2'-deoxy-2'-fluorocytidine-3'-phosphate
  modified_base 11: mod_base = OTHER; note = 2'-deoxy-2'-fluorouridine-3'-phosphate
  modified_base 12: mod_base = OTHER; note = 2'-O-methylguanosine-3'-phosphate
  modified_base 13: mod_base = OTHER; note = 2'-O-methyladenosine-3'-phosphate
  modified_base 14: mod_base = OTHER; note = 2'-O-methyladenosine-3'-phosphate
  modified_base 15: mod_base = OTHER; note = 2'-O-methyluridine-3'-phosphate
  modified_base 16: mod_base = OTHER; note = 2'-O-methylguanosine-3'-phosphate
  modified_base 17: mod_base = OTHER; note = 2'-O-methylguanosine-3'-phosphate
  modified_base 18: mod_base = OTHER; note = 2'-O-methyladenosine-3'-phosphate
  modified_base 19: mod_base = OTHER; note = 2'-O-methyladenosine-3'-phosphate
  modified_base 20: mod_base = OTHER; note = 2'-O-methylguanosine-3'-phosphate
  modified_base 21: mod_base = OTHER; note = 2'-O-methyladenosine-3'-phosphate ((2S,4R)-1-[29-[[2-(acetylamino)-2-deoxy-beta-D-galactopyra nosyl]oxy]-14,14-bis[[3-[[3-[[5-[[2-(acetylamino)-2-deoxy-b eta-D-galactopyranosyl]oxy]-1-oxopentyl]amino]propyl]amino] -3-oxopropoxy]methyl]-1,12,19,25-tetraoxo-16-oxa-13,20,24-t riazanonacos-1-yl]-4-hydroxy-2-pyrrolidinyl)methyl ester
tatgagtttctgaatggaaga

SEQ ID NO: 894 - RNA, 21 nt, synthetic construct
  source 1..21: mol_type = other RNA
  modified_base 1: mod_base = OTHER; note = 2'-O-methyluridine-3'-phosphorothioate
  modified_base 2: mod_base = OTHER; note = 2'-O-methyladenosine-3'-phosphorothioate
  modified_base 3: mod_base = OTHER; note = 2'-O-methyluridine-3'-phosphate
  modified_base 4: mod_base = OTHER; note = 2'-O-methylguanosine-3'-phosphate
  modified_base 5: mod_base = OTHER; note = 2'-O-methyladenosine-3'-phosphate
  modified_base 6: mod_base = OTHER; note = 2'-O-methylguanosine-3'-phosphate
  modified_base 7: mod_base = OTHER; note = 2'-deoxy-2'-fluorouridine-3'-phosphate
  modified_base 8: mod_base = OTHER; note = 2'-O-methyluridine-3'-phosphate
  modified_base 9: mod_base = OTHER; note = 2'-deoxy-2'-fluorouridine-3'-phosphate
  modified_base 10: mod_base = OTHER; note = 2'-deoxy-2'-fluorocytidine-3'-phosphate
  modified_base 11: mod_base = OTHER; note = 2'-deoxy-2'-fluorouridine-3'-phosphate
  modified_base 12: mod_base = OTHER; note = 2'-O-methylguanosine-3'-phosphate
  modified_base 13: mod_base = OTHER; note = 2'-O-methyladenosine-3'-phosphate
  modified_base 14: mod_base = OTHER; note = 2'-O-methyladenosine-3'-phosphate
  modified_base 15: mod_base = OTHER; note = 2'-O-methyluridine-3'-phosphate
  modified_base 16: mod_base = OTHER; note = 2'-O-methyluridine-3'-phosphate
  modified_base 17: mod_base = OTHER; note = 2'-O-methylguanosine-3'-phosphate
  modified_base 18: mod_base = OTHER; note = 2'-O-methyladenosine-3'-phosphate
  modified_base 19: mod_base = OTHER; note = 2'-O-methyladenosine-3'-phosphate
  modified_base 20: mod_base = OTHER; note = 2'-O-methylguanosine-3'-phosphate
  modified_base 21: mod_base = OTHER; note = 2'-O-methyladenosine-3'-phosphate ((2S,4R)-1-[29-[[2-(acetylamino)-2-deoxy-beta-D-galactopyra nosyl]oxy]-14,14-bis[[3-[[3-[[5-[[2-(acetylamino)-2-deoxy-b eta-D-galactopyranosyl]oxy]-1-oxopentyl]amino]propyl]amino] -3-oxopropoxy]methyl]-1,12,19,25-tetraoxo-16-oxa-13,20,24-t riazanonacos-1-yl]-4-hydroxy-2-pyrrolidinyl)methyl ester
tatgagtttctgaattgaaga

SEQ ID NO: 895 - RNA, 21 nt, synthetic construct
  source 1..21: mol_type = other RNA
  modified_base 1: mod_base = OTHER; note = 2'-O-methyluridine-3'-phosphorothioate
  modified_base 2: mod_base = OTHER; note = 2'-O-methylguanosine-3'-phosphorothioate
  modified_base 3: mod_base = OTHER; note = 2'-O-methyladenosine-3'-phosphate
  modified_base 4: mod_base = OTHER; note = 2'-O-methylguanosine-3'-phosphate
  modified_base 5: mod_base = OTHER; note = 2'-O-methyluridine-3'-phosphate
  modified_base 6: mod_base = OTHER; note = 2'-O-methyluridine-3'-phosphate
  modified_base 7: mod_base = OTHER; note = 2'-deoxy-2'-fluorouridine-3'-phosphate
  modified_base 8: mod_base = OTHER; note = 2'-O-methylcytidine-3'-phosphate
  modified_base 9: mod_base = OTHER; note = 2'-deoxy-2'-fluorouridine-3'-phosphate
  modified_base 10: mod_base = OTHER; note = 2'-deoxy-2'-fluoroguanosine-3'-phosphate
  modified_base 11: mod_base = OTHER; note = 2'-deoxy-2'-fluoroadenosine-3'-phosphate
  modified_base 12: mod_base = OTHER; note = 2'-O-methyladenosine-3'-phosphate
  modified_base 13: mod_base = OTHER; note = 2'-O-methyluridine-3'-phosphate
  modified_base 14: mod_base = OTHER; note = 2'-O-methylguanosine-3'-phosphate
  modified_base 15: mod_base = OTHER; note = 2'-O-methylguanosine-3'-phosphate
  modified_base 16: mod_base = OTHER; note = 2'-O-methyladenosine-3'-phosphate
  modified_base 17: mod_base = OTHER; note = 2'-O-methyladenosine-3'-phosphate
  modified_base 18: mod_base = OTHER; note = 2'-O-methylguanosine-3'-phosphate
  modified_base 19: mod_base = OTHER; note = 2'-O-methyladenosine-3'-phosphate
  modified_base 20: mod_base = OTHER; note = 2'-O-methylguanosine-3'-phosphate
  modified_base 21: mod_base = OTHER; note = 2'-O-methyladenosine-3'-phosphate ((2S,4R)-1-[29-[[2-(acetylamino)-2-deoxy-beta-D-galactopyra nosyl]oxy]-14,14-bis[[3-[[3-[[5-[[2-(acetylamino)-2-deoxy-b eta-D-galactopyranosyl]oxy]-1-oxopentyl]amino]propyl]amino] -3-oxopropoxy]methyl]-1,12,19,25-tetraoxo-16-oxa-13,20,24-t riazanonacos-1-yl]-4-hydroxy-2-pyrrolidinyl)methyl ester
tgagtttctgaatggaagaga

SEQ ID NO: 896 - RNA, 21 nt, synthetic construct
  source 1..21: mol_type = other RNA
  modified_base 1: mod_base = OTHER; note = 2'-O-methylguanosine-3'-phosphorothioate
  modified_base 2: mod_base = OTHER; note = 2'-O-methyladenosine-3'-phosphorothioate
  modified_base 3: mod_base = OTHER; note = 2'-O-methylguanosine-3'-phosphate
  modified_base 4: mod_base = OTHER; note = 2'-O-methyluridine-3'-phosphate
  modified_base 5: mod_base = OTHER; note = 2'-O-methyluridine-3'-phosphate
  modified_base 6: mod_base = OTHER; note = 2'-O-methyluridine-3'-phosphate
  modified_base 7: mod_base = OTHER; note = 2'-deoxy-2'-fluorocytidine-3'-phosphate
  modified_base 8: mod_base = OTHER; note = 2'-O-methyluridine-3'-phosphate
  modified_base 9: mod_base = OTHER; note = 2'-deoxy-2'-fluoroguanosine-3'-phosphate
  modified_base 10: mod_base = OTHER; note = 2'-deoxy-2'-fluoroadenosine-3'-phosphate
  modified_base 11: mod_base = OTHER; note = 2'-deoxy-2'-fluoroadenosine-3'-phosphate
  modified_base 12: mod_base = OTHER; note = 2'-O-methyluridine-3'-phosphate
  modified_base 13: mod_base = OTHER; note = 2'-O-methylguanosine-3'-phosphate
  modified_base 14: mod_base = OTHER; note = 2'-O-methylguanosine-3'-phosphate
  modified_base 15: mod_base = OTHER; note = 2'-O-methyladenosine-3'-phosphate
  modified_base 16: mod_base = OTHER; note = 2'-O-methyladenosine-3'-phosphate
  modified_base 17: mod_base = OTHER; note = 2'-O-methylguanosine-3'-phosphate
  modified_base 18: mod_base = OTHER; note = 2'-O-methyladenosine-3'-phosphate
  modified_base 19: mod_base = OTHER; note = 2'-O-methylguanosine-3'-phosphate
  modified_base 20: mod_base = OTHER; note = 2'-O-methyluridine-3'-phosphate
  modified_base 21: mod_base = OTHER; note = 2'-O-methyladenosine-3'-phosphate ((2S,4R)-1-[29-[[2-(acetylamino)-2-deoxy-beta-D-galactopyra nosyl]oxy]-14,14-bis[[3-[[3-[[5-[[2-(acetylamino)-2-deoxy-b eta-D-galactopyranosyl]oxy]-1-oxopentyl]amino]propyl]amino] -3-oxopropoxy]methyl]-1,12,19,25-tetraoxo-16-oxa-13,20,24-t riazanonacos-1-yl]-4-hydroxy-2-pyrrolidinyl)methyl ester
gagtttctgaatggaagagta

SEQ ID NO: 897 - RNA, 21 nt, synthetic construct
  source 1..21: mol_type = other RNA
  modified_base 1: mod_base = OTHER; note = 2'-O-methylguanosine-3'-phosphorothioate
  modified_base 2: mod_base = OTHER; note = 2'-O-methyladenosine-3'-phosphorothioate
  modified_base 3: mod_base = OTHER; note = 2'-O-methylguanosine-3'-phosphate
  modified_base 4: mod_base = OTHER; note = 2'-O-methyluridine-3'-phosphate
  modified_base 5: mod_base = OTHER; note = 2'-O-methyluridine-3'-phosphate
  modified_base 6: mod_base = OTHER; note = 2'-O-methyluridine-3'-phosphate
  modified_base 7: mod_base = OTHER; note = 2'-deoxy-2'-fluorocytidine-3'-phosphate
  modified_base 8: mod_base = OTHER; note = 2'-O-methyluridine-3'-phosphate
  modified_base 9: mod_base = OTHER; note = 2'-deoxy-2'-fluoroguanosine-3'-phosphate
  modified_base 10: mod_base = OTHER; note = 2'-deoxy-2'-fluoroadenosine-3'-phosphate
  modified_base 11: mod_base = OTHER; note = 2'-deoxy-2'-fluoroadenosine-3'-phosphate
  modified_base 12: mod_base = OTHER; note = 2'-O-methyluridine-3'-phosphate
  modified_base 13: mod_base = OTHER; note = 2'-O-methylguanosine-3'-phosphate
  modified_base 14: mod_base = OTHER; note = 2'-O-methylguanosine-3'-phosphate
  modified_base 15: mod_base = OTHER; note = 2'-O-methyluridine-3'-phosphate
  modified_base 16: mod_base = OTHER; note = 2'-O-methyladenosine-3'-phosphate
  modified_base 17: mod_base = OTHER; note = 2'-O-methylguanosine-3'-phosphate
  modified_base 18: mod_base = OTHER; note = 2'-O-methyladenosine-3'-phosphate
  modified_base 19: mod_base = OTHER; note = 2'-O-methylguanosine-3'-phosphate
  modified_base 20: mod_base = OTHER; note = 2'-O-methyluridine-3'-phosphate
  modified_base 21: mod_base = OTHER; note = 2'-O-methyladenosine-3'-phosphate ((2S,4R)-1-[29-[[2-(acetylamino)-2-deoxy-beta-D-galactopyra nosyl]oxy]-14,14-bis[[3-[[3-[[5-[[2-(acetylamino)-2-deoxy-b eta-D-galactopyranosyl]oxy]-1-oxopentyl]amino]propyl]amino] -3-oxopropoxy]methyl]-1,12,19,25-tetraoxo-16-oxa-13,20,24-t riazanonacos-1-yl]-4-hydroxy-2-pyrrolidinyl)methyl ester
gagtttctgaatggtagagta

SEQ ID NO: 898 - RNA, 21 nt, synthetic construct
  source 1..21: mol_type = other RNA
  modified_base 1: mod_base = OTHER; note = 2'-O-methylcytidine-3'-phosphorothioate
  modified_base 2: mod_base = OTHER; note = 2'-O-methyluridine-3'-phosphorothioate
  modified_base 3: mod_base = OTHER; note = 2'-O-methyluridine-3'-phosphate
  modified_base 4: mod_base = OTHER; note = 2'-O-methylcytidine-3'-phosphate
  modified_base 5: mod_base = OTHER; note = 2'-O-methylguanosine-3'-phosphate
  modified_base 6: mod_base = OTHER; note = 2'-O-methyladenosine-3'-phosphate
  modified_base 7: mod_base = OTHER; note = 2'-deoxy-2'-fluoroguanosine-3'-phosphate
  modified_base 8: mod_base = OTHER; note = 2'-O-methyladenosine-3'-phosphate
  modified_base 9: mod_base = OTHER; note = 2'-deoxy-2'-fluoroadenosine-3'-phosphate
  modified_base 10: mod_base = OTHER; note = 2'-deoxy-2'-fluoroguanosine-3'-phosphate
  modified_base 11: mod_base = OTHER; note = 2'-deoxy-2'-fluoroguanosine-3'-phosphate
  modified_base 12: mod_base = OTHER; note = 2'-O-methyladenosine-3'-phosphate
  modified_base 13: mod_base = OTHER; note = 2'-O-methylcytidine-3'-phosphate
  modified_base 14: mod_base = OTHER; note = 2'-O-methyladenosine-3'-phosphate
  modified_base 15: mod_base = OTHER; note = 2'-O-methyladenosine-3'-phosphate
  modified_base 16: mod_base = OTHER; note = 2'-O-methyladenosine-3'-phosphate
  modified_base 17: mod_base = OTHER; note = 2'-O-methyluridine-3'-phosphate
  modified_base 18: mod_base = OTHER; note = 2'-O-methyladenosine-3'-phosphate
  modified_base 19: mod_base = OTHER; note = 2'-O-methylcytidine-3'-phosphate
  modified_base 20: mod_base = OTHER; note = 2'-O-methyladenosine-3'-phosphate
  modified_base 21: mod_base = OTHER; note = 2'-O-methyladenosine-3'-phosphate ((2S,4R)-1-[29-[[2-(acetylamino)-2-deoxy-beta-D-galactopyra nosyl]oxy]-14,14-bis[[3-[[3-[[5-[[2-(acetylamino)-2-deoxy-b eta-D-galactopyranosyl]oxy]-1-oxopentyl]amino]propyl]amino] -3-oxopropoxy]methyl]-1,12,19,25-tetraoxo-16-oxa-13,20,24-t riazanonacos-1-yl]-4-hydroxy-2-pyrrolidinyl)methyl ester
cttcgagaaggacaaatacaa

SEQ ID NO: 899 - RNA, 21 nt, synthetic construct
  source 1..21: mol_type = other RNA
  modified_base 1: mod_base = OTHER; note = 2'-O-methyluridine-3'-phosphorothioate
  modified_base 2: mod_base = OTHER; note = 2'-O-methyluridine-3'-phosphorothioate
  modified_base 3: mod_base = OTHER; note = 2'-O-methylcytidine-3'-phosphate
  modified_base 4: mod_base = OTHER; note = 2'-O-methylguanosine-3'-phosphate
  modified_base 5: mod_base = OTHER; note = 2'-O-methyladenosine-3'-phosphate
  modified_base 6: mod_base = OTHER; note = 2'-O-methylguanosine-3'-phosphate
  modified_base 7: mod_base = OTHER; note = 2'-deoxy-2'-fluoroadenosine-3'-phosphate
  modified_base 8: mod_base = OTHER; note = 2'-O-methyladenosine-3'-phosphate
  modified_base 9: mod_base = OTHER; note = 2'-deoxy-2'-fluoroguanosine-3'-phosphate
  modified_base 10: mod_base = OTHER; note = 2'-deoxy-2'-fluoroguanosine-3'-phosphate
  modified_base 11: mod_base = OTHER; note = 2'-deoxy-2'-fluoroadenosine-3'-phosphate
  modified_base 12: mod_base = OTHER; note = 2'-O-methylcytidine-3'-phosphate
  modified_base 13: mod_base = OTHER; note = 2'-O-methyladenosine-3'-phosphate
  modified_base 14: mod_base = OTHER; note = 2'-O-methyladenosine-3'-phosphate
  modified_base 15: mod_base = OTHER; note = 2'-O-methyladenosine-3'-phosphate
  modified_base 16: mod_base = OTHER; note = 2'-O-methyluridine-3'-phosphate
  modified_base 17: mod_base = OTHER; note = 2'-O-methyladenosine-3'-phosphate
  modified_base 18: mod_base = OTHER; note = 2'-O-methylcytidine-3'-phosphate
  modified_base 19: mod_base = OTHER; note = 2'-O-methyladenosine-3'-phosphate
  modified_base 20: mod_base = OTHER; note = 2'-O-methyluridine-3'-phosphate
  modified_base 21: mod_base = OTHER; note = 2'-O-methyladenosine-3'-phosphate ((2S,4R)-1-[29-[[2-(acetylamino)-2-deoxy-beta-D-galactopyra nosyl]oxy]-14,14-bis[[3-[[3-[[5-[[2-(acetylamino)-2-deoxy-b eta-D-galactopyranosyl]oxy]-1-oxopentyl]amino]propyl]amino] -3-oxopropoxy]methyl]-1,12,19,25-tetraoxo-16-oxa-13,20,24-t riazanonacos-1-yl]-4-hydroxy-2-pyrrolidinyl)methyl ester
ttcgagaaggacaaatacata

SEQ ID NO: 900 - RNA, 21 nt, synthetic construct
  source 1..21: mol_type = other RNA
  modified_base 1: mod_base = OTHER; note = 2'-O-methyluridine-3'-phosphorothioate
  modified_base 2: mod_base = OTHER; note = 2'-O-methylcytidine-3'-phosphorothioate
  modified_base 3: mod_base = OTHER; note = 2'-O-methylguanosine-3'-phosphate
  modified_base 4: mod_base = OTHER; note = 2'-O-methyladenosine-3'-phosphate
  modified_base 5: mod_base = OTHER; note = 2'-O-methylguanosine-3'-phosphate
  modified_base 6: mod_base = OTHER; note = 2'-O-methyladenosine-3'-phosphate
  modified_base 7: mod_base = OTHER; note = 2'-deoxy-2'-fluoroadenosine-3'-phosphate
  modified_base 8: mod_base = OTHER; note = 2'-O-methylguanosine-3'-phosphate
  modified_base 9: mod_base = OTHER; note = 2'-deoxy-2'-fluoroguanosine-3'-phosphate
  modified_base 10: mod_base = OTHER; note = 2'-deoxy-2'-fluoroadenosine-3'-phosphate
  modified_base 11: mod_base = OTHER; note = 2'-deoxy-2'-fluorocytidine-3'-phosphate
  modified_base 12: mod_base = OTHER; note = 2'-O-methyladenosine-3'-phosphate
  modified_base 13: mod_base = OTHER; note = 2'-O-methyladenosine-3'-phosphate
  modified_base 14: mod_base = OTHER; note = 2'-O-methyladenosine-3'-phosphate
  modified_base 15: mod_base = OTHER; note = 2'-O-methyluridine-3'-phosphate
  modified_base 16: mod_base = OTHER; note = 2'-O-methyladenosine-3'-phosphate
  modified_base 17: mod_base = OTHER; note = 2'-O-methylcytidine-3'-phosphate
  modified_base 18: mod_base = OTHER; note = 2'-O-methyladenosine-3'-phosphate
  modified_base 19: mod_base = OTHER; note = 2'-O-methyluridine-3'-phosphate
  modified_base 20: mod_base = OTHER; note = 2'-O-methyluridine-3'-phosphate
  modified_base 21: mod_base = OTHER; note = 2'-O-methyladenosine-3'-phosphate ((2S,4R)-1-[29-[[2-(acetylamino)-2-deoxy-beta-D-galactopyra nosyl]oxy]-14,14-bis[[3-[[3-[[5-[[2-(acetylamino)-2-deoxy-b eta-D-galactopyranosyl]oxy]-1-oxopentyl]amino]propyl]amino] -3-oxopropoxy]methyl]-1,12,19,25-tetraoxo-16-oxa-13,20,24-t riazanonacos-1-yl]-4-hydroxy-2-pyrrolidinyl)methyl ester
tcgagaaggacaaatacatta

SEQ ID NO: 901 - RNA, 21 nt, synthetic construct
  source 1..21: mol_type = other RNA
  modified_base 1: mod_base = OTHER; note = 2'-O-methyluridine-3'-phosphorothioate
  modified_base 2: mod_base = OTHER; note = 2'-O-methylcytidine-3'-phosphorothioate
  modified_base 3: mod_base = OTHER; note = 2'-O-methylguanosine-3'-phosphate
  modified_base 4: mod_base = OTHER; note = 2'-O-methyladenosine-3'-phosphate
  modified_base 5: mod_base = OTHER; note = 2'-O-methylguanosine-3'-phosphate
  modified_base 6: mod_base = OTHER; note = 2'-O-methyladenosine-3'-phosphate
  modified_base 7: mod_base = OTHER; note = 2'-deoxy-2'-fluoroadenosine-3'-phosphate
  modified_base 8: mod_base = OTHER; note = 2'-O-methylguanosine-3'-phosphate
  modified_base 9: mod_base = OTHER; note = 2'-deoxy-2'-fluoroguanosine-3'-phosphate
  modified_base 10: mod_base = OTHER; note = 2'-deoxy-2'-fluoroadenosine-3'-phosphate
  modified_base 11: mod_base = OTHER; note = 2'-deoxy-2'-fluorocytidine-3'-phosphate
  modified_base 12: mod_base = OTHER; note = 2'-O-methyladenosine-3'-phosphate
  modified_base 13: mod_base = OTHER; note = 2'-O-methyladenosine-3'-phosphate
  modified_base 14: mod_base = OTHER; note = 2'-O-methyladenosine-3'-phosphate
  modified_base 15: mod_base = OTHER; note = 2'-O-methyluridine-3'-phosphate
  modified_base 16: mod_base = OTHER; note = 2'-O-methyluridine-3'-phosphate
  modified_base 17: mod_base = OTHER; note = 2'-O-methylcytidine-3'-phosphate
  modified_base 18: mod_base = OTHER; note = 2'-O-methyladenosine-3'-phosphate
  modified_base 19: mod_base = OTHER; note = 2'-O-methyluridine-3'-phosphate
  modified_base 20: mod_base = OTHER; note = 2'-O-methyluridine-3'-phosphate
  modified_base 21: mod_base = OTHER; note = 2'-O-methyladenosine-3'-phosphate ((2S,4R)-1-[29-[[2-(acetylamino)-2-deoxy-beta-D-galactopyra nosyl]oxy]-14,14-bis[[3-[[3-[[5-[[2-(acetylamino)-2-deoxy-b eta-D-galactopyranosyl]oxy]-1-oxopentyl]amino]propyl]amino] -3-oxopropoxy]methyl]-1,12,19,25-tetraoxo-16-oxa-13,20,24-t riazanonacos-1-yl]-4-hydroxy-2-pyrrolidinyl)methyl ester
tcgagaaggacaaattcatta

SEQ ID NO: 902 - RNA, 21 nt, synthetic construct
  source 1..21: mol_type = other RNA
  modified_base 1: mod_base = OTHER; note = 2'-O-methylcytidine-3'-phosphorothioate
  modified_base 2: mod_base = OTHER; note = 2'-O-methylguanosine-3'-phosphorothioate
  modified_base 3: mod_base = OTHER; note = 2'-O-methyladenosine-3'-phosphate
  modified_base 4: mod_base = OTHER; note = 2'-O-methylguanosine-3'-phosphate
  modified_base 5: mod_base = OTHER; note = 2'-O-methyladenosine-3'-phosphate
  modified_base 6: mod_base = OTHER; note = 2'-O-methyladenosine-3'-phosphate
  modified_base 7: mod_base = OTHER; note = 2'-deoxy-2'-fluoroguanosine-3'-phosphate
  modified_base 8: mod_base = OTHER; note = 2'-O-methylguanosine-3'-phosphate
  modified_base 9: mod_base = OTHER; note = 2'-deoxy-2'-fluoroadenosine-3'-phosphate
  modified_base 10: mod_base = OTHER; note = 2'-deoxy-2'-fluorocytidine-3'-phosphate
  modified_base 11: mod_base = OTHER; note = 2'-deoxy-2'-fluoroadenosine-3'-phosphate
  modified_base 12: mod_base = OTHER; note = 2'-O-methyladenosine-3'-phosphate
  modified_base 13: mod_base = OTHER; note = 2'-O-methyladenosine-3'-phosphate
  modified_base 14: mod_base = OTHER; note = 2'-O-methyluridine-3'-phosphate
  modified_base 15: mod_base = OTHER; note = 2'-O-methyladenosine-3'-phosphate
  modified_base 16: mod_base = OTHER; note = 2'-O-methylcytidine-3'-phosphate
  modified_base 17: mod_base = OTHER; note = 2'-O-methyladenosine-3'-phosphate
  modified_base 18: mod_base = OTHER; note = 2'-O-methyluridine-3'-phosphate
  modified_base 19: mod_base = OTHER; note = 2'-O-methyluridine-3'-phosphate
  modified_base 20: mod_base = OTHER; note = 2'-O-methyluridine-3'-phosphate
  modified_base 21: mod_base = OTHER; note = 2'-O-methyladenosine-3'-phosphate ((2S,4R)-1-[29-[[2-(acetylamino)-2-deoxy-beta-D-galactopyra nosyl]oxy]-14,14-bis[[3-[[3-[[5-[[2-(acetylamino)-2-deoxy-b eta-D-galactopyranosyl]oxy]-1-oxopentyl]amino]propyl]amino] -3-oxopropoxy]methyl]-1,12,19,25-tetraoxo-16-oxa-13,20,24-t riazanonacos-1-yl]-4-hydroxy-2-pyrrolidinyl)methyl ester
cgagaaggacaaatacattta

SEQ ID NO: 903 - RNA, 21 nt, synthetic construct
  source 1..21: mol_type = other RNA
  modified_base 1: mod_base = OTHER; note = 2'-O-methylcytidine-3'-phosphorothioate
  modified_base 2: mod_base = OTHER; note = 2'-O-methylguanosine-3'-phosphorothioate
  modified_base 3: mod_base = OTHER; note = 2'-O-methyladenosine-3'-phosphate
  modified_base 4: mod_base = OTHER; note = 2'-O-methylguanosine-3'-phosphate
  modified_base 5: mod_base = OTHER; note = 2'-O-methyladenosine-3'-phosphate
  modified_base 6: mod_base = OTHER; note = 2'-O-methyladenosine-3'-phosphate
  modified_base 7: mod_base = OTHER; note = 2'-deoxy-2'-fluoroguanosine-3'-phosphate
  modified_base 8: mod_base = OTHER; note = 2'-O-methylguanosine-3'-phosphate
  modified_base 9: mod_base = OTHER; note = 2'-deoxy-2'-fluoroadenosine-3'-phosphate
  modified_base 10: mod_base = OTHER; note = 2'-deoxy-2'-fluorocytidine-3'-phosphate
  modified_base 11: mod_base = OTHER; note = 2'-deoxy-2'-fluoroadenosine-3'-phosphate
  modified_base 12: mod_base = OTHER; note = 2'-O-methyladenosine-3'-phosphate
  modified_base 13: mod_base = OTHER; note = 2'-O-methyladenosine-3'-phosphate
  modified_base 14: mod_base = OTHER; note = 2'-O-methyluridine-3'-phosphate
  modified_base 15: mod_base = OTHER; note = 2'-O-methyluridine-3'-phosphate
  modified_base 16: mod_base = OTHER; note = 2'-O-methylcytidine-3'-phosphate
  modified_base 17: mod_base = OTHER; note = 2'-O-methyladenosine-3'-phosphate
  modified_base 18: mod_base = OTHER; note = 2'-O-methyluridine-3'-phosphate
  modified_base 19: mod_base = OTHER; note = 2'-O-methyluridine-3'-phosphate
  modified_base 20: mod_base = OTHER; note = 2'-O-methyluridine-3'-phosphate
  modified_base 21: mod_base = OTHER; note = 2'-O-methyladenosine-3'-phosphate ((2S,4R)-1-[29-[[2-(acetylamino)-2-deoxy-beta-D-galactopyra nosyl]oxy]-14,14-bis[[3-[[3-[[5-[[2-(acetylamino)-2-deoxy-b eta-D-galactopyranosyl]oxy]-1-oxopentyl]amino]propyl]amino] -3-oxopropoxy]methyl]-1,12,19,25-tetraoxo-16-oxa-13,20,24-t riazanonacos-1-yl]-4-hydroxy-2-pyrrolidinyl)methyl ester
cgagaaggacaaattcattta

SEQ ID NO: 904 - RNA, 21 nt, synthetic construct
  source 1..21: mol_type = other RNA
  modified_base 1: mod_base = OTHER; note = 2'-O-methylguanosine-3'-phosphorothioate
  modified_base 2: mod_base = OTHER; note = 2'-O-methyladenosine-3'-phosphorothioate
  modified_base 3: mod_base = OTHER; note = 2'-O-methylguanosine-3'-phosphate
  modified_base 4: mod_base = OTHER; note = 2'-O-methyladenosine-3'-phosphate
  modified_base 5: mod_base = OTHER; note = 2'-O-methyladenosine-3'-phosphate
  modified_base 6: mod_base = OTHER; note = 2'-O-methylguanosine-3'-phosphate
  modified_base 7: mod_base = OTHER; note = 2'-deoxy-2'-fluoroguanosine-3'-phosphate
  modified_base 8: mod_base = OTHER; note = 2'-O-methyladenosine-3'-phosphate
  modified_base 9: mod_base = OTHER; note = 2'-deoxy-2'-fluorocytidine-3'-phosphate
  modified_base 10: mod_base = OTHER; note = 2'-deoxy-2'-fluoroadenosine-3'-phosphate
  modified_base 11: mod_base = OTHER; note = 2'-deoxy-2'-fluoroadenosine-3'-phosphate
  modified_base 12: mod_base = OTHER; note = 2'-O-methyladenosine-3'-phosphate
  modified_base 13: mod_base = OTHER; note = 2'-O-methyluridine-3'-phosphate
  modified_base 14: mod_base = OTHER; note = 2'-O-methyladenosine-3'-phosphate
  modified_base 15: mod_base = OTHER; note = 2'-O-methylcytidine-3'-phosphate
  modified_base 16: mod_base = OTHER; note = 2'-O-methyladenosine-3'-phosphate
  modified_base 17: mod_base = OTHER; note = 2'-O-methyluridine-3'-phosphate
  modified_base 18: mod_base = OTHER; note = 2'-O-methyluridine-3'-phosphate
  modified_base 19: mod_base = OTHER; note = 2'-O-methyluridine-3'-phosphate
  modified_base 20: mod_base = OTHER; note = 2'-O-methyluridine-3'-phosphate
  modified_base 21: mod_base = OTHER; note = 2'-O-methyladenosine-3'-phosphate ((2S,4R)-1-[29-[[2-(acetylamino)-2-deoxy-beta-D-galactopyra nosyl]oxy]-14,14-bis[[3-[[3-[[5-[[2-(acetylamino)-2-deoxy-b eta-D-galactopyranosyl]oxy]-1-oxopentyl]amino]propyl]amino] -3-oxopropoxy]methyl]-1,12,19,25-tetraoxo-16-oxa-13,20,24-t riazanonacos-1-yl]-4-hydroxy-2-pyrrolidinyl)methyl ester
gagaaggacaaatacatttta

SEQ ID NO: 905 - RNA, 21 nt, synthetic construct
  source 1..21: mol_type = other RNA
  modified_base 1: mod_base = OTHER; note = 2'-O-methyladenosine-3'-phosphorothioate
  modified_base 2: mod_base = OTHER; note = 2'-O-methylguanosine-3'-phosphorothioate
  modified_base 3: mod_base = OTHER; note = 2'-O-methyladenosine-3'-phosphate
  modified_base 4: mod_base = OTHER; note = 2'-O-methyladenosine-3'-phosphate
  modified_base 5: mod_base = OTHER; note = 2'-O-methylguanosine-3'-phosphate
  modified_base 6: mod_base = OTHER; note = 2'-O-methylguanosine-3'-phosphate
  modified_base 7: mod_base = OTHER; note = 2'-deoxy-2'-fluoroadenosine-3'-phosphate
  modified_base 8: mod_base = OTHER; note = 2'-O-methylcytidine-3'-phosphate
  modified_base 9: mod_base = OTHER; note = 2'-deoxy-2'-fluoroadenosine-3'-phosphate
  modified_base 10: mod_base = OTHER; note = 2'-deoxy-2'-fluoroadenosine-3'-phosphate
  modified_base 11: mod_base = OTHER; note = 2'-deoxy-2'-fluoroadenosine-3'-phosphate
  modified_base 12: mod_base = OTHER; note = 2'-O-methyluridine-3'-phosphate
  modified_base 13: mod_base = OTHER; note = 2'-O-methyladenosine-3'-phosphate
  modified_base 14: mod_base = OTHER; note = 2'-O-methylcytidine-3'-phosphate
  modified_base 15: mod_base = OTHER; note = 2'-O-methyladenosine-3'-phosphate
  modified_base 16: mod_base = OTHER; note = 2'-O-methyluridine-3'-phosphate
  modified_base 17: mod_base = OTHER; note = 2'-O-methyluridine-3'-phosphate
  modified_base 18: mod_base = OTHER; note = 2'-O-methyluridine-3'-phosphate
  modified_base 19: mod_base = OTHER; note = 2'-O-methyluridine-3'-phosphate
  modified_base 20: mod_base = OTHER; note = 2'-O-methyladenosine-3'-phosphate
  modified_base 21: mod_base = OTHER; note = 2'-O-methyladenosine-3'-phosphate ((2S,4R)-1-[29-[[2-(acetylamino)-2-deoxy-beta-D-galactopyra nosyl]oxy]-14,14-bis[[3-[[3-[[5-[[2-(acetylamino)-2-deoxy-b eta-D-galactopyranosyl]oxy]-1-oxopentyl]amino]propyl]amino] -3-oxopropoxy]methyl]-1,12,19,25-tetraoxo-16-oxa-13,20,24-t riazanonacos-1-yl]-4-hydroxy-2-pyrrolidinyl)methyl ester
agaaggacaaatacattttaa

SEQ ID NO: 906 - RNA, 21 nt, synthetic construct
  source 1..21: mol_type = other RNA
  modified_base 1: mod_base = OTHER; note = 2'-O-methylguanosine-3'-phosphorothioate
  modified_base 2: mod_base = OTHER; note = 2'-O-methyladenosine-3'-phosphorothioate
  modified_base 3: mod_base = OTHER; note = 2'-O-methyladenosine-3'-phosphate
  modified_base 4: mod_base = OTHER; note = 2'-O-methylguanosine-3'-phosphate
  modified_base 5: mod_base = OTHER; note = 2'-O-methylguanosine-3'-phosphate
  modified_base 6: mod_base = OTHER; note = 2'-O-methyladenosine-3'-phosphate
  modified_base 7: mod_base = OTHER; note = 2'-deoxy-2'-fluorocytidine-3'-phosphate
  modified_base 8: mod_base = OTHER; note = 2'-O-methyladenosine-3'-phosphate
  modified_base 9: mod_base = OTHER; note = 2'-deoxy-2'-fluoroadenosine-3'-phosphate
  modified_base 10: mod_base = OTHER; note = 2'-deoxy-2'-fluoroadenosine-3'-phosphate
  modified_base 11: mod_base = OTHER; note = 2'-deoxy-2'-fluorouridine-3'-phosphate
  modified_base 12: mod_base = OTHER; note = 2'-O-methyladenosine-3'-phosphate
  modified_base 13: mod_base = OTHER; note = 2'-O-methylcytidine-3'-phosphate
  modified_base 14: mod_base = OTHER; note = 2'-O-methyladenosine-3'-phosphate
  modified_base 15: mod_base = OTHER; note = 2'-O-methyluridine-3'-phosphate
  modified_base 16: mod_base = OTHER; note = 2'-O-methyluridine-3'-phosphate
  modified_base 17: mod_base = OTHER; note = 2'-O-methyluridine-3'-phosphate
  modified_base 18: mod_base = OTHER; note = 2'-O-methyluridine-3'-phosphate
  modified_base 19: mod_base = OTHER; note = 2'-O-methyladenosine-3'-phosphate
  modified_base 20: mod_base = OTHER; note = 2'-O-methylcytidine-3'-phosphate
  modified_base 21: mod_base = OTHER; note = 2'-O-methyladenosine-3'-phosphate ((2S,4R)-1-[29-[[2-(acetylamino)-2-deoxy-beta-D-galactopyra nosyl]oxy]-14,14-bis[[3-[[3-[[5-[[2-(acetylamino)-2-deoxy-b eta-D-galactopyranosyl]oxy]-1-oxopentyl]amino]propyl]amino] -3-oxopropoxy]methyl]-1,12,19,25-tetraoxo-16-oxa-13,20,24-t riazanonacos-1-yl]-4-hydroxy-2-pyrrolidinyl)methyl ester
gaaggacaaatacattttaca

SEQ ID NO: 907 - RNA, 21 nt, synthetic construct
  source 1..21: mol_type = other RNA
  modified_base 1: mod_base = OTHER; note = 2'-O-methyladenosine-3'-phosphorothioate
  modified_base 2: mod_base = OTHER; note = 2'-O-methyladenosine-3'-phosphorothioate
  modified_base 3: mod_base = OTHER; note = 2'-O-methylguanosine-3'-phosphate
  modified_base 4: mod_base = OTHER; note = 2'-O-methylguanosine-3'-phosphate
  modified_base 5: mod_base = OTHER; note = 2'-O-methyladenosine-3'-phosphate
  modified_base 6: mod_base = OTHER; note = 2'-O-methylcytidine-3'-phosphate
  modified_base 7: mod_base = OTHER; note = 2'-deoxy-2'-fluoroadenosine-3'-phosphate
  modified_base 8: mod_base = OTHER; note = 2'-O-methyladenosine-3'-phosphate
  modified_base 9: mod_base = OTHER; note = 2'-deoxy-2'-fluoroadenosine-3'-phosphate
  modified_base 10: mod_base = OTHER; note = 2'-deoxy-2'-fluorouridine-3'-phosphate
  modified_base 11: mod_base = OTHER; note = 2'-deoxy-2'-fluoroadenosine-3'-phosphate
  modified_base 12: mod_base = OTHER; note = 2'-O-methylcytidine-3'-phosphate
  modified_base 13: mod_base = OTHER; note = 2'-O-methyladenosine-3'-phosphate
  modified_base 14: mod_base = OTHER; note = 2'-O-methyluridine-3'-phosphate
  modified_base 15: mod_base = OTHER; note = 2'-O-methyluridine-3'-phosphate
  modified_base 16: mod_base = OTHER; note = 2'-O-methyluridine-3'-phosphate
  modified_base 17: mod_base = OTHER; note = 2'-O-methyluridine-3'-phosphate
  modified_base 18: mod_base = OTHER; note = 2'-O-methyladenosine-3'-phosphate
  modified_base 19: mod_base = OTHER; note = 2'-O-methylcytidine-3'-phosphate
  modified_base 20: mod_base = OTHER; note = 2'-O-methyladenosine-3'-phosphate
  modified_base 21: mod_base = OTHER; note = 2'-O-methyladenosine-3'-phosphate ((2S,4R)-1-[29-[[2-(acetylamino)-2-deoxy-beta-D-galactopyra nosyl]oxy]-14,14-bis[[3-[[3-[[5-[[2-(acetylamino)-2-deoxy-b eta-D-galactopyranosyl]oxy]-1-oxopentyl]amino]propyl]amino] -3-oxopropoxy]methyl]-1,12,19,25-tetraoxo-16-oxa-13,20,24-t riazanonacos-1-yl]-4-hydroxy-2-pyrrolidinyl)methyl ester
aaggacaaatacattttacaa

SEQ ID NO: 908 - RNA, 21 nt, synthetic construct
  source 1..21: mol_type = other RNA
  modified_base 1: mod_base = OTHER; note = 2'-O-methyladenosine-3'-phosphorothioate
  modified_base 2: mod_base = OTHER; note = 2'-O-methylguanosine-3'-phosphorothioate
  modified_base 3: mod_base = OTHER; note = 2'-O-methylguanosine-3'-phosphate
  modified_base 4: mod_base = OTHER; note = 2'-O-methyladenosine-3'-phosphate
  modified_base 5: mod_base = OTHER; note = 2'-O-methylcytidine-3'-phosphate
  modified_base 6: mod_base = OTHER; note = 2'-O-methyladenosine-3'-phosphate
  modified_base 7: mod_base = OTHER; note = 2'-deoxy-2'-fluoroadenosine-3'-phosphate
  modified_base 8: mod_base = OTHER; note = 2'-O-methyladenosine-3'-phosphate
  modified_base 9: mod_base = OTHER; note = 2'-deoxy-2'-fluorouridine-3'-phosphate
  modified_base 10: mod_base = OTHER; note = 2'-deoxy-2'-fluoroadenosine-3'-phosphate
  modified_base 11: mod_base = OTHER; note = 2'-deoxy-2'-fluorocytidine-3'-phosphate
  modified_base 12: mod_base = OTHER; note = 2'-O-methyladenosine-3'-phosphate
  modified_base 13: mod_base = OTHER; note = 2'-O-methyluridine-3'-phosphate
  modified_base 14: mod_base = OTHER; note = 2'-O-methyluridine-3'-phosphate
  modified_base 15: mod_base = OTHER; note = 2'-O-methyluridine-3'-phosphate
  modified_base 16: mod_base = OTHER; note = 2'-O-methyluridine-3'-phosphate
  modified_base 17: mod_base = OTHER; note = 2'-O-methyladenosine-3'-phosphate
  modified_base 18: mod_base = OTHER; note = 2'-O-methylcytidine-3'-phosphate
  modified_base 19: mod_base = OTHER; note = 2'-O-methyladenosine-3'-phosphate
  modified_base 20: mod_base = OTHER; note = 2'-O-methyladenosine-3'-phosphate
  modified_base 21: mod_base = OTHER; note = 2'-O-methyladenosine-3'-phosphate ((2S,4R)-1-[29-[[2-(acetylamino)-2-deoxy-beta-D-galactopyra nosyl]oxy]-14,14-bis[[3-[[3-[[5-[[2-(acetylamino)-2-deoxy-b eta-D-galactopyranosyl]oxy]-1-oxopentyl]amino]propyl]amino] -3-oxopropoxy]methyl]-1,12,19,25-tetraoxo-16-oxa-13,20,24-t riazanonacos-1-yl]-4-hydroxy-2-pyrrolidinyl)methyl ester
aggacaaatacattttacaaa

SEQ ID NO: 909 - RNA, 21 nt, synthetic construct
  source 1..21: mol_type = other RNA
  modified_base 1: mod_base = OTHER; note = 2'-O-methylguanosine-3'-phosphorothioate
  modified_base 2: mod_base = OTHER; note = 2'-O-methylguanosine-3'-phosphorothioate
  modified_base 3: mod_base = OTHER; note = 2'-O-methyladenosine-3'-phosphate
  modified_base 4: mod_base = OTHER; note = 2'-O-methylcytidine-3'-phosphate
  modified_base 5: mod_base = OTHER; note = 2'-O-methyladenosine-3'-phosphate
  modified_base 6: mod_base = OTHER; note = 2'-O-methyladenosine-3'-phosphate
  modified_base 7: mod_base = OTHER; note = 2'-deoxy-2'-fluoroadenosine-3'-phosphate
  modified_base 8: mod_base = OTHER; note = 2'-O-methyluridine-3'-phosphate
  modified_base 9: mod_base = OTHER; note = 2'-deoxy-2'-fluoroadenosine-3'-phosphate
  modified_base 10: mod_base = OTHER; note = 2'-deoxy-2'-fluorocytidine-3'-phosphate
  modified_base 11: mod_base = OTHER; note = 2'-deoxy-2'-fluoroadenosine-3'-phosphate
  modified_base 12: mod_base = OTHER; note = 2'-O-methyluridine-3'-phosphate
  modified_base 13: mod_base = OTHER; note = 2'-O-methyluridine-3'-phosphate
  modified_base 14: mod_base = OTHER; note = 2'-O-methyluridine-3'-phosphate
  modified_base 15: mod_base = OTHER; note = 2'-O-methyluridine-3'-phosphate
  modified_base 16: mod_base = OTHER; note = 2'-O-methyladenosine-3'-phosphate
  modified_base 17: mod_base = OTHER; note = 2'-O-methylcytidine-3'-phosphate
  modified_base 18: mod_base = OTHER; note = 2'-O-methyladenosine-3'-phosphate
  modified_base 19: mod_base = OTHER; note = 2'-O-methyladenosine-3'-phosphate
  modified_base 20: mod_base = OTHER; note = 2'-O-methylguanosine-3'-phosphate
  modified_base 21: mod_base = OTHER; note = 2'-O-methyladenosine-3'-phosphate ((2S,4R)-1-[29-[[2-(acetylamino)-2-deoxy-beta-D-galactopyra nosyl]oxy]-14,14-bis[[3-[[3-[[5-[[2-(acetylamino)-2-deoxy-b eta-D-galactopyranosyl]oxy]-1-oxopentyl]amino]propyl]amino] -3-oxopropoxy]methyl]-1,12,19,25-tetraoxo-16-oxa-13,20,24-t riazanonacos-1-yl]-4-hydroxy-2-pyrrolidinyl)methyl ester
ggacaaatacattttacaaga

SEQ ID NO: 910 - RNA, 21 nt, synthetic construct
  source 1..21: mol_type = other RNA
  modified_base 1: mod_base = OTHER; note = 2'-O-methylguanosine-3'-phosphorothioate
  modified_base 2: mod_base = OTHER; note = 2'-O-methyladenosine-3'-phosphorothioate
  modified_base 3: mod_base = OTHER; note = 2'-O-methylcytidine-3'-phosphate
  modified_base 4: mod_base = OTHER; note = 2'-O-methyladenosine-3'-phosphate
  modified_base 5: mod_base = OTHER; note = 2'-O-methyladenosine-3'-phosphate
  modified_base 6: mod_base = OTHER; note = 2'-O-methyladenosine-3'-phosphate
  modified_base 7: mod_base = OTHER; note = 2'-deoxy-2'-fluorouridine-3'-phosphate
  modified_base 8: mod_base = OTHER; note = 2'-O-methyladenosine-3'-phosphate
  modified_base 9: mod_base = OTHER; note = 2'-deoxy-2'-fluorocytidine-3'-phosphate
  modified_base 10: mod_base = OTHER; note = 2'-deoxy-2'-fluoroadenosine-3'-phosphate
  modified_base 11: mod_base = OTHER; note = 2'-deoxy-2'-fluorouridine-3'-phosphate
  modified_base 12: mod_base = OTHER; note = 2'-O-methyluridine-3'-phosphate
  modified_base 13: mod_base = OTHER; note = 2'-O-methyluridine-3'-phosphate
  modified_base 14: mod_base = OTHER; note = 2'-O-methyluridine-3'-phosphate
  modified_base 15: mod_base = OTHER; note = 2'-O-methyladenosine-3'-phosphate
  modified_base 16: mod_base = OTHER; note = 2'-O-methylcytidine-3'-phosphate
  modified_base 17: mod_base = OTHER; note = 2'-O-methyladenosine-3'-phosphate
  modified_base 18: mod_base = OTHER; note = 2'-O-methyladenosine-3'-phosphate
  modified_base 19: mod_base = OTHER; note = 2'-O-methylguanosine-3'-phosphate
  modified_base 20: mod_base = OTHER; note = 2'-O-methylguanosine-3'-phosphate
  modified_base 21: mod_base = OTHER; note = 2'-O-methyladenosine-3'-phosphate ((2S,4R)-1-[29-[[2-(acetylamino)-2-deoxy-beta-D-galactopyra nosyl]oxy]-14,14-bis[[3-[[3-[[5-[[2-(acetylamino)-2-deoxy-b eta-D-galactopyranosyl]oxy]-1-oxopentyl]amino]propyl]amino] -3-oxopropoxy]methyl]-1,12,19,25-tetraoxo-16-oxa-13,20,24-t riazanonacos-1-yl]-4-hydroxy-2-pyrrolidinyl)methyl ester
gacaaatacattttacaagga

SEQ ID NO: 911 - RNA, 21 nt, synthetic construct
  source 1..21: mol_type = other RNA
  modified_base 1: mod_base = OTHER; note = 2'-O-methylguanosine-3'-phosphorothioate
  modified_base 2: mod_base = OTHER; note = 2'-O-methyladenosine-3'-phosphorothioate
  modified_base 3: mod_base = OTHER; note = 2'-O-methylcytidine-3'-phosphate
  modified_base 4: mod_base = OTHER; note = 2'-O-methyladenosine-3'-phosphate
  modified_base 5: mod_base = OTHER; note = 2'-O-methyladenosine-3'-phosphate
  modified_base 6: mod_base = OTHER; note = 2'-O-methyladenosine-3'-phosphate
  modified_base 7: mod_base = OTHER; note = 2'-deoxy-2'-fluorouridine-3'-phosphate
  modified_base 8: mod_base = OTHER; note = 2'-O-methyladenosine-3'-phosphate
  modified_base 9: mod_base = OTHER; note = 2'-deoxy-2'-fluorocytidine-3'-phosphate
  modified_base 10: mod_base = OTHER; note = 2'-deoxy-2'-fluoroadenosine-3'-phosphate
  modified_base 11: mod_base = OTHER; note = 2'-deoxy-2'-fluorouridine-3'-phosphate
  modified_base 12: mod_base = OTHER; note = 2'-O-methyluridine-3'-phosphate
  modified_base 13: mod_base = OTHER; note = 2'-O-methyluridine-3'-phosphate
  modified_base 14: mod_base = OTHER; note = 2'-O-methyluridine-3'-phosphate
  modified_base 15: mod_base = OTHER; note = 2'-O-methyluridine-3'-phosphate
  modified_base 16: mod_base = OTHER; note = 2'-O-methylcytidine-3'-phosphate
  modified_base 17: mod_base = OTHER; note = 2'-O-methyladenosine-3'-phosphate
  modified_base 18: mod_base = OTHER; note = 2'-O-methyladenosine-3'-phosphate
  modified_base 19: mod_base = OTHER; note = 2'-O-methylguanosine-3'-phosphate
  modified_base 20: mod_base = OTHER; note = 2'-O-methylguanosine-3'-phosphate
  modified_base 21: mod_base = OTHER; note = 2'-O-methyladenosine-3'-phosphate ((2S,4R)-1-[29-[[2-(acetylamino)-2-deoxy-beta-D-galactopyra nosyl]oxy]-14,14-bis[[3-[[3-[[5-[[2-(acetylamino)-2-deoxy-b eta-D-galactopyranosyl]oxy]-1-oxopentyl]amino]propyl]amino] -3-oxopropoxy]methyl]-1,12,19,25-tetraoxo-16-oxa-13,20,24-t riazanonacos-1-yl]-4-hydroxy-2-pyrrolidinyl)methyl ester
gacaaatacatttttcaagga

SEQ ID NO: 912 - RNA, 21 nt, synthetic construct
  source 1..21: mol_type = other RNA
  modified_base 1: mod_base = OTHER; note = 2'-O-methylcytidine-3'-phosphorothioate
  modified_base 2: mod_base = OTHER; note = 2'-O-methyluridine-3'-phosphorothioate
  modified_base 3: mod_base = OTHER; note = 2'-O-methylguanosine-3'-phosphate
  modified_base 4: mod_base = OTHER; note = 2'-O-methylguanosine-3'-phosphate
  modified_base 5: mod_base = OTHER; note = 2'-O-methyluridine-3'-phosphate
  modified_base 6: mod_base = OTHER; note = 2'-O-methylguanosine-3'-phosphate
  modified_base 7: mod_base = OTHER; note = 2'-deoxy-2'-fluorouridine-3'-phosphate
  modified_base 8: mod_base = OTHER; note = 2'-O-methylcytidine-3'-phosphate
  modified_base 9: mod_base = OTHER; note = 2'-deoxy-2'-fluorouridine-3'-phosphate
  modified_base 10: mod_base = OTHER; note = 2'-deoxy-2'-fluoroadenosine-3'-phosphate
  modified_base 11: mod_base = OTHER; note = 2'-deoxy-2'-fluorouridine-3'-phosphate
  modified_base 12: mod_base = OTHER; note = 2'-O-methylguanosine-3'-phosphate
  modified_base 13: mod_base = OTHER; note = 2'-O-methyluridine-3'-phosphate
  modified_base 14: mod_base = OTHER; note = 2'-O-methyluridine-3'-phosphate
  modified_base 15: mod_base = OTHER; note = 2'-O-methylcytidine-3'-phosphate
  modified_base 16: mod_base = OTHER; note = 2'-O-methylguanosine-3'-phosphate
  modified_base 17: mod_base = OTHER; note = 2'-O-methyluridine-3'-phosphate
  modified_base 18: mod_base = OTHER; note = 2'-O-methylguanosine-3'-phosphate
  modified_base 19: mod_base = OTHER; note = 2'-O-methyluridine-3'-phosphate
  modified_base 20: mod_base = OTHER; note = 2'-O-methyluridine-3'-phosphate
  modified_base 21: mod_base = OTHER; note = 2'-O-methyladenosine-3'-phosphate ((2S,4R)-1-[29-[[2-(acetylamino)-2-deoxy-beta-D-galactopyra nosyl]oxy]-14,14-bis[[3-[[3-[[5-[[2-(acetylamino)-2-deoxy-b eta-D-galactopyranosyl]oxy]-1-oxopentyl]amino]propyl]amino] -3-oxopropoxy]methyl]-1,12,19,25-tetraoxo-16-oxa-13,20,24-t riazanonacos-1-yl]-4-hydroxy-2-pyrrolidinyl)methyl ester
ctggtgtctatgttcgtgtta

SEQ ID NO: 913 - RNA, 21 nt, synthetic construct
  source 1..21: mol_type = other RNA
  modified_base 1: mod_base = OTHER; note = 2'-O-methyluridine-3'-phosphorothioate
  modified_base 2: mod_base = OTHER; note = 2'-O-methylguanosine-3'-phosphorothioate
  modified_base 3: mod_base = OTHER; note = 2'-O-methylguanosine-3'-phosphate
  modified_base 4: mod_base = OTHER; note = 2'-O-methyluridine-3'-phosphate
  modified_base 5: mod_base = OTHER; note = 2'-O-methylguanosine-3'-phosphate
  modified_base 6: mod_base = OTHER; note = 2'-O-methyluridine-3'-phosphate
  modified_base 7: mod_base = OTHER; note = 2'-deoxy-2'-fluorocytidine-3'-phosphate
  modified_base 8: mod_base = OTHER; note = 2'-O-methyluridine-3'-phosphate
  modified_base 9: mod_base = OTHER; note = 2'-deoxy-2'-fluoroadenosine-3'-phosphate
  modified_base 10: mod_base = OTHER; note = 2'-deoxy-2'-fluorouridine-3'-phosphate
  modified_base 11: mod_base = OTHER; note = 2'-deoxy-2'-fluoroguanosine-3'-phosphate
  modified_base 12: mod_base = OTHER; note = 2'-O-methyluridine-3'-phosphate
  modified_base 13: mod_base = OTHER; note = 2'-O-methyluridine-3'-phosphate
  modified_base 14: mod_base = OTHER; note = 2'-O-methylcytidine-3'-phosphate
  modified_base 15: mod_base = OTHER; note = 2'-O-methylguanosine-3'-phosphate
  modified_base 16: mod_base = OTHER; note = 2'-O-methyluridine-3'-phosphate
  modified_base 17: mod_base = OTHER; note = 2'-O-methylguanosine-3'-phosphate
  modified_base 18: mod_base = OTHER; note = 2'-O-methyluridine-3'-phosphate
  modified_base 19: mod_base = OTHER; note = 2'-O-methyluridine-3'-phosphate
  modified_base 20: mod_base = OTHER; note = 2'-O-methyluridine-3'-phosphate
  modified_base 21: mod_base = OTHER; note = 2'-O-methyladenosine-3'-phosphate ((2S,4R)-1-[29-[[2-(acetylamino)-2-deoxy-beta-D-galactopyra nosyl]oxy]-14,14-bis[[3-[[3-[[5-[[2-(acetylamino)-2-deoxy-b eta-D-galactopyranosyl]oxy]-1-oxopentyl]amino]propyl]amino] -3-oxopropoxy]methyl]-1,12,19,25-tetraoxo-16-oxa-13,20,24-t riazanonacos-1-yl]-4-hydroxy-2-pyrrolidinyl)methyl ester
tggtgtctatgttcgtgttta

SEQ ID NO: 914 - RNA, 21 nt, synthetic construct
  source 1..21: mol_type = other RNA
  modified_base 1: mod_base = OTHER; note = 2'-O-methylguanosine-3'-phosphorothioate
  modified_base 2: mod_base = OTHER; note = 2'-O-methylguanosine-3'-phosphorothioate
  modified_base 3: mod_base = OTHER; note = 2'-O-methyluridine-3'-phosphate
  modified_base 4: mod_base = OTHER; note = 2'-O-methylguanosine-3'-phosphate
  modified_base 5: mod_base = OTHER; note = 2'-O-methyluridine-3'-phosphate
  modified_base 6: mod_base = OTHER; note = 2'-O-methylcytidine-3'-phosphate
  modified_base 7: mod_base = OTHER; note = 2'-deoxy-2'-fluorouridine-3'-phosphate
  modified_base 8: mod_base = OTHER; note = 2'-O-methyladenosine-3'-phosphate
  modified_base 9: mod_base = OTHER; note = 2'-deoxy-2'-fluorouridine-3'-phosphate
  modified_base 10: mod_base = OTHER; note = 2'-deoxy-2'-fluoroguanosine-3'-phosphate
  modified_base 11: mod_base = OTHER; note = 2'-deoxy-2'-fluorouridine-3'-phosphate
  modified_base 12: mod_base = OTHER; note = 2'-O-methyluridine-3'-phosphate
  modified_base 13: mod_base = OTHER; note = 2'-O-methylcytidine-3'-phosphate
  modified_base 14: mod_base = OTHER; note = 2'-O-methylguanosine-3'-phosphate
  modified_base 15: mod_base = OTHER; note = 2'-O-methyluridine-3'-phosphate
  modified_base 16: mod_base = OTHER; note = 2'-O-methylguanosine-3'-phosphate
  modified_base 17: mod_base = OTHER; note = 2'-O-methyluridine-3'-phosphate
  modified_base 18: mod_base = OTHER; note = 2'-O-methyluridine-3'-phosphate
  modified_base 19: mod_base = OTHER; note = 2'-O-methyluridine-3'-phosphate
  modified_base 20: mod_base = OTHER; note = 2'-O-methylcytidine-3'-phosphate
  modified_base 21: mod_base = OTHER; note = 2'-O-methyladenosine-3'-phosphate ((2S,4R)-1-[29-[[2-(acetylamino)-2-deoxy-beta-D-galactopyra nosyl]oxy]-14,14-bis[[3-[[3-[[5-[[2-(acetylamino)-2-deoxy-b eta-D-galactopyranosyl]oxy]-1-oxopentyl]amino]propyl]amino] -3-oxopropoxy]methyl]-1,12,19,25-tetraoxo-16-oxa-13,20,24-t riazanonacos-1-yl]-4-hydroxy-2-pyrrolidinyl)methyl ester
ggtgtctatgttcgtgtttca

SEQ ID NO: 915 - RNA, 21 nt, synthetic construct
  source 1..21: mol_type = other RNA
  modified_base 1: mod_base = OTHER; note = 2'-O-methylguanosine-3'-phosphorothioate
  modified_base 2: mod_base = OTHER; note = 2'-O-methylguanosine-3'-phosphorothioate
  modified_base 3: mod_base = OTHER; note = 2'-O-methyluridine-3'-phosphate
  modified_base 4: mod_base = OTHER; note = 2'-O-methylguanosine-3'-phosphate
  modified_base 5: mod_base = OTHER; note = 2'-O-methyluridine-3'-phosphate
  modified_base 6: mod_base = OTHER; note = 2'-O-methylcytidine-3'-phosphate
  modified_base 7: mod_base = OTHER; note = 2'-deoxy-2'-fluorouridine-3'-phosphate
  modified_base 8: mod_base = OTHER; note = 2'-O-methyladenosine-3'-phosphate
  modified_base 9: mod_base = OTHER; note = 2'-deoxy-2'-fluorouridine-3'-phosphate
  modified_base 10: mod_base = OTHER; note = 2'-deoxy-2'-fluoroguanosine-3'-phosphate
  modified_base 11: mod_base = OTHER; note = 2'-deoxy-2'-fluorouridine-3'-phosphate
  modified_base 12: mod_base = OTHER; note = 2'-O-methyluridine-3'-phosphate
  modified_base 13: mod_base = OTHER; note = 2'-O-methylcytidine-3'-phosphate
  modified_base 14: mod_base = OTHER; note = 2'-O-methylguanosine-3'-phosphate
  modified_base 15: mod_base = OTHER; note = 2'-O-methyluridine-3'-phosphate
  modified_base 16: mod_base = OTHER; note = 2'-O-methyluridine-3'-phosphate
  modified_base 17: mod_base = OTHER; note = 2'-O-methyluridine-3'-phosphate
  modified_base 18: mod_base = OTHER; note = 2'-O-methyluridine-3'-phosphate
  modified_base 19: mod_base = OTHER; note = 2'-O-methyluridine-3'-phosphate
  modified_base 20: mod_base = OTHER; note = 2'-O-methylcytidine-3'-phosphate
  modified_base 21: mod_base = OTHER; note = 2'-O-methyladenosine-3'-phosphate ((2S,4R)-1-[29-[[2-(acetylamino)-2-deoxy-beta-D-galactopyra nosyl]oxy]-14,14-bis[[3-[[3-[[5-[[2-(acetylamino)-2-deoxy-b eta-D-galactopyranosyl]oxy]-1-oxopentyl]amino]propyl]amino] -3-oxopropoxy]methyl]-1,12,19,25-tetraoxo-16-oxa-13,20,24-t riazanonacos-1-yl]-4-hydroxy-2-pyrrolidinyl)methyl ester
ggtgtctatgttcgtttttca

SEQ ID NO: 916 - RNA, 21 nt, synthetic construct
  source 1..21: mol_type = other RNA
  modified_base 1: mod_base = OTHER; note = 2'-O-methylguanosine-3'-phosphorothioate
  modified_base 2: mod_base = OTHER; note = 2'-O-methyluridine-3'-phosphorothioate
  modified_base 3: mod_base = OTHER; note = 2'-O-methylguanosine-3'-phosphate
  modified_base 4: mod_base = OTHER; note = 2'-O-methyluridine-3'-phosphate
  modified_base 5: mod_base = OTHER; note = 2'-O-methylcytidine-3'-phosphate
  modified_base 6: mod_base = OTHER; note = 2'-O-methyluridine-3'-phosphate
  modified_base 7: mod_base = OTHER; note = 2'-deoxy-2'-fluoroadenosine-3'-phosphate
  modified_base 8: mod_base = OTHER; note = 2'-O-methyluridine-3'-phosphate
  modified_base 9: mod_base = OTHER; note = 2'-deoxy-2'-fluoroguanosine-3'-phosphate
  modified_base 10: mod_base = OTHER; note = 2'-deoxy-2'-fluorouridine-3'-phosphate
  modified_base 11: mod_base = OTHER; note = 2'-deoxy-2'-fluorouridine-3'-phosphate
  modified_base 12: mod_base = OTHER; note = 2'-O-methylcytidine-3'-phosphate
  modified_base 13: mod_base = OTHER; note = 2'-O-methylguanosine-3'-phosphate
  modified_base 14: mod_base = OTHER; note = 2'-O-methyluridine-3'-phosphate
  modified_base 15: mod_base = OTHER; note = 2'-O-methylguanosine-3'-phosphate
  modified_base 16: mod_base = OTHER; note = 2'-O-methyluridine-3'-phosphate
  modified_base 17: mod_base = OTHER; note = 2'-O-methyluridine-3'-phosphate
  modified_base 18: mod_base = OTHER; note = 2'-O-methyluridine-3'-phosphate
  modified_base 19: mod_base = OTHER; note = 2'-O-methylcytidine-3'-phosphate
  modified_base 20: mod_base = OTHER; note = 2'-O-methyladenosine-3'-phosphate
  modified_base 21: mod_base = OTHER; note = 2'-O-methyladenosine-3'-phosphate ((2S,4R)-1-[29-[[2-(acetylamino)-2-deoxy-beta-D-galactopyra nosyl]oxy]-14,14-bis[[3-[[3-[[5-[[2-(acetylamino)-2-deoxy-b eta-D-galactopyranosyl]oxy]-1-oxopentyl]amino]propyl]amino] -3-oxopropoxy]methyl]-1,12,19,25-tetraoxo-16-oxa-13,20,24-t riazanonacos-1-yl]-4-hydroxy-2-pyrrolidinyl)methyl ester
gtgtctatgttcgtgtttcaa

SEQ ID NO: 917 - RNA, 21 nt, synthetic construct
  source 1..21: mol_type = other RNA
  modified_base 1: mod_base = OTHER; note = 2'-O-methyluridine-3'-phosphorothioate
  modified_base 2: mod_base = OTHER; note = 2'-O-methylguanosine-3'-phosphorothioate
  modified_base 3: mod_base = OTHER; note = 2'-O-methyluridine-3'-phosphate
  modified_base 4: mod_base = OTHER; note = 2'-O-methylcytidine-3'-phosphate
  modified_base 5: mod_base = OTHER; note = 2'-O-methyluridine-3'-phosphate
  modified_base 6: mod_base = OTHER; note = 2'-O-methyladenosine-3'-phosphate
  modified_base 7: mod_base = OTHER; note = 2'-deoxy-2'-fluorouridine-3'-phosphate
  modified_base 8: mod_base = OTHER; note = 2'-O-methylguanosine-3'-phosphate
  modified_base 9: mod_base = OTHER; note = 2'-deoxy-2'-fluorouridine-3'-phosphate
  modified_base 10: mod_base = OTHER; note = 2'-deoxy-2'-fluorouridine-3'-phosphate
  modified_base 11: mod_base = OTHER; note = 2'-deoxy-2'-fluorocytidine-3'-phosphate
  modified_base 12: mod_base = OTHER; note = 2'-O-methylguanosine-3'-phosphate
  modified_base 13: mod_base = OTHER; note = 2'-O-methyluridine-3'-phosphate
  modified_base 14: mod_base = OTHER; note = 2'-O-methylguanosine-3'-phosphate
  modified_base 15: mod_base = OTHER; note = 2'-O-methyluridine-3'-phosphate
  modified_base 16: mod_base = OTHER; note = 2'-O-methyluridine-3'-phosphate
  modified_base 17: mod_base = OTHER; note = 2'-O-methyluridine-3'-phosphate
  modified_base 18: mod_base = OTHER; note = 2'-O-methylcytidine-3'-phosphate
  modified_base 19: mod_base = OTHER; note = 2'-O-methyladenosine-3'-phosphate
  modified_base 20: mod_base = OTHER; note = 2'-O-methyladenosine-3'-phosphate
  modified_base 21: mod_base = OTHER; note = 2'-O-methyladenosine-3'-phosphate ((2S,4R)-1-[29-[[2-(acetylamino)-2-deoxy-beta-D-galactopyra nosyl]oxy]-14,14-bis[[3-[[3-[[5-[[2-(acetylamino)-2-deoxy-b eta-D-galactopyranosyl]oxy]-1-oxopentyl]amino]propyl]amino] -3-oxopropoxy]methyl]-1,12,19,25-tetraoxo-16-oxa-13,20,24-t riazanonacos-1-yl]-4-hydroxy-2-pyrrolidinyl)methyl ester
tgtctatgttcgtgtttcaaa

SEQ ID NO: 918 - RNA, 21 nt, synthetic construct
  source 1..21: mol_type = other RNA
  modified_base 1: mod_base = OTHER; note = 2'-O-methylguanosine-3'-phosphorothioate
  modified_base 2: mod_base = OTHER; note = 2'-O-methyluridine-3'-phosphorothioate
  modified_base 3: mod_base = OTHER; note = 2'-O-methylcytidine-3'-phosphate
  modified_base 4: mod_base = OTHER; note = 2'-O-methyluridine-3'-phosphate
  modified_base 5: mod_base = OTHER; note = 2'-O-methyladenosine-3'-phosphate
  modified_base 6: mod_base = OTHER; note = 2'-O-methyluridine-3'-phosphate
  modified_base 7: mod_base = OTHER; note = 2'-deoxy-2'-fluoroguanosine-3'-phosphate
  modified_base 8: mod_base = OTHER; note = 2'-O-methyluridine-3'-phosphate
  modified_base 9: mod_base = OTHER; note = 2'-deoxy-2'-fluorouridine-3'-phosphate
  modified_base 10: mod_base = OTHER; note = 2'-deoxy-2'-fluorocytidine-3'-phosphate
  modified_base 11: mod_base = OTHER; note = 2'-deoxy-2'-fluoroguanosine-3'-phosphate
  modified_base 12: mod_base = OTHER; note = 2'-O-methyluridine-3'-phosphate
  modified_base 13: mod_base = OTHER; note = 2'-O-methylguanosine-3'-phosphate
  modified_base 14: mod_base = OTHER; note = 2'-O-methyluridine-3'-phosphate
  modified_base 15: mod_base = OTHER; note = 2'-O-methyluridine-3'-phosphate
  modified_base 16: mod_base = OTHER; note = 2'-O-methyluridine-3'-phosphate
  modified_base 17: mod_base = OTHER; note = 2'-O-methylcytidine-3'-phosphate
  modified_base 18: mod_base = OTHER; note = 2'-O-methyladenosine-3'-phosphate
  modified_base 19: mod_base = OTHER; note = 2'-O-methyladenosine-3'-phosphate
  modified_base 20: mod_base = OTHER; note = 2'-O-methylguanosine-3'-phosphate
  modified_base 21: mod_base = OTHER; note = 2'-O-methyladenosine-3'-phosphate ((2S,4R)-1-[29-[[2-(acetylamino)-2-deoxy-beta-D-galactopyra nosyl]oxy]-14,14-bis[[3-[[3-[[5-[[2-(acetylamino)-2-deoxy-b eta-D-galactopyranosyl]oxy]-1-oxopentyl]amino]propyl]amino] -3-oxopropoxy]methyl]-1,12,19,25-tetraoxo-16-oxa-13,20,24-t riazanonacos-1-yl]-4-hydroxy-2-pyrrolidinyl)methyl ester
gtctatgttcgtgtttcaaga

SEQ ID NO: 919 - RNA, 21 nt, synthetic construct
  source 1..21: mol_type = other RNA
  modified_base 1: mod_base = OTHER; note = 2'-O-methyluridine-3'-phosphorothioate
  modified_base 2: mod_base = OTHER; note = 2'-O-methylcytidine-3'-phosphorothioate
  modified_base 3: mod_base = OTHER; note = 2'-O-methyluridine-3'-phosphate
  modified_base 4: mod_base = OTHER; note = 2'-O-methyladenosine-3'-phosphate
  modified_base 5: mod_base = OTHER; note = 2'-O-methyluridine-3'-phosphate
  modified_base 6: mod_base = OTHER; note = 2'-O-methylguanosine-3'-phosphate
  modified_base 7: mod_base = OTHER; note = 2'-deoxy-2'-fluorouridine-3'-phosphate
  modified_base 8: mod_base = OTHER; note = 2'-O-methyluridine-3'-phosphate
  modified_base 9: mod_base = OTHER; note = 2'-deoxy-2'-fluorocytidine-3'-phosphate
  modified_base 10: mod_base = OTHER; note = 2'-deoxy-2'-fluoroguanosine-3'-phosphate
  modified_base 11: mod_base = OTHER; note = 2'-deoxy-2'-fluorouridine-3'-phosphate
  modified_base 12: mod_base = OTHER; note = 2'-O-methylguanosine-3'-phosphate
  modified_base 13: mod_base = OTHER; note = 2'-O-methyluridine-3'-phosphate
  modified_base 14: mod_base = OTHER; note = 2'-O-methyluridine-3'-phosphate
  modified_base 15: mod_base = OTHER; note = 2'-O-methyluridine-3'-phosphate
  modified_base 16: mod_base = OTHER; note = 2'-O-methylcytidine-3'-phosphate
  modified_base 17: mod_base = OTHER; note = 2'-O-methyladenosine-3'-phosphate
  modified_base 18: mod_base = OTHER; note = 2'-O-methyladenosine-3'-phosphate
  modified_base 19: mod_base = OTHER; note = 2'-O-methylguanosine-3'-phosphate
  modified_base 20: mod_base = OTHER; note = 2'-O-methylguanosine-3'-phosphate
  modified_base 21: mod_base = OTHER; note = 2'-O-methyladenosine-3'-phosphate ((2S,4R)-1-[29-[[2-(acetylamino)-2-deoxy-beta-D-galactopyra nosyl]oxy]-14,14-bis[[3-[[3-[[5-[[2-(acetylamino)-2-deoxy-b eta-D-galactopyranosyl]oxy]-1-oxopentyl]amino]propyl]amino] -3-oxopropoxy]methyl]-1,12,19,25-tetraoxo-16-oxa-13,20,24-t riazanonacos-1-yl]-4-hydroxy-2-pyrrolidinyl)methyl ester
tctatgttcgtgtttcaagga

SEQ ID NO: 920 - RNA, 21 nt, synthetic construct
  source 1..21: mol_type = other RNA
  modified_base 1: mod_base = OTHER; note = 2'-O-methylcytidine-3'-phosphorothioate
  modified_base 2: mod_base = OTHER; note = 2'-O-methyluridine-3'-phosphorothioate
  modified_base 3: mod_base = OTHER; note = 2'-O-methyladenosine-3'-phosphate
  modified_base 4: mod_base = OTHER; note = 2'-O-methyluridine-3'-phosphate
  modified_base 5: mod_base = OTHER; note = 2'-O-methylguanosine-3'-phosphate
  modified_base 6: mod_base = OTHER; note = 2'-O-methyluridine-3'-phosphate
  modified_base 7: mod_base = OTHER; note = 2'-deoxy-2'-fluorouridine-3'-phosphate
  modified_base 8: mod_base = OTHER; note = 2'-O-methylcytidine-3'-phosphate
  modified_base 9: mod_base = OTHER; note = 2'-deoxy-2'-fluoroguanosine-3'-phosphate
  modified_base 10: mod_base = OTHER; note = 2'-deoxy-2'-fluorouridine-3'-phosphate
  modified_base 11: mod_base = OTHER; note = 2'-deoxy-2'-fluoroguanosine-3'-phosphate
  modified_base 12: mod_base = OTHER; note = 2'-O-methyluridine-3'-phosphate
  modified_base 13: mod_base = OTHER; note = 2'-O-methyluridine-3'-phosphate
  modified_base 14: mod_base = OTHER; note = 2'-O-methyluridine-3'-phosphate
  modified_base 15: mod_base = OTHER; note = 2'-O-methylcytidine-3'-phosphate
  modified_base 16: mod_base = OTHER; note = 2'-O-methyladenosine-3'-phosphate
  modified_base 17: mod_base = OTHER; note = 2'-O-methyladenosine-3'-phosphate
  modified_base 18: mod_base = OTHER; note = 2'-O-methylguanosine-3'-phosphate
  modified_base 19: mod_base = OTHER; note = 2'-O-methylguanosine-3'-phosphate
  modified_base 20: mod_base = OTHER; note = 2'-O-methyluridine-3'-phosphate
  modified_base 21: mod_base = OTHER; note = 2'-O-methyladenosine-3'-phosphate ((2S,4R)-1-[29-[[2-(acetylamino)-2-deoxy-beta-D-galactopyra nosyl]oxy]-14,14-bis[[3-[[3-[[5-[[2-(acetylamino)-2-deoxy-b eta-D-galactopyranosyl]oxy]-1-oxopentyl]amino]propyl]amino] -3-oxopropoxy]methyl]-1,12,19,25-tetraoxo-16-oxa-13,20,24-t riazanonacos-1-yl]-4-hydroxy-2-pyrrolidinyl)methyl ester
ctatgttcgtgtttcaaggta

SEQ ID NO: 921 - RNA, 21 nt, synthetic construct
  source 1..21: mol_type = other RNA
  modified_base 1: mod_base = OTHER; note = 2'-O-methyluridine-3'-phosphorothioate
  modified_base 2: mod_base = OTHER; note = 2'-O-methyladenosine-3'-phosphorothioate
  modified_base 3: mod_base = OTHER; note = 2'-O-methyluridine-3'-phosphate
  modified_base 4: mod_base = OTHER; note = 2'-O-methylguanosine-3'-phosphate
  modified_base 5: mod_base = OTHER; note = 2'-O-methyluridine-3'-phosphate
  modified_base 6: mod_base = OTHER; note = 2'-O-methyluridine-3'-phosphate
  modified_base 7: mod_base = OTHER; note = 2'-deoxy-2'-fluorocytidine-3'-phosphate
  modified_base 8: mod_base = OTHER; note = 2'-O-methylguanosine-3'-phosphate
  modified_base 9: mod_base = OTHER; note = 2'-deoxy-2'-fluorouridine-3'-phosphate
  modified_base 10: mod_base = OTHER; note = 2'-deoxy-2'-fluoroguanosine-3'-phosphate
  modified_base 11: mod_base = OTHER; note = 2'-deoxy-2'-fluorouridine-3'-phosphate
  modified_base 12: mod_base = OTHER; note = 2'-O-methyluridine-3'-phosphate
  modified_base 13: mod_base = OTHER; note = 2'-O-methyluridine-3'-phosphate
  modified_base 14: mod_base = OTHER; note = 2'-O-methylcytidine-3'-phosphate
  modified_base 15: mod_base = OTHER; note = 2'-O-methyladenosine-3'-phosphate
  modified_base 16: mod_base = OTHER; note = 2'-O-methyladenosine-3'-phosphate
  modified_base 17: mod_base = OTHER; note = 2'-O-methylguanosine-3'-phosphate
  modified_base 18: mod_base = OTHER; note = 2'-O-methylguanosine-3'-phosphate
  modified_base 19: mod_base = OTHER; note = 2'-O-methyluridine-3'-phosphate
  modified_base 20: mod_base = OTHER; note = 2'-O-methyluridine-3'-phosphate
  modified_base 21: mod_base = OTHER; note = 2'-O-methyladenosine-3'-phosphate ((2S,4R)-1-[29-[[2-(acetylamino)-2-deoxy-beta-D-galactopyra nosyl]oxy]-14,14-bis[[3-[[3-[[5-[[2-(acetylamino)-2-deoxy-b eta-D-galactopyranosyl]oxy]-1-oxopentyl]amino]propyl]amino] -3-oxopropoxy]methyl]-1,12,19,25-tetraoxo-16-oxa-13,20,24-t riazanonacos-1-yl]-4-hydroxy-2-pyrrolidinyl)methyl ester
tatgttcgtgtttcaaggtta

SEQ ID NO: 922 - RNA, 21 nt, synthetic construct
  source 1..21: mol_type = other RNA
  modified_base 1: mod_base = OTHER; note = 2'-O-methyladenosine-3'-phosphorothioate
  modified_base 2: mod_base = OTHER; note = 2'-O-methyluridine-3'-phosphorothioate
  modified_base 3: mod_base = OTHER; note = 2'-O-methylguanosine-3'-phosphate
  modified_base 4: mod_base = OTHER; note = 2'-O-methyluridine-3'-phosphate
  modified_base 5: mod_base = OTHER; note = 2'-O-methyluridine-3'-phosphate
  modified_base 6: mod_base = OTHER; note = 2'-O-methylcytidine-3'-phosphate
  modified_base 7: mod_base = OTHER; note = 2'-deoxy-2'-fluoroguanosine-3'-phosphate
  modified_base 8: mod_base = OTHER; note = 2'-O-methyluridine-3'-phosphate
  modified_base 9: mod_base = OTHER; note = 2'-deoxy-2'-fluoroguanosine-3'-phosphate
  modified_base 10: mod_base = OTHER; note = 2'-deoxy-2'-fluorouridine-3'-phosphate
  modified_base 11: mod_base = OTHER; note = 2'-deoxy-2'-fluorouridine-3'-phosphate
  modified_base 12: mod_base = OTHER; note = 2'-O-methyluridine-3'-phosphate
  modified_base 13: mod_base = OTHER; note = 2'-O-methylcytidine-3'-phosphate
  modified_base 14: mod_base = OTHER; note = 2'-O-methyladenosine-3'-phosphate
  modified_base 15: mod_base = OTHER; note = 2'-O-methyladenosine-3'-phosphate
  modified_base 16: mod_base = OTHER; note = 2'-O-methylguanosine-3'-phosphate
  modified_base 17: mod_base = OTHER; note = 2'-O-methylguanosine-3'-phosphate
  modified_base 18: mod_base = OTHER; note = 2'-O-methyluridine-3'-phosphate
  modified_base 19: mod_base = OTHER; note = 2'-O-methyluridine-3'-phosphate
  modified_base 20: mod_base = OTHER; note = 2'-O-methyluridine-3'-phosphate
  modified_base 21: mod_base = OTHER; note = 2'-O-methyladenosine-3'-phosphate ((2S,4R)-1-[29-[[2-(acetylamino)-2-deoxy-beta-D-galactopyra nosyl]oxy]-14,14-bis[[3-[[3-[[5-[[2-(acetylamino)-2-deoxy-b eta-D-galactopyranosyl]oxy]-1-oxopentyl]amino]propyl]amino] -3-oxopropoxy]methyl]-1,12,19,25-tetraoxo-16-oxa-13,20,24-t riazanonacos-1-yl]-4-hydroxy-2-pyrrolidinyl)methyl ester
atgttcgtgtttcaaggttta

SEQ ID NO: 923 - RNA, 21 nt, synthetic construct
  source 1..21: mol_type = other RNA
  modified_base 1: mod_base = OTHER; note = 2'-O-methyluridine-3'-phosphorothioate
  modified_base 2: mod_base = OTHER; note = 2'-O-methylguanosine-3'-phosphorothioate
  modified_base 3: mod_base = OTHER; note = 2'-O-methyluridine-3'-phosphate
  modified_base 4: mod_base = OTHER; note = 2'-O-methyluridine-3'-phosphate
  modified_base 5: mod_base = OTHER; note = 2'-O-methylcytidine-3'-phosphate
  modified_base 6: mod_base = OTHER; note = 2'-O-methylguanosine-3'-phosphate
  modified_base 7: mod_base = OTHER; note = 2'-deoxy-2'-fluorouridine-3'-phosphate
  modified_base 8: mod_base = OTHER; note = 2'-O-methylguanosine-3'-phosphate
  modified_base 9: mod_base = OTHER; note = 2'-deoxy-2'-fluorouridine-3'-phosphate
  modified_base 10: mod_base = OTHER; note = 2'-deoxy-2'-fluorouridine-3'-phosphate
  modified_base 11: mod_base = OTHER; note = 2'-deoxy-2'-fluorouridine-3'-phosphate
  modified_base 12: mod_base = OTHER; note = 2'-O-methylcytidine-3'-phosphate
  modified_base 13: mod_base = OTHER; note = 2'-O-methyladenosine-3'-phosphate
  modified_base 14: mod_base = OTHER; note = 2'-O-methyladenosine-3'-phosphate
  modified_base 15: mod_base = OTHER; note = 2'-O-methylguanosine-3'-phosphate
  modified_base 16: mod_base = OTHER; note = 2'-O-methylguanosine-3'-phosphate
  modified_base 17: mod_base = OTHER; note = 2'-O-methyluridine-3'-phosphate
  modified_base 18: mod_base = OTHER; note = 2'-O-methyluridine-3'-phosphate
  modified_base 19: mod_base = OTHER; note = 2'-O-methyluridine-3'-phosphate
  modified_base 20: mod_base = OTHER; note = 2'-O-methylguanosine-3'-phosphate
  modified_base 21: mod_base = OTHER; note = 2'-O-methyladenosine-3'-phosphate ((2S,4R)-1-[29-[[2-(acetylamino)-2-deoxy-beta-D-galactopyra nosyl]oxy]-14,14-bis[[3-[[3-[[5-[[2-(acetylamino)-2-deoxy-b eta-D-galactopyranosyl]oxy]-1-oxopentyl]amino]propyl]amino] -3-oxopropoxy]methyl]-1,12,19,25-tetraoxo-16-oxa-13,20,24-t riazanonacos-1-yl]-4-hydroxy-2-pyrrolidinyl)methyl ester
tgttcgtgtttcaaggtttga

SEQ ID NO: 924 - RNA, 21 nt, synthetic construct
  source 1..21: mol_type = other RNA
  modified_base 1: mod_base = OTHER; note = 2'-O-methylguanosine-3'-phosphorothioate
  modified_base 2: mod_base = OTHER; note = 2'-O-methyluridine-3'-phosphorothioate
  modified_base 3: mod_base = OTHER; note = 2'-O-methyluridine-3'-phosphate
  modified_base 4: mod_base = OTHER; note = 2'-O-methylcytidine-3'-phosphate
  modified_base 5: mod_base = OTHER; note = 2'-O-methylguanosine-3'-phosphate
  modified_base 6: mod_base = OTHER; note = 2'-O-methyluridine-3'-phosphate
  modified_base 7: mod_base = OTHER; note = 2'-deoxy-2'-fluoroguanosine-3'-phosphate
  modified_base 8: mod_base = OTHER; note = 2'-O-methyluridine-3'-phosphate
  modified_base 9: mod_base = OTHER; note = 2'-deoxy-2'-fluorouridine-3'-phosphate
  modified_base 10: mod_base = OTHER; note = 2'-deoxy-2'-fluorouridine-3'-phosphate
  modified_base 11: mod_base = OTHER; note = 2'-deoxy-2'-fluorocytidine-3'-phosphate
  modified_base 12: mod_base = OTHER; note = 2'-O-methyladenosine-3'-phosphate
  modified_base 13: mod_base = OTHER; note = 2'-O-methyladenosine-3'-phosphate
  modified_base 14: mod_base = OTHER; note = 2'-O-methylguanosine-3'-phosphate
  modified_base 15: mod_base = OTHER; note = 2'-O-methylguanosine-3'-phosphate
  modified_base 16: mod_base = OTHER; note = 2'-O-methyluridine-3'-phosphate
  modified_base 17: mod_base = OTHER; note = 2'-O-methyluridine-3'-phosphate
  modified_base 18: mod_base = OTHER; note = 2'-O-methyluridine-3'-phosphate
  modified_base 19: mod_base = OTHER; note = 2'-O-methylguanosine-3'-phosphate
  modified_base 20: mod_base = OTHER; note = 2'-O-methyluridine-3'-phosphate
  modified_base 21: mod_base = OTHER; note = 2'-O-methyladenosine-3'-phosphate ((2S,4R)-1-[29-[[2-(acetylamino)-2-deoxy-beta-D-galactopyra nosyl]oxy]-14,14-bis[[3-[[3-[[5-[[2-(acetylamino)-2-deoxy-b eta-D-galactopyranosyl]oxy]-1-oxopentyl]amino]propyl]amino] -3-oxopropoxy]methyl]-1,12,19,25-tetraoxo-16-oxa-13,20,24-t riazanonacos-1-yl]-4-hydroxy-2-pyrrolidinyl)methyl ester
gttcgtgtttcaaggtttgta

SEQ ID NO: 925 - RNA, 21 nt, synthetic construct
  source 1..21: mol_type = other RNA
  modified_base 1: mod_base = OTHER; note = 2'-O-methyluridine-3'-phosphorothioate
  modified_base 2: mod_base = OTHER; note = 2'-O-methyluridine-3'-phosphorothioate
  modified_base 3: mod_base = OTHER; note = 2'-O-methylguanosine-3'-phosphate
  modified_base 4: mod_base = OTHER; note = 2'-O-methyladenosine-3'-phosphate
  modified_base 5: mod_base = OTHER; note = 2'-O-methylguanosine-3'-phosphate
  modified_base 6: mod_base = OTHER; note = 2'-O-methylguanosine-3'-phosphate
  modified_base 7: mod_base = OTHER; note = 2'-deoxy-2'-fluoroguanosine-3'-phosphate
  modified_base 8: mod_base = OTHER; note = 2'-O-methyladenosine-3'-phosphate
  modified_base 9: mod_base = OTHER; note = 2'-deoxy-2'-fluoroguanosine-3'-phosphate
  modified_base 10: mod_base = OTHER; note = 2'-deoxy-2'-fluorouridine-3'-phosphate
  modified_base 11: mod_base = OTHER; note = 2'-deoxy-2'-fluoroguanosine-3'-phosphate
  modified_base 12: mod_base = OTHER; note = 2'-O-methyladenosine-3'-phosphate
  modified_base 13: mod_base = OTHER; note = 2'-O-methyluridine-3'-phosphate
  modified_base 14: mod_base = OTHER; note = 2'-O-methylguanosine-3'-phosphate
  modified_base 15: mod_base = OTHER; note = 2'-O-methyladenosine-3'-phosphate
  modified_base 16: mod_base = OTHER; note = 2'-O-methylguanosine-3'-phosphate
  modified_base 17: mod_base = OTHER; note = 2'-O-methyladenosine-3'-phosphate
  modified_base 18: mod_base = OTHER; note = 2'-O-methyladenosine-3'-phosphate
  modified_base 19: mod_base = OTHER; note = 2'-O-methyladenosine-3'-phosphate
  modified_base 20: mod_base = OTHER; note = 2'-O-methyluridine-3'-phosphate
  modified_base 21: mod_base = OTHER; note = 2'-O-methyladenosine-3'-phosphate ((2S,4R)-1-[29-[[2-(acetylamino)-2-deoxy-beta-D-galactopyra nosyl]oxy]-14,14-bis[[3-[[3-[[5-[[2-(acetylamino)-2-deoxy-b eta-D-galactopyranosyl]oxy]-1-oxopentyl]amino]propyl]amino] -3-oxopropoxy]methyl]-1,12,19,25-tetraoxo-16-oxa-13,20,24-t riazanonacos-1-yl]-4-hydroxy-2-pyrrolidinyl)methyl ester
ttgagggagtgatgagaaata

SEQ ID NO: 926 - RNA, 21 nt, synthetic construct
  source 1..21: mol_type = other RNA
  modified_base 1: mod_base = OTHER; note = 2'-O-methyluridine-3'-phosphorothioate
  modified_base 2: mod_base = OTHER; note = 2'-O-methyluridine-3'-phosphorothioate
  modified_base 3: mod_base = OTHER; note = 2'-O-methylguanosine-3'-phosphate
  modified_base 4: mod_base = OTHER; note = 2'-O-methyladenosine-3'-phosphate
  modified_base 5: mod_base = OTHER; note = 2'-O-methylguanosine-3'-phosphate
  modified_base 6: mod_base = OTHER; note = 2'-O-methylguanosine-3'-phosphate
  modified_base 7: mod_base = OTHER; note = 2'-deoxy-2'-fluoroguanosine-3'-phosphate
  modified_base 8: mod_base = OTHER; note = 2'-O-methyladenosine-3'-phosphate
  modified_base 9: mod_base = OTHER; note = 2'-deoxy-2'-fluoroguanosine-3'-phosphate
  modified_base 10: mod_base = OTHER; note = 2'-deoxy-2'-fluorouridine-3'-phosphate
  modified_base 11: mod_base = OTHER; note = 2'-deoxy-2'-fluoroguanosine-3'-phosphate
  modified_base 12: mod_base = OTHER; note = 2'-O-methyladenosine-3'-phosphate
  modified_base 13: mod_base = OTHER; note = 2'-O-methyluridine-3'-phosphate
  modified_base 14: mod_base = OTHER; note = 2'-O-methylguanosine-3'-phosphate
  modified_base 15: mod_base = OTHER; note = 2'-O-methyluridine-3'-phosphate
  modified_base 16: mod_base = OTHER; note = 2'-O-methylguanosine-3'-phosphate
  modified_base 17: mod_base = OTHER; note = 2'-O-methyladenosine-3'-phosphate
  modified_base 18: mod_base = OTHER; note = 2'-O-methyladenosine-3'-phosphate
  modified_base 19: mod_base = OTHER; note = 2'-O-methyladenosine-3'-phosphate
  modified_base 20: mod_base = OTHER; note = 2'-O-methyluridine-3'-phosphate
  modified_base 21: mod_base = OTHER; note = 2'-O-methyladenosine-3'-phosphate ((2S,4R)-1-[29-[[2-(acetylamino)-2-deoxy-beta-D-galactopyra nosyl]oxy]-14,14-bis[[3-[[3-[[5-[[2-(acetylamino)-2-deoxy-b eta-D-galactopyranosyl]oxy]-1-oxopentyl]amino]propyl]amino] -3-oxopropoxy]methyl]-1,12,19,25-tetraoxo-16-oxa-13,20,24-t riazanonacos-1-yl]-4-hydroxy-2-pyrrolidinyl)methyl ester
ttgagggagtgatgtgaaata

SEQ ID NO: 927 - RNA, 21 nt, synthetic construct
  source 1..21: mol_type = other RNA
  modified_base 1: mod_base = OTHER; note = 2'-O-methyluridine-3'-phosphorothioate
  modified_base 2: mod_base = OTHER; note = 2'-O-methylguanosine-3'-phosphorothioate
  modified_base 3: mod_base = OTHER; note = 2'-O-methyladenosine-3'-phosphate
  modified_base 4: mod_base = OTHER; note = 2'-O-methylguanosine-3'-phosphate
  modified_base 5: mod_base = OTHER; note = 2'-O-methylguanosine-3'-phosphate
  modified_base 6: mod_base = OTHER; note = 2'-O-methylguanosine-3'-phosphate
  modified_base 7: mod_base = OTHER; note = 2'-deoxy-2'-fluoroadenosine-3'-phosphate
  modified_base 8: mod_base = OTHER; note = 2'-O-methylguanosine-3'-phosphate
  modified_base 9: mod_base = OTHER; note = 2'-deoxy-2'-fluorouridine-3'-phosphate
  modified_base 10: mod_base = OTHER; note = 2'-deoxy-2'-fluoroguanosine-3'-phosphate
  modified_base 11: mod_base = OTHER; note = 2'-deoxy-2'-fluoroadenosine-3'-phosphate
  modified_base 12: mod_base = OTHER; note = 2'-O-methyluridine-3'-phosphate
  modified_base 13: mod_base = OTHER; note = 2'-O-methylguanosine-3'-phosphate
  modified_base 14: mod_base = OTHER; note = 2'-O-methyladenosine-3'-phosphate
  modified_base 15: mod_base = OTHER; note = 2'-O-methylguanosine-3'-phosphate
  modified_base 16: mod_base = OTHER; note = 2'-O-methyladenosine-3'-phosphate
  modified_base 17: mod_base = OTHER; note = 2'-O-methyladenosine-3'-phosphate
  modified_base 18: mod_base = OTHER; note = 2'-O-methyladenosine-3'-phosphate
  modified_base 19: mod_base = OTHER; note = 2'-O-methyluridine-3'-phosphate
  modified_base 20: mod_base = OTHER; note = 2'-O-methyladenosine-3'-phosphate
  modified_base 21: mod_base = OTHER; note = 2'-O-methyladenosine-3'-phosphate ((2S,4R)-1-[29-[[2-(acetylamino)-2-deoxy-beta-D-galactopyra nosyl]oxy]-14,14-bis[[3-[[3-[[5-[[2-(acetylamino)-2-deoxy-b eta-D-galactopyranosyl]oxy]-1-oxopentyl]amino]propyl]amino] -3-oxopropoxy]methyl]-1,12,19,25-tetraoxo-16-oxa-13,20,24-t riazanonacos-1-yl]-4-hydroxy-2-pyrrolidinyl)methyl ester
tgagggagtgatgagaaataa

SEQ ID NO: 928 - RNA, 21 nt, synthetic construct
  source 1..21: mol_type = other RNA
  modified_base 1: mod_base = OTHER; note = 2'-O-methyluridine-3'-phosphorothioate
  modified_base 2: mod_base = OTHER; note = 2'-O-methylguanosine-3'-phosphorothioate
  modified_base 3: mod_base = OTHER; note = 2'-O-methyladenosine-3'-phosphate
  modified_base 4: mod_base = OTHER; note = 2'-O-methylguanosine-3'-phosphate
  modified_base 5: mod_base = OTHER; note = 2'-O-methylguanosine-3'-phosphate
  modified_base 6: mod_base = OTHER; note = 2'-O-methylguanosine-3'-phosphate
  modified_base 7: mod_base = OTHER; note = 2'-deoxy-2'-fluoroadenosine-3'-phosphate
  modified_base 8: mod_base = OTHER; note = 2'-O-methylguanosine-3'-phosphate
  modified_base 9: mod_base = OTHER; note = 2'-deoxy-2'-fluorouridine-3'-phosphate
  modified_base 10: mod_base = OTHER; note = 2'-deoxy-2'-fluoroguanosine-3'-phosphate
  modified_base 11: mod_base = OTHER; note = 2'-deoxy-2'-fluoroadenosine-3'-phosphate
  modified_base 12: mod_base = OTHER; note = 2'-O-methyluridine-3'-phosphate
  modified_base 13: mod_base = OTHER; note = 2'-O-methylguanosine-3'-phosphate
  modified_base 14: mod_base = OTHER; note = 2'-O-methyladenosine-3'-phosphate
  modified_base 15: mod_base = OTHER; note = 2'-O-methyluridine-3'-phosphate
  modified_base 16: mod_base = OTHER; note = 2'-O-methyladenosine-3'-phosphate
  modified_base 17: mod_base = OTHER; note = 2'-O-methyladenosine-3'-phosphate
  modified_base 18: mod_base = OTHER; note = 2'-O-methyladenosine-3'-phosphate
  modified_base 19: mod_base = OTHER; note = 2'-O-methyluridine-3'-phosphate
  modified_base 20: mod_base = OTHER; note = 2'-O-methyladenosine-3'-phosphate
  modified_base 21: mod_base = OTHER; note = 2'-O-methyladenosine-3'-phosphate ((2S,4R)-1-[29-[[2-(acetylamino)-2-deoxy-beta-D-galactopyra nosyl]oxy]-14,14-bis[[3-[[3-[[5-[[2-(acetylamino)-2-deoxy-b eta-D-galactopyranosyl]oxy]-1-oxopentyl]amino]propyl]amino] -3-oxopropoxy]methyl]-1,12,19,25-tetraoxo-16-oxa-13,20,24-t riazanonacos-1-yl]-4-hydroxy-2-pyrrolidinyl)methyl ester
tgagggagtgatgataaataa

SEQ ID NO: 929 - RNA, 21 nt, synthetic construct
  source 1..21: mol_type = other RNA
  modified_base 1: mod_base = OTHER; note = 2'-O-methylguanosine-3'-phosphorothioate
  modified_base 2: mod_base = OTHER; note = 2'-O-methyladenosine-3'-phosphorothioate
  modified_base 3: mod_base = OTHER; note = 2'-O-methylguanosine-3'-phosphate
  modified_base 4: mod_base = OTHER; note = 2'-O-methylguanosine-3'-phosphate
  modified_base 5: mod_base = OTHER; note = 2'-O-methylguanosine-3'-phosphate
  modified_base 6: mod_base = OTHER; note = 2'-O-methyladenosine-3'-phosphate
  modified_base 7: mod_base = OTHER; note = 2'-deoxy-2'-fluoroguanosine-3'-phosphate
  modified_base 8: mod_base = OTHER; note = 2'-O-methyluridine-3'-phosphate
  modified_base 9: mod_base = OTHER; note = 2'-deoxy-2'-fluoroguanosine-3'-phosphate
  modified_base 10: mod_base = OTHER; note = 2'-deoxy-2'-fluoroadenosine-3'-phosphate
  modified_base 11: mod_base = OTHER; note = 2'-deoxy-2'-fluorouridine-3'-phosphate
  modified_base 12: mod_base = OTHER; note = 2'-O-methylguanosine-3'-phosphate
  modified_base 13: mod_base = OTHER; note = 2'-O-methyladenosine-3'-phosphate
  modified_base 14: mod_base = OTHER; note = 2'-O-methylguanosine-3'-phosphate
  modified_base 15: mod_base = OTHER; note = 2'-O-methyladenosine-3'-phosphate
  modified_base 16: mod_base = OTHER; note = 2'-O-methyladenosine-3'-phosphate
  modified_base 17: mod_base = OTHER; note = 2'-O-methyladenosine-3'-phosphate
  modified_base 18: mod_base = OTHER; note = 2'-O-methyluridine-3'-phosphate
  modified_base 19: mod_base = OTHER; note = 2'-O-methyladenosine-3'-phosphate
  modified_base 20: mod_base = OTHER; note = 2'-O-methyladenosine-3'-phosphate
  modified_base 21: mod_base = OTHER; note = 2'-O-methyladenosine-3'-phosphate ((2S,4R)-1-[29-[[2-(acetylamino)-2-deoxy-beta-D-galactopyra nosyl]oxy]-14,14-bis[[3-[[3-[[5-[[2-(acetylamino)-2-deoxy-b eta-D-galactopyranosyl]oxy]-1-oxopentyl]amino]propyl]amino] -3-oxopropoxy]methyl]-1,12,19,25-tetraoxo-16-oxa-13,20,24-t riazanonacos-1-yl]-4-hydroxy-2-pyrrolidinyl)methyl ester
gagggagtgatgagaaataaa

SEQ ID NO: 930 - RNA, 21 nt, synthetic construct
  source 1..21: mol_type = other RNA
  modified_base 1: mod_base = OTHER; note = 2'-O-methylguanosine-3'-phosphorothioate
  modified_base 2: mod_base = OTHER; note = 2'-O-methyladenosine-3'-phosphorothioate
  modified_base 3: mod_base = OTHER; note = 2'-O-methylguanosine-3'-phosphate
  modified_base 4: mod_base = OTHER; note = 2'-O-methylguanosine-3'-phosphate
  modified_base 5: mod_base = OTHER; note = 2'-O-methylguanosine-3'-phosphate
  modified_base 6: mod_base = OTHER; note = 2'-O-methyladenosine-3'-phosphate
  modified_base 7: mod_base = OTHER; note = 2'-deoxy-2'-fluoroguanosine-3'-phosphate
  modified_base 8: mod_base = OTHER; note = 2'-O-methyluridine-3'-phosphate
  modified_base 9: mod_base = OTHER; note = 2'-deoxy-2'-fluoroguanosine-3'-phosphate
  modified_base 10: mod_base = OTHER; note = 2'-deoxy-2'-fluoroadenosine-3'-phosphate
  modified_base 11: mod_base = OTHER; note = 2'-deoxy-2'-fluorouridine-3'-phosphate
  modified_base 12: mod_base = OTHER; note = 2'-O-methylguanosine-3'-phosphate
  modified_base 13: mod_base = OTHER; note = 2'-O-methyladenosine-3'-phosphate
  modified_base 14: mod_base = OTHER; note = 2'-O-methylguanosine-3'-phosphate
  modified_base 15: mod_base = OTHER; note = 2'-O-methyluridine-3'-phosphate
  modified_base 16: mod_base = OTHER; note = 2'-O-methyladenosine-3'-phosphate
  modified_base 17: mod_base = OTHER; note = 2'-O-methyladenosine-3'-phosphate
  modified_base 18: mod_base = OTHER; note = 2'-O-methyluridine-3'-phosphate
  modified_base 19: mod_base = OTHER; note = 2'-O-methyladenosine-3'-phosphate
  modified_base 20: mod_base = OTHER; note = 2'-O-methyladenosine-3'-phosphate
  modified_base 21: mod_base = OTHER; note = 2'-O-methyladenosine-3'-phosphate ((2S,4R)-1-[29-[[2-(acetylamino)-2-deoxy-beta-D-galactopyra nosyl]oxy]-14,14-bis[[3-[[3-[[5-[[2-(acetylamino)-2-deoxy-b eta-D-galactopyranosyl]oxy]-1-oxopentyl]amino]propyl]amino] -3-oxopropoxy]methyl]-1,12,19,25-tetraoxo-16-oxa-13,20,24-t riazanonacos-1-yl]-4-hydroxy-2-pyrrolidinyl)methyl ester
gagggagtgatgagtaataaa

SEQ ID NO: 931 - RNA, 21 nt, synthetic construct
  source 1..21: mol_type = other RNA
  modified_base 1: mod_base = OTHER; note = 2'-O-methylguanosine-3'-phosphorothioate
  modified_base 2: mod_base = OTHER; note = 2'-O-methylguanosine-3'-phosphorothioate
  modified_base 3: mod_base = OTHER; note = 2'-O-methylguanosine-3'-phosphate
  modified_base 4: mod_base = OTHER; note = 2'-O-methyladenosine-3'-phosphate
  modified_base 5: mod_base = OTHER; note = 2'-O-methylguanosine-3'-phosphate
  modified_base 6: mod_base = OTHER; note = 2'-O-methyluridine-3'-phosphate
  modified_base 7: mod_base = OTHER; note = 2'-deoxy-2'-fluoroguanosine-3'-phosphate
  modified_base 8: mod_base = OTHER; note = 2'-O-methyladenosine-3'-phosphate
  modified_base 9: mod_base = OTHER; note = 2'-deoxy-2'-fluorouridine-3'-phosphate
  modified_base 10: mod_base = OTHER; note = 2'-deoxy-2'-fluoroguanosine-3'-phosphate
  modified_base 11: mod_base = OTHER; note = 2'-deoxy-2'-fluoroadenosine-3'-phosphate
  modified_base 12: mod_base = OTHER; note = 2'-O-methylguanosine-3'-phosphate
  modified_base 13: mod_base = OTHER; note = 2'-O-methyladenosine-3'-phosphate
  modified_base 14: mod_base = OTHER; note = 2'-O-methyladenosine-3'-phosphate
  modified_base 15: mod_base = OTHER; note = 2'-O-methyladenosine-3'-phosphate
  modified_base 16: mod_base = OTHER; note = 2'-O-methyluridine-3'-phosphate
  modified_base 17: mod_base = OTHER; note = 2'-O-methyladenosine-3'-phosphate
  modified_base 18: mod_base = OTHER; note = 2'-O-methyladenosine-3'-phosphate
  modified_base 19: mod_base = OTHER; note = 2'-O-methyluridine-3'-phosphate
  modified_base 20: mod_base = OTHER; note = 2'-O-methyluridine-3'-phosphate
  modified_base 21: mod_base = OTHER; note = 2'-O-methyladenosine-3'-phosphate ((2S,4R)-1-[29-[[2-(acetylamino)-2-deoxy-beta-D-galactopyra nosyl]oxy]-14,14-bis[[3-[[3-[[5-[[2-(acetylamino)-2-deoxy-b eta-D-galactopyranosyl]oxy]-1-oxopentyl]amino]propyl]amino] -3-oxopropoxy]methyl]-1,12,19,25-tetraoxo-16-oxa-13,20,24-t riazanonacos-1-yl]-4-hydroxy-2-pyrrolidinyl)methyl ester
gggagtgatgagaaataatta

SEQ ID NO: 932 - RNA, 21 nt, synthetic construct
  source 1..21: mol_type = other RNA
  modified_base 1: mod_base = OTHER; note = 2'-O-methylguanosine-3'-phosphorothioate
  modified_base 2: mod_base = OTHER; note = 2'-O-methyladenosine-3'-phosphorothioate
  modified_base 3: mod_base = OTHER; note = 2'-O-methylguanosine-3'-phosphate
  modified_base 4: mod_base = OTHER; note = 2'-O-methyluridine-3'-phosphate
  modified_base 5: mod_base = OTHER; note = 2'-O-methylguanosine-3'-phosphate
  modified_base 6: mod_base = OTHER; note = 2'-O-methyladenosine-3'-phosphate
  modified_base 7: mod_base = OTHER; note = 2'-deoxy-2'-fluorouridine-3'-phosphate
  modified_base 8: mod_base = OTHER; note = 2'-O-methylguanosine-3'-phosphate
  modified_base 9: mod_base = OTHER; note = 2'-deoxy-2'-fluoroadenosine-3'-phosphate
  modified_base 10: mod_base = OTHER; note = 2'-deoxy-2'-fluoroguanosine-3'-phosphate
  modified_base 11: mod_base = OTHER; note = 2'-deoxy-2'-fluoroadenosine-3'-phosphate
  modified_base 12: mod_base = OTHER; note = 2'-O-methyladenosine-3'-phosphate
  modified_base 13: mod_base = OTHER; note = 2'-O-methyladenosine-3'-phosphate
  modified_base 14: mod_base = OTHER; note = 2'-O-methyluridine-3'-phosphate
  modified_base 15: mod_base = OTHER; note = 2'-O-methyladenosine-3'-phosphate
  modified_base 16: mod_base = OTHER; note = 2'-O-methyladenosine-3'-phosphate
  modified_base 17: mod_base = OTHER; note = 2'-O-methyluridine-3'-phosphate
  modified_base 18: mod_base = OTHER; note = 2'-O-methyluridine-3'-phosphate
  modified_base 19: mod_base = OTHER; note = 2'-O-methyladenosine-3'-phosphate
  modified_base 20: mod_base = OTHER; note = 2'-O-methyladenosine-3'-phosphate
  modified_base 21: mod_base = OTHER; note = 2'-O-methyladenosine-3'-phosphate ((2S,4R)-1-[29-[[2-(acetylamino)-2-deoxy-beta-D-galactopyra nosyl]oxy]-14,14-bis[[3-[[3-[[5-[[2-(acetylamino)-2-deoxy-b eta-D-galactopyranosyl]oxy]-1-oxopentyl]amino]propyl]amino] -3-oxopropoxy]methyl]-1,12,19,25-tetraoxo-16-oxa-13,20,24-t riazanonacos-1-yl]-4-hydroxy-2-pyrrolidinyl)methyl ester
gagtgatgagaaataattaaa

SEQ ID NO: 933 - RNA, 21 nt, synthetic construct
  source 1..21: mol_type = other RNA
  modified_base 1: mod_base = OTHER; note = 2'-O-methylguanosine-3'-phosphorothioate
  modified_base 2: mod_base = OTHER; note = 2'-O-methyluridine-3'-phosphorothioate
  modified_base 3: mod_base = OTHER; note = 2'-O-methylguanosine-3'-phosphate
  modified_base 4: mod_base = OTHER; note = 2'-O-methyladenosine-3'-phosphate
  modified_base 5: mod_base = OTHER; note = 2'-O-methyluridine-3'-phosphate
  modified_base 6: mod_base = OTHER; note = 2'-O-methylguanosine-3'-phosphate
  modified_base 7: mod_base = OTHER; note = 2'-deoxy-2'-fluoroadenosine-3'-phosphate
  modified_base 8: mod_base = OTHER; note = 2'-O-methylguanosine-3'-phosphate
  modified_base 9: mod_base = OTHER; note = 2'-deoxy-2'-fluoroadenosine-3'-phosphate
  modified_base 10: mod_base = OTHER; note = 2'-deoxy-2'-fluoroadenosine-3'-phosphate
  modified_base 11: mod_base = OTHER; note = 2'-deoxy-2'-fluoroadenosine-3'-phosphate
  modified_base 12: mod_base = OTHER; note = 2'-O-methyluridine-3'-phosphate
  modified_base 13: mod_base = OTHER; note = 2'-O-methyladenosine-3'-phosphate
  modified_base 14: mod_base = OTHER; note = 2'-O-methyladenosine-3'-phosphate
  modified_base 15: mod_base = OTHER; note = 2'-O-methyluridine-3'-phosphate
  modified_base 16: mod_base = OTHER; note = 2'-O-methyluridine-3'-phosphate
  modified_base 17: mod_base = OTHER; note = 2'-O-methyladenosine-3'-phosphate
  modified_base 18: mod_base = OTHER; note = 2'-O-methyladenosine-3'-phosphate
  modified_base 19: mod_base = OTHER; note = 2'-O-methyluridine-3'-phosphate
  modified_base 20: mod_base = OTHER; note = 2'-O-methyluridine-3'-phosphate
  modified_base 21: mod_base = OTHER; note = 2'-O-methyladenosine-3'-phosphate ((2S,4R)-1-[29-[[2-(acetylamino)-2-deoxy-beta-D-galactopyra nosyl]oxy]-14,14-bis[[3-[[3-[[5-[[2-(acetylamino)-2-deoxy-b eta-D-galactopyranosyl]oxy]-1-oxopentyl]amino]propyl]amino] -3-oxopropoxy]methyl]-1,12,19,25-tetraoxo-16-oxa-13,20,24-t riazanonacos-1-yl]-4-hydroxy-2-pyrrolidinyl)methyl ester
gtgatgagaaataattaatta

SEQ ID NO: 934 - RNA, 21 nt, synthetic construct
  source 1..21: mol_type = other RNA
  modified_base 1: mod_base = OTHER; note = 2'-O-methyluridine-3'-phosphorothioate
  modified_base 2: mod_base = OTHER; note = 2'-O-methylguanosine-3'-phosphorothioate
  modified_base 3: mod_base = OTHER; note = 2'-O-methyladenosine-3'-phosphate
  modified_base 4: mod_base = OTHER; note = 2'-O-methyluridine-3'-phosphate
  modified_base 5: mod_base = OTHER; note = 2'-O-methylguanosine-3'-phosphate
  modified_base 6: mod_base = OTHER; note = 2'-O-methyladenosine-3'-phosphate
  modified_base 7: mod_base = OTHER; note = 2'-deoxy-2'-fluoroguanosine-3'-phosphate
  modified_base 8: mod_base = OTHER; note = 2'-O-methyladenosine-3'-phosphate
  modified_base 9: mod_base = OTHER; note = 2'-deoxy-2'-fluoroadenosine-3'-phosphate
  modified_base 10: mod_base = OTHER; note = 2'-deoxy-2'-fluoroadenosine-3'-phosphate
  modified_base 11: mod_base = OTHER; note = 2'-deoxy-2'-fluorouridine-3'-phosphate
  modified_base 12: mod_base = OTHER; note = 2'-O-methyladenosine-3'-phosphate
  modified_base 13: mod_base = OTHER; note = 2'-O-methyladenosine-3'-phosphate
  modified_base 14: mod_base = OTHER; note = 2'-O-methyluridine-3'-phosphate
  modified_base 15: mod_base = OTHER; note = 2'-O-methyluridine-3'-phosphate
  modified_base 16: mod_base = OTHER; note = 2'-O-methyladenosine-3'-phosphate
  modified_base 17: mod_base = OTHER; note = 2'-O-methyladenosine-3'-phosphate
  modified_base 18: mod_base = OTHER; note = 2'-O-methyluridine-3'-phosphate
  modified_base 19: mod_base = OTHER; note = 2'-O-methyluridine-3'-phosphate
  modified_base 20: mod_base = OTHER; note = 2'-O-methylguanosine-3'-phosphate
  modified_base 21: mod_base = OTHER; note = 2'-O-methyladenosine-3'-phosphate ((2S,4R)-1-[29-[[2-(acetylamino)-2-deoxy-beta-D-galactopyra nosyl]oxy]-14,14-bis[[3-[[3-[[5-[[2-(acetylamino)-2-deoxy-b eta-D-galactopyranosyl]oxy]-1-oxopentyl]amino]propyl]amino] -3-oxopropoxy]methyl]-1,12,19,25-tetraoxo-16-oxa-13,20,24-t riazanonacos-1-yl]-4-hydroxy-2-pyrrolidinyl)methyl ester
tgatgagaaataattaattga

SEQ ID NO: 935 - RNA, 21 nt, synthetic construct
  source 1..21: mol_type = other RNA
  modified_base 1: mod_base = OTHER; note = 2'-O-methylguanosine-3'-phosphorothioate
  modified_base 2: mod_base = OTHER; note = 2'-O-methyladenosine-3'-phosphorothioate
  modified_base 3: mod_base = OTHER; note = 2'-O-methyluridine-3'-phosphate
  modified_base 4: mod_base = OTHER; note = 2'-O-methylguanosine-3'-phosphate
  modified_base 5: mod_base = OTHER; note = 2'-O-methyladenosine-3'-phosphate
  modified_base 6: mod_base = OTHER; note = 2'-O-methylguanosine-3'-phosphate
  modified_base 7: mod_base = OTHER; note = 2'-deoxy-2'-fluoroadenosine-3'-phosphate
  modified_base 8: mod_base = OTHER; note = 2'-O-methyladenosine-3'-phosphate
  modified_base 9: mod_base = OTHER; note = 2'-deoxy-2'-fluoroadenosine-3'-phosphate
  modified_base 10: mod_base = OTHER; note = 2'-deoxy-2'-fluorouridine-3'-phosphate
  modified_base 11: mod_base = OTHER; note = 2'-deoxy-2'-fluoroadenosine-3'-phosphate
  modified_base 12: mod_base = OTHER; note = 2'-O-methyladenosine-3'-phosphate
  modified_base 13: mod_base = OTHER; note = 2'-O-methyluridine-3'-phosphate
  modified_base 14: mod_base = OTHER; note = 2'-O-methyluridine-3'-phosphate
  modified_base 15: mod_base = OTHER; note = 2'-O-methyladenosine-3'-phosphate
  modified_base 16: mod_base = OTHER; note = 2'-O-methyladenosine-3'-phosphate
  modified_base 17: mod_base = OTHER; note = 2'-O-methyluridine-3'-phosphate
  modified_base 18: mod_base = OTHER; note = 2'-O-methyluridine-3'-phosphate
  modified_base 19: mod_base = OTHER; note = 2'-O-methylguanosine-3'-phosphate
  modified_base 20: mod_base = OTHER; note = 2'-O-methylguanosine-3'-phosphate
  modified_base 21: mod_base = OTHER; note = 2'-O-methyladenosine-3'-phosphate ((2S,4R)-1-[29-[[2-(acetylamino)-2-deoxy-beta-D-galactopyra nosyl]oxy]-14,14-bis[[3-[[3-[[5-[[2-(acetylamino)-2-deoxy-b eta-D-galactopyranosyl]oxy]-1-oxopentyl]amino]propyl]amino] -3-oxopropoxy]methyl]-1,12,19,25-tetraoxo-16-oxa-13,20,24-t riazanonacos-1-yl]-4-hydroxy-2-pyrrolidinyl)methyl ester
gatgagaaataattaattgga

SEQ ID NO: 936 - RNA, 21 nt, synthetic construct
  source 1..21: mol_type = other RNA
  modified_base 1: mod_base = OTHER; note = 2'-O-methyladenosine-3'-phosphorothioate
  modified_base 2: mod_base = OTHER; note = 2'-O-methyluridine-3'-phosphorothioate
  modified_base 3: mod_base = OTHER; note = 2'-O-methylguanosine-3'-phosphate
  modified_base 4: mod_base = OTHER; note = 2'-O-methyladenosine-3'-phosphate
  modified_base 5: mod_base = OTHER; note = 2'-O-methylguanosine-3'-phosphate
  modified_base 6: mod_base = OTHER; note = 2'-O-methyladenosine-3'-phosphate
  modified_base 7: mod_base = OTHER; note = 2'-deoxy-2'-fluoroadenosine-3'-phosphate
  modified_base 8: mod_base = OTHER; note = 2'-O-methyladenosine-3'-phosphate
  modified_base 9: mod_base = OTHER; note = 2'-deoxy-2'-fluorouridine-3'-phosphate
  modified_base 10: mod_base = OTHER; note = 2'-deoxy-2'-fluoroadenosine-3'-phosphate
  modified_base 11: mod_base = OTHER; note = 2'-deoxy-2'-fluoroadenosine-3'-phosphate
  modified_base 12: mod_base = OTHER; note = 2'-O-methyluridine-3'-phosphate
  modified_base 13: mod_base = OTHER; note = 2'-O-methyluridine-3'-phosphate
  modified_base 14: mod_base = OTHER; note = 2'-O-methyladenosine-3'-phosphate
  modified_base 15: mod_base = OTHER; note = 2'-O-methyladenosine-3'-phosphate
  modified_base 16: mod_base = OTHER; note = 2'-O-methyluridine-3'-phosphate
  modified_base 17: mod_base = OTHER; note = 2'-O-methyluridine-3'-phosphate
  modified_base 18: mod_base = OTHER; note = 2'-O-methylguanosine-3'-phosphate
  modified_base 19: mod_base = OTHER; note = 2'-O-methylguanosine-3'-phosphate
  modified_base 20: mod_base = OTHER; note = 2'-O-methyladenosine-3'-phosphate
  modified_base 21: mod_base = OTHER; note = 2'-O-methyladenosine-3'-phosphate ((2S,4R)-1-[29-[[2-(acetylamino)-2-deoxy-beta-D-galactopyra nosyl]oxy]-14,14-bis[[3-[[3-[[5-[[2-(acetylamino)-2-deoxy-b eta-D-galactopyranosyl]oxy]-1-oxopentyl]amino]propyl]amino] -3-oxopropoxy]methyl]-1,12,19,25-tetraoxo-16-oxa-13,20,24-t riazanonacos-1-yl]-4-hydroxy-2-pyrrolidinyl)methyl ester
atgagaaataattaattggaa

SEQ ID NO: 937 - RNA, 21 nt, synthetic construct
  source 1..21: mol_type = other RNA
  modified_base 1: mod_base = OTHER; note = 2'-O-methyladenosine-3'-phosphorothioate
  modified_base 2: mod_base = OTHER; note = 2'-O-methylcytidine-3'-phosphorothioate
  modified_base 3: mod_base = OTHER; note = 2'-O-methyluridine-3'-phosphate
  modified_base 4: mod_base = OTHER; note = 2'-O-methylguanosine-3'-phosphate
  modified_base 5: mod_base = OTHER; note = 2'-O-methyladenosine-3'-phosphate
  modified_base 6: mod_base = OTHER; note = 2'-O-methylcytidine-3'-phosphate
  modified_base 7: mod_base = OTHER; note = 2'-deoxy-2'-fluorouridine-3'-phosphate
  modified_base 8: mod_base = OTHER; note = 2'-O-methylcytidine-3'-phosphate
  modified_base 9: mod_base = OTHER; note = 2'-deoxy-2'-fluoroadenosine-3'-phosphate
  modified_base 10: mod_base = OTHER; note = 2'-deoxy-2'-fluorocytidine-3'-phosphate
  modified_base 11: mod_base = OTHER; note = 2'-deoxy-2'-fluorocytidine-3'-phosphate
  modified_base 12: mod_base = OTHER; note = 2'-O-methyluridine-3'-phosphate
  modified_base 13: mod_base = OTHER; note = 2'-O-methyladenosine-3'-phosphate
  modified_base 14: mod_base = OTHER; note = 2'-O-methylguanosine-3'-phosphate
  modified_base 15: mod_base = OTHER; note = 2'-O-methyladenosine-3'-phosphate
  modified_base 16: mod_base = OTHER; note = 2'-O-methylguanosine-3'-phosphate
  modified_base 17: mod_base = OTHER; note = 2'-O-methylguanosine-3'-phosphate
  modified_base 18: mod_base = OTHER; note = 2'-O-methylcytidine-3'-phosphate
  modified_base 19: mod_base = OTHER; note = 2'-O-methyluridine-3'-phosphate
  modified_base 20: mod_base = OTHER; note = 2'-O-methylguanosine-3'-phosphate
  modified_base 21: mod_base = OTHER; note = 2'-O-methyladenosine-3'-phosphate ((2S,4R)-1-[29-[[2-(acetylamino)-2-deoxy-beta-D-galactopyra nosyl]oxy]-14,14-bis[[3-[[3-[[5-[[2-(acetylamino)-2-deoxy-b eta-D-galactopyranosyl]oxy]-1-oxopentyl]amino]propyl]amino] -3-oxopropoxy]methyl]-1,12,19,25-tetraoxo-16-oxa-13,20,24-t riazanonacos-1-yl]-4-hydroxy-2-pyrrolidinyl)methyl ester
actgactcacctagaggctga

SEQ ID NO: 938 - RNA, 21 nt, synthetic construct
  source 1..21: mol_type = other RNA
  modified_base 1: mod_base = OTHER; note = 2'-O-methylguanosine-3'-phosphorothioate
  modified_base 2: mod_base = OTHER; note = 2'-O-methylguanosine-3'-phosphorothioate
  modified_base 3: mod_base = OTHER; note = 2'-O-methyluridine-3'-phosphate
  modified_base 4: mod_base = OTHER; note = 2'-O-methyladenosine-3'-phosphate
  modified_base 5: mod_base = OTHER; note = 2'-O-methylguanosine-3'-phosphate
  modified_base 6: mod_base = OTHER; note = 2'-O-methylguanosine-3'-phosphate
  modified_base 7: mod_base = OTHER; note = 2'-deoxy-2'-fluoroguanosine-3'-phosphate
  modified_base 8: mod_base = OTHER; note = 2'-O-methyladenosine-3'-phosphate
  modified_base 9: mod_base = OTHER; note = 2'-deoxy-2'-fluorouridine-3'-phosphate
  modified_base 10: mod_base = OTHER; note = 2'-deoxy-2'-fluorouridine-3'-phosphate
  modified_base 11: mod_base = OTHER; note = 2'-deoxy-2'-fluorouridine-3'-phosphate
  modified_base 12: mod_base = OTHER; note = 2'-O-methyladenosine-3'-phosphate
  modified_base 13: mod_base = OTHER; note = 2'-O-methylguanosine-3'-phosphate
  modified_base 14: mod_base = OTHER; note = 2'-O-methylcytidine-3'-phosphate
  modified_base 15: mod_base = OTHER; note = 2'-O-methyladenosine-3'-phosphate
  modified_base 16: mod_base = OTHER; note = 2'-O-methyluridine-3'-phosphate
  modified_base 17: mod_base = OTHER; note = 2'-O-methylguanosine-3'-phosphate
  modified_base 18: mod_base = OTHER; note = 2'-O-methylcytidine-3'-phosphate
  modified_base 19: mod_base = OTHER; note = 2'-O-methyluridine-3'-phosphate
  modified_base 20: mod_base = OTHER; note = 2'-O-methylguanosine-3'-phosphate
  modified_base 21: mod_base = OTHER; note = 2'-O-methyladenosine-3'-phosphate ((2S,4R)-1-[29-[[2-(acetylamino)-2-deoxy-beta-D-galactopyra nosyl]oxy]-14,14-bis[[3-[[3-[[5-[[2-(acetylamino)-2-deoxy-b eta-D-galactopyranosyl]oxy]-1-oxopentyl]amino]propyl]amino] -3-oxopropoxy]methyl]-1,12,19,25-tetraoxo-16-oxa-13,20,24-t riazanonacos-1-yl]-4-hydroxy-2-pyrrolidinyl)methyl ester
ggtagggatttagcatgctga

SEQ ID NO: 939 - RNA, 21 nt, synthetic construct
  source 1..21: mol_type = other RNA
  modified_base 1: mod_base = OTHER; note = 2'-O-methyluridine-3'-phosphorothioate
  modified_base 2: mod_base = OTHER; note = 2'-O-methyladenosine-3'-phosphorothioate
  modified_base 3: mod_base = OTHER; note = 2'-O-methylguanosine-3'-phosphate
  modified_base 4: mod_base = OTHER; note = 2'-O-methylguanosine-3'-phosphate
  modified_base 5: mod_base = OTHER; note = 2'-O-methylguanosine-3'-phosphate
  modified_base 6: mod_base = OTHER; note = 2'-O-methyladenosine-3'-phosphate
  modified_base 7: mod_base = OTHER; note = 2'-deoxy-2'-fluorouridine-3'-phosphate
  modified_base 8: mod_base = OTHER; note = 2'-O-methyluridine-3'-phosphate
  modified_base 9: mod_base = OTHER; note = 2'-deoxy-2'-fluorouridine-3'-phosphate
  modified_base 10: mod_base = OTHER; note = 2'-deoxy-2'-fluoroadenosine-3'-phosphate
  modified_base 11: mod_base = OTHER; note = 2'-deoxy-2'-fluoroguanosine-3'-phosphate
  modified_base 12: mod_base = OTHER; note = 2'-O-methylcytidine-3'-phosphate
  modified_base 13: mod_base = OTHER; note = 2'-O-methyladenosine-3'-phosphate
  modified_base 14: mod_base = OTHER; note = 2'-O-methyluridine-3'-phosphate
  modified_base 15: mod_base = OTHER; note = 2'-O-methylguanosine-3'-phosphate
  modified_base 16: mod_base = OTHER; note = 2'-O-methylcytidine-3'-phosphate
  modified_base 17: mod_base = OTHER; note = 2'-O-methyluridine-3'-phosphate
  modified_base 18: mod_base = OTHER; note = 2'-O-methylguanosine-3'-phosphate
  modified_base 19: mod_base = OTHER; note = 2'-O-methylguanosine-3'-phosphate
  modified_base 20: mod_base = OTHER; note = 2'-O-methyladenosine-3'-phosphate
  modified_base 21: mod_base = OTHER; note = 2'-O-methyladenosine-3'-phosphate ((2S,4R)-1-[29-[[2-(acetylamino)-2-deoxy-beta-D-galactopyra nosyl]oxy]-14,14-bis[[3-[[3-[[5-[[2-(acetylamino)-2-deoxy-b eta-D-galactopyranosyl]oxy]-1-oxopentyl]amino]propyl]amino] -3-oxopropoxy]methyl]-1,12,19,25-tetraoxo-16-oxa-13,20,24-t riazanonacos-1-yl]-4-hydroxy-2-pyrrolidinyl)methyl ester
tagggatttagcatgctggaa

SEQ ID NO: 940 - RNA, 21 nt, synthetic construct
  source 1..21: mol_type = other RNA
  modified_base 1: mod_base = OTHER; note = 2'-O-methyluridine-3'-phosphorothioate
  modified_base 2: mod_base = OTHER; note = 2'-O-methyladenosine-3'-phosphorothioate
  modified_base 3: mod_base = OTHER; note = 2'-O-methylguanosine-3'-phosphate
  modified_base 4: mod_base = OTHER; note = 2'-O-methylcytidine-3'-phosphate
  modified_base 5: mod_base = OTHER; note = 2'-O-methyladenosine-3'-phosphate
  modified_base 6: mod_base = OTHER; note = 2'-O-methyluridine-3'-phosphate
  modified_base 7: mod_base = OTHER; note = 2'-deoxy-2'-fluoroguanosine-3'-phosphate
  modified_base 8: mod_base = OTHER; note = 2'-O-methylcytidine-3'-phosphate
  modified_base 9: mod_base = OTHER; note = 2'-deoxy-2'-fluorouridine-3'-phosphate
  modified_base 10: mod_base = OTHER; note = 2'-deoxy-2'-fluoroguanosine-3'-phosphate
  modified_base 11: mod_base = OTHER; note = 2'-deoxy-2'-fluoroguanosine-3'-phosphate
  modified_base 12: mod_base = OTHER; note = 2'-O-methyladenosine-3'-phosphate
  modified_base 13: mod_base = OTHER; note = 2'-O-methyladenosine-3'-phosphate
  modified_base 14: mod_base = OTHER; note = 2'-O-methyladenosine-3'-phosphate
  modified_base 15: mod_base = OTHER; note = 2'-O-methyluridine-3'-phosphate
  modified_base 16: mod_base = OTHER; note = 2'-O-methyladenosine-3'-phosphate
  modified_base 17: mod_base = OTHER; note = 2'-O-methyladenosine-3'-phosphate
  modified_base 18: mod_base = OTHER; note = 2'-O-methylcytidine-3'-phosphate
  modified_base 19: mod_base = OTHER; note = 2'-O-methyluridine-3'-phosphate
  modified_base 20: mod_base = OTHER; note = 2'-O-methylguanosine-3'-phosphate
  modified_base 21: mod_base = OTHER; note = 2'-O-methyladenosine-3'-phosphate ((2S,4R)-1-[29-[[2-(acetylamino)-2-deoxy-beta-D-galactopyra nosyl]oxy]-14,14-bis[[3-[[3-[[5-[[2-(acetylamino)-2-deoxy-b eta-D-galactopyranosyl]oxy]-1-oxopentyl]amino]propyl]amino] -3-oxopropoxy]methyl]-1,12,19,25-tetraoxo-16-oxa-13,20,24-t riazanonacos-1-yl]-4-hydroxy-2-pyrrolidinyl)methyl ester
tagcatgctggaaataactga

SEQ ID NO: 941 - RNA, 21 nt, synthetic construct
  source 1..21: mol_type = other RNA
  modified_base 1: mod_base = OTHER; note = 2'-O-methyluridine-3'-phosphorothioate
  modified_base 2: mod_base = OTHER; note = 2'-O-methylguanosine-3'-phosphorothioate
  modified_base 3: mod_base = OTHER; note = 2'-O-methyluridine-3'-phosphate
  modified_base 4: mod_base = OTHER; note = 2'-O-methyluridine-3'-phosphate
  modified_base 5: mod_base = OTHER; note = 2'-O-methyladenosine-3'-phosphate
  modified_base 6: mod_base = OTHER; note = 2'-O-methyluridine-3'-phosphate
  modified_base 7: mod_base = OTHER; note = 2'-deoxy-2'-fluorouridine-3'-phosphate
  modified_base 8: mod_base = OTHER; note = 2'-O-methyluridine-3'-phosphate
  modified_base 9: mod_base = OTHER; note = 2'-deoxy-2'-fluorouridine-3'-phosphate
  modified_base 10: mod_base = OTHER; note = 2'-deoxy-2'-fluorocytidine-3'-phosphate
  modified_base 11: mod_base = OTHER; note = 2'-deoxy-2'-fluorouridine-3'-phosphate
  modified_base 12: mod_base = OTHER; note = 2'-O-methylguanosine-3'-phosphate
  modified_base 13: mod_base = OTHER; note = 2'-O-methyladenosine-3'-phosphate
  modified_base 14: mod_base = OTHER; note = 2'-O-methylcytidine-3'-phosphate
  modified_base 15: mod_base = OTHER; note = 2'-O-methyluridine-3'-phosphate
  modified_base 16: mod_base = OTHER; note = 2'-O-methylguanosine-3'-phosphate
  modified_base 17: mod_base = OTHER; note = 2'-O-methylcytidine-3'-phosphate
  modified_base 18: mod_base = OTHER; note = 2'-O-methyluridine-3'-phosphate
  modified_base 19: mod_base = OTHER; note = 2'-O-methylguanosine-3'-phosphate
  modified_base 20: mod_base = OTHER; note = 2'-O-methylguanosine-3'-phosphate
  modified_base 21: mod_base = OTHER; note = 2'-O-methyladenosine-3'-phosphate ((2S,4R)-1-[29-[[2-(acetylamino)-2-deoxy-beta-D-galactopyra nosyl]oxy]-14,14-bis[[3-[[3-[[5-[[2-(acetylamino)-2-deoxy-b eta-D-galactopyranosyl]oxy]-1-oxopentyl]amino]propyl]amino] -3-oxopropoxy]methyl]-1,12,19,25-tetraoxo-16-oxa-13,20,24-t riazanonacos-1-yl]-4-hydroxy-2-pyrrolidinyl)methyl ester
tgttattttctgactgctgga

SEQ ID NO: 942 - RNA, 21 nt, synthetic construct
  source 1..21: mol_type = other RNA
  modified_base 1: mod_base = OTHER; note = 2'-O-methyluridine-3'-phosphorothioate
  modified_base 2: mod_base = OTHER; note = 2'-O-methylguanosine-3'-phosphorothioate
  modified_base 3: mod_base = OTHER; note = 2'-O-methyluridine-3'-phosphate
  modified_base 4: mod_base = OTHER; note = 2'-O-methyluridine-3'-phosphate
  modified_base 5: mod_base = OTHER; note = 2'-O-methyladenosine-3'-phosphate
  modified_base 6: mod_base = OTHER; note = 2'-O-methyluridine-3'-phosphate
  modified_base 7: mod_base = OTHER; note = 2'-deoxy-2'-fluorouridine-3'-phosphate
  modified_base 8: mod_base = OTHER; note = 2'-O-methyluridine-3'-phosphate
  modified_base 9: mod_base = OTHER; note = 2'-deoxy-2'-fluorouridine-3'-phosphate
  modified_base 10: mod_base = OTHER; note = 2'-deoxy-2'-fluorocytidine-3'-phosphate
  modified_base 11: mod_base = OTHER; note = 2'-deoxy-2'-fluorouridine-3'-phosphate
  modified_base 12: mod_base = OTHER; note = 2'-O-methylguanosine-3'-phosphate
  modified_base 13: mod_base = OTHER; note = 2'-O-methyladenosine-3'-phosphate
  modified_base 14: mod_base = OTHER; note = 2'-O-methylcytidine-3'-phosphate
  modified_base 15: mod_base = OTHER; note = 2'-O-methyluridine-3'-phosphate
  modified_base 16: mod_base = OTHER; note = 2'-O-methyluridine-3'-phosphate
  modified_base 17: mod_base = OTHER; note = 2'-O-methylcytidine-3'-phosphate
  modified_base 18: mod_base = OTHER; note = 2'-O-methyluridine-3'-phosphate
  modified_base 19: mod_base = OTHER; note = 2'-O-methylguanosine-3'-phosphate
  modified_base 20: mod_base = OTHER; note = 2'-O-methylguanosine-3'-phosphate
  modified_base 21: mod_base = OTHER; note = 2'-O-methyladenosine-3'-phosphate ((2S,4R)-1-[29-[[2-(acetylamino)-2-deoxy-beta-D-galactopyra nosyl]oxy]-14,14-bis[[3-[[3-[[5-[[2-(acetylamino)-2-deoxy-b eta-D-galactopyranosyl]oxy]-1-oxopentyl]amino]propyl]amino] -3-oxopropoxy]methyl]-1,12,19,25-tetraoxo-16-oxa-13,20,24-t riazanonacos-1-yl]-4-hydroxy-2-pyrrolidinyl)methyl ester
tgttattttctgacttctgga

SEQ ID NO: 943 - RNA, 21 nt, synthetic construct
  source 1..21: mol_type = other RNA
  modified_base 1: mod_base = OTHER; note = 2'-O-methylguanosine-3'-phosphorothioate
  modified_base 2: mod_base = OTHER; note = 2'-O-methyluridine-3'-phosphorothioate
  modified_base 3: mod_base = OTHER; note = 2'-O-methyluridine-3'-phosphate
  modified_base 4: mod_base = OTHER; note = 2'-O-methyladenosine-3'-phosphate
  modified_base 5: mod_base = OTHER; note = 2'-O-methyluridine-3'-phosphate
  modified_base 6: mod_base = OTHER; note = 2'-O-methyluridine-3'-phosphate
  modified_base 7: mod_base = OTHER; note = 2'-deoxy-2'-fluorouridine-3'-phosphate
  modified_base 8: mod_base = OTHER; note = 2'-O-methyluridine-3'-phosphate
  modified_base 9: mod_base = OTHER; note = 2'-deoxy-2'-fluorocytidine-3'-phosphate
  modified_base 10: mod_base = OTHER; note = 2'-deoxy-2'-fluorouridine-3'-phosphate
  modified_base 11: mod_base = OTHER; note = 2'-deoxy-2'-fluoroguanosine-3'-phosphate
  modified_base 12: mod_base = OTHER; note = 2'-O-methyladenosine-3'-phosphate
  modified_base 13: mod_base = OTHER; note = 2'-O-methylcytidine-3'-phosphate
  modified_base 14: mod_base = OTHER; note = 2'-O-methyluridine-3'-phosphate
  modified_base 15: mod_base = OTHER; note = 2'-O-methylguanosine-3'-phosphate
  modified_base 16: mod_base = OTHER; note = 2'-O-methylcytidine-3'-phosphate
  modified_base 17: mod_base = OTHER; note = 2'-O-methyluridine-3'-phosphate
  modified_base 18: mod_base = OTHER; note = 2'-O-methylguanosine-3'-phosphate
  modified_base 19: mod_base = OTHER; note = 2'-O-methylguanosine-3'-phosphate
  modified_base 20: mod_base = OTHER; note = 2'-O-methyladenosine-3'-phosphate
  modified_base 21: mod_base = OTHER; note = 2'-O-methyladenosine-3'-phosphate ((2S,4R)-1-[29-[[2-(acetylamino)-2-deoxy-beta-D-galactopyra nosyl]oxy]-14,14-bis[[3-[[3-[[5-[[2-(acetylamino)-2-deoxy-b eta-D-galactopyranosyl]oxy]-1-oxopentyl]amino]propyl]amino] -3-oxopropoxy]methyl]-1,12,19,25-tetraoxo-16-oxa-13,20,24-t riazanonacos-1-yl]-4-hydroxy-2-pyrrolidinyl)methyl ester
gttattttctgactgctggaa

SEQ ID NO: 944 - RNA, 21 nt, synthetic construct
  source 1..21: mol_type = other RNA
  modified_base 1: mod_base = OTHER; note = 2'-O-methylguanosine-3'-phosphorothioate
  modified_base 2: mod_base = OTHER; note = 2'-O-methyluridine-3'-phosphorothioate
  modified_base 3: mod_base = OTHER; note = 2'-O-methyluridine-3'-phosphate
  modified_base 4: mod_base = OTHER; note = 2'-O-methyladenosine-3'-phosphate
  modified_base 5: mod_base = OTHER; note = 2'-O-methyluridine-3'-phosphate
  modified_base 6: mod_base = OTHER; note = 2'-O-methyluridine-3'-phosphate
  modified_base 7: mod_base = OTHER; note = 2'-deoxy-2'-fluorouridine-3'-phosphate
  modified_base 8: mod_base = OTHER; note = 2'-O-methyluridine-3'-phosphate
  modified_base 9: mod_base = OTHER; note = 2'-deoxy-2'-fluorocytidine-3'-phosphate
  modified_base 10: mod_base = OTHER; note = 2'-deoxy-2'-fluorouridine-3'-phosphate
  modified_base 11: mod_base = OTHER; note = 2'-deoxy-2'-fluoroguanosine-3'-phosphate
  modified_base 12: mod_base = OTHER; note = 2'-O-methyladenosine-3'-phosphate
  modified_base 13: mod_base = OTHER; note = 2'-O-methylcytidine-3'-phosphate
  modified_base 14: mod_base = OTHER; note = 2'-O-methyluridine-3'-phosphate
  modified_base 15: mod_base = OTHER; note = 2'-O-methyluridine-3'-phosphate
  modified_base 16: mod_base = OTHER; note = 2'-O-methylcytidine-3'-phosphate
  modified_base 17: mod_base = OTHER; note = 2'-O-methyluridine-3'-phosphate
  modified_base 18: mod_base = OTHER; note = 2'-O-methylguanosine-3'-phosphate
  modified_base 19: mod_base = OTHER; note = 2'-O-methylguanosine-3'-phosphate
  modified_base 20: mod_base = OTHER; note = 2'-O-methyladenosine-3'-phosphate
  modified_base 21: mod_base = OTHER; note = 2'-O-methyladenosine-3'-phosphate ((2S,4R)-1-[29-[[2-(acetylamino)-2-deoxy-beta-D-galactopyra nosyl]oxy]-14,14-bis[[3-[[3-[[5-[[2-(acetylamino)-2-deoxy-b eta-D-galactopyranosyl]oxy]-1-oxopentyl]amino]propyl]amino] -3-oxopropoxy]methyl]-1,12,19,25-tetraoxo-16-oxa-13,20,24-t riazanonacos-1-yl]-4-hydroxy-2-pyrrolidinyl)methyl ester
gttattttctgacttctggaa

SEQ ID NO: 945 - RNA, 21 nt, synthetic construct
  source 1..21: mol_type = other RNA
  modified_base 1: mod_base = OTHER; note = 2'-O-methyluridine-3'-phosphorothioate
  modified_base 2: mod_base = OTHER; note = 2'-O-methyluridine-3'-phosphorothioate
  modified_base 3: mod_base = OTHER; note = 2'-O-methyladenosine-3'-phosphate
  modified_base 4: mod_base = OTHER; note = 2'-O-methyluridine-3'-phosphate
  modified_base 5: mod_base = OTHER; note = 2'-O-methyluridine-3'-phosphate
  modified_base 6: mod_base = OTHER; note = 2'-O-methyluridine-3'-phosphate
  modified_base 7: mod_base = OTHER; note = 2'-deoxy-2'-fluorouridine-3'-phosphate
  modified_base 8: mod_base = OTHER; note = 2'-O-methylcytidine-3'-phosphate
  modified_base 9: mod_base = OTHER; note = 2'-deoxy-2'-fluorouridine-3'-phosphate
  modified_base 10: mod_base = OTHER; note = 2'-deoxy-2'-fluoroguanosine-3'-phosphate
  modified_base 11: mod_base = OTHER; note = 2'-deoxy-2'-fluoroadenosine-3'-phosphate
  modified_base 12: mod_base = OTHER; note = 2'-O-methylcytidine-3'-phosphate
  modified_base 13: mod_base = OTHER; note = 2'-O-methyluridine-3'-phosphate
  modified_base 14: mod_base = OTHER; note = 2'-O-methylguanosine-3'-phosphate
  modified_base 15: mod_base = OTHER; note = 2'-O-methylcytidine-3'-phosphate
  modified_base 16: mod_base = OTHER; note = 2'-O-methyluridine-3'-phosphate
  modified_base 17: mod_base = OTHER; note = 2'-O-methylguanosine-3'-phosphate
  modified_base 18: mod_base = OTHER; note = 2'-O-methylguanosine-3'-phosphate
  modified_base 19: mod_base = OTHER; note = 2'-O-methyladenosine-3'-phosphate
  modified_base 20: mod_base = OTHER; note = 2'-O-methyluridine-3'-phosphate
  modified_base 21: mod_base = OTHER; note = 2'-O-methyladenosine-3'-phosphate ((2S,4R)-1-[29-[[2-(acetylamino)-2-deoxy-beta-D-galactopyra nosyl]oxy]-14,14-bis[[3-[[3-[[5-[[2-(acetylamino)-2-deoxy-b eta-D-galactopyranosyl]oxy]-1-oxopentyl]amino]propyl]amino] -3-oxopropoxy]methyl]-1,12,19,25-tetraoxo-16-oxa-13,20,24-t riazanonacos-1-yl]-4-hydroxy-2-pyrrolidinyl)methyl ester
ttattttctgactgctggata

SEQ ID NO: 946 - RNA, 21 nt, synthetic construct
  source 1..21: mol_type = other RNA
  modified_base 1: mod_base = OTHER; note = 2'-O-methyluridine-3'-phosphorothioate
  modified_base 2: mod_base = OTHER; note = 2'-O-methyluridine-3'-phosphorothioate
  modified_base 3: mod_base = OTHER; note = 2'-O-methyladenosine-3'-phosphate
  modified_base 4: mod_base = OTHER; note = 2'-O-methyluridine-3'-phosphate
  modified_base 5: mod_base = OTHER; note = 2'-O-methyluridine-3'-phosphate
  modified_base 6: mod_base = OTHER; note = 2'-O-methyluridine-3'-phosphate
  modified_base 7: mod_base = OTHER; note = 2'-deoxy-2'-fluorouridine-3'-phosphate
  modified_base 8: mod_base = OTHER; note = 2'-O-methylcytidine-3'-phosphate
  modified_base 9: mod_base = OTHER; note = 2'-deoxy-2'-fluorouridine-3'-phosphate
  modified_base 10: mod_base = OTHER; note = 2'-deoxy-2'-fluoroguanosine-3'-phosphate
  modified_base 11: mod_base = OTHER; note = 2'-deoxy-2'-fluoroadenosine-3'-phosphate
  modified_base 12: mod_base = OTHER; note = 2'-O-methylcytidine-3'-phosphate
  modified_base 13: mod_base = OTHER; note = 2'-O-methyluridine-3'-phosphate
  modified_base 14: mod_base = OTHER; note = 2'-O-methylguanosine-3'-phosphate
  modified_base 15: mod_base = OTHER; note = 2'-O-methyluridine-3'-phosphate
  modified_base 16: mod_base = OTHER; note = 2'-O-methyluridine-3'-phosphate
  modified_base 17: mod_base = OTHER; note = 2'-O-methylguanosine-3'-phosphate
  modified_base 18: mod_base = OTHER; note = 2'-O-methylguanosine-3'-phosphate
  modified_base 19: mod_base = OTHER; note = 2'-O-methyladenosine-3'-phosphate
  modified_base 20: mod_base = OTHER; note = 2'-O-methyluridine-3'-phosphate
  modified_base 21: mod_base = OTHER; note = 2'-O-methyladenosine-3'-phosphate ((2S,4R)-1-[29-[[2-(acetylamino)-2-deoxy-beta-D-galactopyra nosyl]oxy]-14,14-bis[[3-[[3-[[5-[[2-(acetylamino)-2-deoxy-b eta-D-galactopyranosyl]oxy]-1-oxopentyl]amino]propyl]amino] -3-oxopropoxy]methyl]-1,12,19,25-tetraoxo-16-oxa-13,20,24-t riazanonacos-1-yl]-4-hydroxy-2-pyrrolidinyl)methyl ester
ttattttctgactgttggata

SEQ ID NO: 947 - RNA, 21 nt, synthetic construct
  source 1..21: mol_type = other RNA
  modified_base 1: mod_base = OTHER; note = 2'-O-methyluridine-3'-phosphorothioate
  modified_base 2: mod_base = OTHER; note = 2'-O-methyladenosine-3'-phosphorothioate
  modified_base 3: mod_base = OTHER; note = 2'-O-methyluridine-3'-phosphate
  modified_base 4: mod_base = OTHER; note = 2'-O-methyluridine-3'-phosphate
  modified_base 5: mod_base = OTHER; note = 2'-O-methyluridine-3'-phosphate
  modified_base 6: mod_base = OTHER; note = 2'-O-methyluridine-3'-phosphate
  modified_base 7: mod_base = OTHER; note = 2'-deoxy-2'-fluorocytidine-3'-phosphate
  modified_base 8: mod_base = OTHER; note = 2'-O-methyluridine-3'-phosphate
  modified_base 9: mod_base = OTHER; note = 2'-deoxy-2'-fluoroguanosine-3'-phosphate
  modified_base 10: mod_base = OTHER; note = 2'-deoxy-2'-fluoroadenosine-3'-phosphate
  modified_base 11: mod_base = OTHER; note = 2'-deoxy-2'-fluorocytidine-3'-phosphate
  modified_base 12: mod_base = OTHER; note = 2'-O-methyluridine-3'-phosphate
  modified_base 13: mod_base = OTHER; note = 2'-O-methylguanosine-3'-phosphate
  modified_base 14: mod_base = OTHER; note = 2'-O-methylcytidine-3'-phosphate
  modified_base 15: mod_base = OTHER; note = 2'-O-methyluridine-3'-phosphate
  modified_base 16: mod_base = OTHER; note = 2'-O-methylguanosine-3'-phosphate
  modified_base 17: mod_base = OTHER; note = 2'-O-methylguanosine-3'-phosphate
  modified_base 18: mod_base = OTHER; note = 2'-O-methyladenosine-3'-phosphate
  modified_base 19: mod_base = OTHER; note = 2'-O-methyluridine-3'-phosphate
  modified_base 20: mod_base = OTHER; note = 2'-O-methyluridine-3'-phosphate
  modified_base 21: mod_base = OTHER; note = 2'-O-methyladenosine-3'-phosphate ((2S,4R)-1-[29-[[2-(acetylamino)-2-deoxy-beta-D-galactopyra nosyl]oxy]-14,14-bis[[3-[[3-[[5-[[2-(acetylamino)-2-deoxy-b eta-D-galactopyranosyl]oxy]-1-oxopentyl]amino]propyl]amino] -3-oxopropoxy]methyl]-1,12,19,25-tetraoxo-16-oxa-13,20,24-t riazanonacos-1-yl]-4-hydroxy-2-pyrrolidinyl)methyl ester
tattttctgactgctggatta

SEQ ID NO: 948 - RNA, 21 nt, synthetic construct
  source 1..21: mol_type = other RNA
  modified_base 1: mod_base = OTHER; note = 2'-O-methyluridine-3'-phosphorothioate
  modified_base 2: mod_base = OTHER; note = 2'-O-methyladenosine-3'-phosphorothioate
  modified_base 3: mod_base = OTHER; note = 2'-O-methyluridine-3'-phosphate
  modified_base 4: mod_base = OTHER; note = 2'-O-methyluridine-3'-phosphate
  modified_base 5: mod_base = OTHER; note = 2'-O-methyluridine-3'-phosphate
  modified_base 6: mod_base = OTHER; note = 2'-O-methyluridine-3'-phosphate
  modified_base 7: mod_base = OTHER; note = 2'-deoxy-2'-fluorocytidine-3'-phosphate
  modified_base 8: mod_base = OTHER; note = 2'-O-methyluridine-3'-phosphate
  modified_base 9: mod_base = OTHER; note = 2'-deoxy-2'-fluoroguanosine-3'-phosphate
  modified_base 10: mod_base = OTHER; note = 2'-deoxy-2'-fluoroadenosine-3'-phosphate
  modified_base 11: mod_base = OTHER; note = 2'-deoxy-2'-fluorocytidine-3'-phosphate
  modified_base 12: mod_base = OTHER; note = 2'-O-methyluridine-3'-phosphate
  modified_base 13: mod_base = OTHER; note = 2'-O-methylguanosine-3'-phosphate
  modified_base 14: mod_base = OTHER; note = 2'-O-methylcytidine-3'-phosphate
  modified_base 15: mod_base = OTHER; note = 2'-O-methyluridine-3'-phosphate
  modified_base 16: mod_base = OTHER; note = 2'-O-methyluridine-3'-phosphate
  modified_base 17: mod_base = OTHER; note = 2'-O-methylguanosine-3'-phosphate
  modified_base 18: mod_base = OTHER; note = 2'-O-methyladenosine-3'-phosphate
  modified_base 19: mod_base = OTHER; note = 2'-O-methyluridine-3'-phosphate
  modified_base 20: mod_base = OTHER; note = 2'-O-methyluridine-3'-phosphate
  modified_base 21: mod_base = OTHER; note = 2'-O-methyladenosine-3'-phosphate ((2S,4R)-1-[29-[[2-(acetylamino)-2-deoxy-beta-D-galactopyra nosyl]oxy]-14,14-bis[[3-[[3-[[5-[[2-(acetylamino)-2-deoxy-b eta-D-galactopyranosyl]oxy]-1-oxopentyl]amino]propyl]amino] -3-oxopropoxy]methyl]-1,12,19,25-tetraoxo-16-oxa-13,20,24-t riazanonacos-1-yl]-4-hydroxy-2-pyrrolidinyl)methyl ester
tattttctgactgcttgatta

SEQ ID NO: 949 - RNA, 21 nt, synthetic construct
  source 1..21: mol_type = other RNA
  modified_base 1: mod_base = OTHER; note = 2'-O-methyladenosine-3'-phosphorothioate
  modified_base 2: mod_base = OTHER; note = 2'-O-methyluridine-3'-phosphorothioate
  modified_base 3: mod_base = OTHER; note = 2'-O-methyluridine-3'-phosphate
  modified_base 4: mod_base = OTHER; note = 2'-O-methyluridine-3'-phosphate
  modified_base 5: mod_base = OTHER; note = 2'-O-methyluridine-3'-phosphate
  modified_base 6: mod_base = OTHER; note = 2'-O-methylcytidine-3'-phosphate
  modified_base 7: mod_base = OTHER; note = 2'-deoxy-2'-fluorouridine-3'-phosphate
  modified_base 8: mod_base = OTHER; note = 2'-O-methylguanosine-3'-phosphate
  modified_base 9: mod_base = OTHER; note = 2'-deoxy-2'-fluoroadenosine-3'-phosphate
  modified_base 10: mod_base = OTHER; note = 2'-deoxy-2'-fluorocytidine-3'-phosphate
  modified_base 11: mod_base = OTHER; note = 2'-deoxy-2'-fluorouridine-3'-phosphate
  modified_base 12: mod_base = OTHER; note = 2'-O-methylguanosine-3'-phosphate
  modified_base 13: mod_base = OTHER; note = 2'-O-methylcytidine-3'-phosphate
  modified_base 14: mod_base = OTHER; note = 2'-O-methyluridine-3'-phosphate
  modified_base 15: mod_base = OTHER; note = 2'-O-methylguanosine-3'-phosphate
  modified_base 16: mod_base = OTHER; note = 2'-O-methylguanosine-3'-phosphate
  modified_base 17: mod_base = OTHER; note = 2'-O-methyladenosine-3'-phosphate
  modified_base 18: mod_base = OTHER; note = 2'-O-methyluridine-3'-phosphate
  modified_base 19: mod_base = OTHER; note = 2'-O-methyluridine-3'-phosphate
  modified_base 20: mod_base = OTHER; note = 2'-O-methylcytidine-3'-phosphate
  modified_base 21: mod_base = OTHER; note = 2'-O-methyladenosine-3'-phosphate ((2S,4R)-1-[29-[[2-(acetylamino)-2-deoxy-beta-D-galactopyra nosyl]oxy]-14,14-bis[[3-[[3-[[5-[[2-(acetylamino)-2-deoxy-b eta-D-galactopyranosyl]oxy]-1-oxopentyl]amino]propyl]amino] -3-oxopropoxy]methyl]-1,12,19,25-tetraoxo-16-oxa-13,20,24-t riazanonacos-1-yl]-4-hydroxy-2-pyrrolidinyl)methyl ester
attttctgactgctggattca

SEQ ID NO: 950 - RNA, 21 nt, synthetic construct
  source 1..21: mol_type = other RNA
  modified_base 1: mod_base = OTHER; note = 2'-O-methyladenosine-3'-phosphorothioate
  modified_base 2: mod_base = OTHER; note = 2'-O-methyluridine-3'-phosphorothioate
  modified_base 3: mod_base = OTHER; note = 2'-O-methyluridine-3'-phosphate
  modified_base 4: mod_base = OTHER; note = 2'-O-methyluridine-3'-phosphate
  modified_base 5: mod_base = OTHER; note = 2'-O-methyluridine-3'-phosphate
  modified_base 6: mod_base = OTHER; note = 2'-O-methylcytidine-3'-phosphate
  modified_base 7: mod_base = OTHER; note = 2'-deoxy-2'-fluorouridine-3'-phosphate
  modified_base 8: mod_base = OTHER; note = 2'-O-methylguanosine-3'-phosphate
  modified_base 9: mod_base = OTHER; note = 2'-deoxy-2'-fluoroadenosine-3'-phosphate
  modified_base 10: mod_base = OTHER; note = 2'-deoxy-2'-fluorocytidine-3'-phosphate
  modified_base 11: mod_base = OTHER; note = 2'-deoxy-2'-fluorouridine-3'-phosphate
  modified_base 12: mod_base = OTHER; note = 2'-O-methylguanosine-3'-phosphate
  modified_base 13: mod_base = OTHER; note = 2'-O-methylcytidine-3'-phosphate
  modified_base 14: mod_base = OTHER; note = 2'-O-methyluridine-3'-phosphate
  modified_base 15: mod_base = OTHER; note = 2'-O-methyluridine-3'-phosphate
  modified_base 16: mod_base = OTHER; note = 2'-O-methylguanosine-3'-phosphate
  modified_base 17: mod_base = OTHER; note = 2'-O-methyladenosine-3'-phosphate
  modified_base 18: mod_base = OTHER; note = 2'-O-methyluridine-3'-phosphate
  modified_base 19: mod_base = OTHER; note = 2'-O-methyluridine-3'-phosphate
  modified_base 20: mod_base = OTHER; note = 2'-O-methylcytidine-3'-phosphate
  modified_base 21: mod_base = OTHER; note = 2'-O-methyladenosine-3'-phosphate ((2S,4R)-1-[29-[[2-(acetylamino)-2-deoxy-beta-D-galactopyra nosyl]oxy]-14,14-bis[[3-[[3-[[5-[[2-(acetylamino)-2-deoxy-b eta-D-galactopyranosyl]oxy]-1-oxopentyl]amino]propyl]amino] -3-oxopropoxy]methyl]-1,12,19,25-tetraoxo-16-oxa-13,20,24-t riazanonacos-1-yl]-4-hydroxy-2-pyrrolidinyl)methyl ester
attttctgactgcttgattca

SEQ ID NO: 951 - RNA, 21 nt, synthetic construct
  source 1..21: mol_type = other RNA
  modified_base 1: mod_base = OTHER; note = 2'-O-methyluridine-3'-phosphorothioate
  modified_base 2: mod_base = OTHER; note = 2'-O-methylcytidine-3'-phosphorothioate
  modified_base 3: mod_base = OTHER; note = 2'-O-methyluridine-3'-phosphate
  modified_base 4: mod_base = OTHER; note = 2'-O-methylguanosine-3'-phosphate
  modified_base 5: mod_base = OTHER; note = 2'-O-methyladenosine-3'-phosphate
  modified_base 6: mod_base = OTHER; note = 2'-O-methylcytidine-3'-phosphate
  modified_base 7: mod_base = OTHER; note = 2'-deoxy-2'-fluorouridine-3'-phosphate
  modified_base 8: mod_base = OTHER; note = 2'-O-methylguanosine-3'-phosphate
  modified_base 9: mod_base = OTHER; note = 2'-deoxy-2'-fluorocytidine-3'-phosphate
  modified_base 10: mod_base = OTHER; note = 2'-deoxy-2'-fluorouridine-3'-phosphate
  modified_base 11: mod_base = OTHER; note = 2'-deoxy-2'-fluoroguanosine-3'-phosphate
  modified_base 12: mod_base = OTHER; note = 2'-O-methylguanosine-3'-phosphate
  modified_base 13: mod_base = OTHER; note = 2'-O-methyladenosine-3'-phosphate
  modified_base 14: mod_base = OTHER; note = 2'-O-methyluridine-3'-phosphate
  modified_base 15: mod_base = OTHER; note = 2'-O-methyluridine-3'-phosphate
  modified_base 16: mod_base = OTHER; note = 2'-O-methylcytidine-3'-phosphate
  modified_base 17: mod_base = OTHER; note = 2'-O-methyluridine-3'-phosphate
  modified_base 18: mod_base = OTHER; note = 2'-O-methylguanosine-3'-phosphate
  modified_base 19: mod_base = OTHER; note = 2'-O-methyluridine-3'-phosphate
  modified_base 20: mod_base = OTHER; note = 2'-O-methyladenosine-3'-phosphate
  modified_base 21: mod_base = OTHER; note = 2'-O-methyladenosine-3'-phosphate ((2S,4R)-1-[29-[[2-(acetylamino)-2-deoxy-beta-D-galactopyra nosyl]oxy]-14,14-bis[[3-[[3-[[5-[[2-(acetylamino)-2-deoxy-b eta-D-galactopyranosyl]oxy]-1-oxopentyl]amino]propyl]amino] -3-oxopropoxy]methyl]-1,12,19,25-tetraoxo-16-oxa-13,20,24-t riazanonacos-1-yl]-4-hydroxy-2-pyrrolidinyl)methyl ester
tctgactgctggattctgtaa

SEQ ID NO: 952 - RNA, 21 nt, synthetic construct
  source 1..21: mol_type = other RNA
  modified_base 1: mod_base = OTHER; note = 2'-O-methyladenosine-3'-phosphorothioate
  modified_base 2: mod_base = OTHER; note = 2'-O-methylguanosine-3'-phosphorothioate
  modified_base 3: mod_base = OTHER; note = 2'-O-methyluridine-3'-phosphate
  modified_base 4: mod_base = OTHER; note = 2'-O-methyladenosine-3'-phosphate
  modified_base 5: mod_base = OTHER; note = 2'-O-methyladenosine-3'-phosphate
  modified_base 6: mod_base = OTHER; note = 2'-O-methylguanosine-3'-phosphate
  modified_base 7: mod_base = OTHER; note = 2'-deoxy-2'-fluoroguanosine-3'-phosphate
  modified_base 8: mod_base = OTHER; note = 2'-O-methyluridine-3'-phosphate
  modified_base 9: mod_base = OTHER; note = 2'-deoxy-2'-fluoroguanosine-3'-phosphate
  modified_base 10: mod_base = OTHER; note = 2'-deoxy-2'-fluoroadenosine-3'-phosphate
  modified_base 11: mod_base = OTHER; note = 2'-deoxy-2'-fluorocytidine-3'-phosphate
  modified_base 12: mod_base = OTHER; note = 2'-O-methyladenosine-3'-phosphate
  modified_base 13: mod_base = OTHER; note = 2'-O-methyluridine-3'-phosphate
  modified_base 14: mod_base = OTHER; note = 2'-O-methyladenosine-3'-phosphate
  modified_base 15: mod_base = OTHER; note = 2'-O-methylguanosine-3'-phosphate
  modified_base 16: mod_base = OTHER; note = 2'-O-methylcytidine-3'-phosphate
  modified_base 17: mod_base = OTHER; note = 2'-O-methyluridine-3'-phosphate
  modified_base 18: mod_base = OTHER; note = 2'-O-methyladenosine-3'-phosphate
  modified_base 19: mod_base = OTHER; note = 2'-O-methyluridine-3'-phosphate
  modified_base 20: mod_base = OTHER; note = 2'-O-methylguanosine-3'-phosphate
  modified_base 21: mod_base = OTHER; note = 2'-O-methyladenosine-3'-phosphate ((2S,4R)-1-[29-[[2-(acetylamino)-2-deoxy-beta-D-galactopyra nosyl]oxy]-14,14-bis[[3-[[3-[[5-[[2-(acetylamino)-2-deoxy-b eta-D-galactopyranosyl]oxy]-1-oxopentyl]amino]propyl]amino] -3-oxopropoxy]methyl]-1,12,19,25-tetraoxo-16-oxa-13,20,24-t riazanonacos-1-yl]-4-hydroxy-2-pyrrolidinyl)methyl ester
agtaaggtgacatagctatga

SEQ ID NO: 953 - RNA, 21 nt, synthetic construct
  source 1..21: mol_type = other RNA
  modified_base 1: mod_base = OTHER; note = 2'-O-methylguanosine-3'-phosphorothioate
  modified_base 2: mod_base = OTHER; note = 2'-O-methyluridine-3'-phosphorothioate
  modified_base 3: mod_base = OTHER; note = 2'-O-methyladenosine-3'-phosphate
  modified_base 4: mod_base = OTHER; note = 2'-O-methyladenosine-3'-phosphate
  modified_base 5: mod_base = OTHER; note = 2'-O-methylguanosine-3'-phosphate
  modified_base 6: mod_base = OTHER; note = 2'-O-methylguanosine-3'-phosphate
  modified_base 7: mod_base = OTHER; note = 2'-deoxy-2'-fluorouridine-3'-phosphate
  modified_base 8: mod_base = OTHER; note = 2'-O-methylguanosine-3'-phosphate
  modified_base 9: mod_base = OTHER; note = 2'-deoxy-2'-fluoroadenosine-3'-phosphate
  modified_base 10: mod_base = OTHER; note = 2'-deoxy-2'-fluorocytidine-3'-phosphate
  modified_base 11: mod_base = OTHER; note = 2'-deoxy-2'-fluoroadenosine-3'-phosphate
  modified_base 12: mod_base = OTHER; note = 2'-O-methyluridine-3'-phosphate
  modified_base 13: mod_base = OTHER; note = 2'-O-methyladenosine-3'-phosphate
  modified_base 14: mod_base = OTHER; note = 2'-O-methylguanosine-3'-phosphate
  modified_base 15: mod_base = OTHER; note = 2'-O-methylcytidine-3'-phosphate
  modified_base 16: mod_base = OTHER; note = 2'-O-methyluridine-3'-phosphate
  modified_base 17: mod_base = OTHER; note = 2'-O-methyladenosine-3'-phosphate
  modified_base 18: mod_base = OTHER; note = 2'-O-methyluridine-3'-phosphate
  modified_base 19: mod_base = OTHER; note = 2'-O-methylguanosine-3'-phosphate
  modified_base 20: mod_base = OTHER; note = 2'-O-methyladenosine-3'-phosphate
  modified_base 21: mod_base = OTHER; note = 2'-O-methyladenosine-3'-phosphate ((2S,4R)-1-[29-[[2-(acetylamino)-2-deoxy-beta-D-galactopyra nosyl]oxy]-14,14-bis[[3-[[3-[[5-[[2-(acetylamino)-2-deoxy-b eta-D-galactopyranosyl]oxy]-1-oxopentyl]amino]propyl]amino] -3-oxopropoxy]methyl]-1,12,19,25-tetraoxo-16-oxa-13,20,24-t riazanonacos-1-yl]-4-hydroxy-2-pyrrolidinyl)methyl ester
gtaaggtgacatagctatgaa

SEQ ID NO: 954 - RNA, 21 nt, synthetic construct
  source 1..21: mol_type = other RNA
  modified_base 1: mod_base = OTHER; note = 2'-O-methylguanosine-3'-phosphorothioate
  modified_base 2: mod_base = OTHER; note = 2'-O-methyluridine-3'-phosphorothioate
  modified_base 3: mod_base = OTHER; note = 2'-O-methyladenosine-3'-phosphate
  modified_base 4: mod_base = OTHER; note = 2'-O-methyladenosine-3'-phosphate
  modified_base 5: mod_base = OTHER; note = 2'-O-methylguanosine-3'-phosphate
  modified_base 6: mod_base = OTHER; note = 2'-O-methylguanosine-3'-phosphate
  modified_base 7: mod_base = OTHER; note = 2'-deoxy-2'-fluorouridine-3'-phosphate
  modified_base 8: mod_base = OTHER; note = 2'-O-methylguanosine-3'-phosphate
  modified_base 9: mod_base = OTHER; note = 2'-deoxy-2'-fluoroadenosine-3'-phosphate
  modified_base 10: mod_base = OTHER; note = 2'-deoxy-2'-fluorocytidine-3'-phosphate
  modified_base 11: mod_base = OTHER; note = 2'-deoxy-2'-fluoroadenosine-3'-phosphate
  modified_base 12: mod_base = OTHER; note = 2'-O-methyluridine-3'-phosphate
  modified_base 13: mod_base = OTHER; note = 2'-O-methyladenosine-3'-phosphate
  modified_base 14: mod_base = OTHER; note = 2'-O-methylguanosine-3'-phosphate
  modified_base 15: mod_base = OTHER; note = 2'-O-methyluridine-3'-phosphate
  modified_base 16: mod_base = OTHER; note = 2'-O-methyluridine-3'-phosphate
  modified_base 17: mod_base = OTHER; note = 2'-O-methyladenosine-3'-phosphate
  modified_base 18: mod_base = OTHER; note = 2'-O-methyluridine-3'-phosphate
  modified_base 19: mod_base = OTHER; note = 2'-O-methylguanosine-3'-phosphate
  modified_base 20: mod_base = OTHER; note = 2'-O-methyladenosine-3'-phosphate
  modified_base 21: mod_base = OTHER; note = 2'-O-methyladenosine-3'-phosphate ((2S,4R)-1-[29-[[2-(acetylamino)-2-deoxy-beta-D-galactopyra nosyl]oxy]-14,14-bis[[3-[[3-[[5-[[2-(acetylamino)-2-deoxy-b eta-D-galactopyranosyl]oxy]-1-oxopentyl]amino]propyl]amino] -3-oxopropoxy]methyl]-1,12,19,25-tetraoxo-16-oxa-13,20,24-t riazanonacos-1-yl]-4-hydroxy-2-pyrrolidinyl)methyl ester
gtaaggtgacatagttatgaa

SEQ ID NO: 955 - RNA, 21 nt, synthetic construct
  source 1..21: mol_type = other RNA
  modified_base 1: mod_base = OTHER; note = 2'-O-methyluridine-3'-phosphorothioate
  modified_base 2: mod_base = OTHER; note = 2'-O-methyladenosine-3'-phosphorothioate
  modified_base 3: mod_base = OTHER; note = 2'-O-methyladenosine-3'-phosphate
  modified_base 4: mod_base = OTHER; note = 2'-O-methylguanosine-3'-phosphate
  modified_base 5: mod_base = OTHER; note = 2'-O-methylguanosine-3'-phosphate
  modified_base 6: mod_base = OTHER; note = 2'-O-methyluridine-3'-phosphate
  modified_base 7: mod_base = OTHER; note = 2'-deoxy-2'-fluoroguanosine-3'-phosphate
  modified_base 8: mod_base = OTHER; note = 2'-O-methyladenosine-3'-phosphate
  modified_base 9: mod_base = OTHER; note = 2'-deoxy-2'-fluorocytidine-3'-phosphate
  modified_base 10: mod_base = OTHER; note = 2'-deoxy-2'-fluoroadenosine-3'-phosphate
  modified_base 11: mod_base = OTHER; note = 2'-deoxy-2'-fluorouridine-3'-phosphate
  modified_base 12: mod_base = OTHER; note = 2'-O-methyladenosine-3'-phosphate
  modified_base 13: mod_base = OTHER; note = 2'-O-methylguanosine-3'-phosphate
  modified_base 14: mod_base = OTHER; note = 2'-O-methylcytidine-3'-phosphate
  modified_base 15: mod_base = OTHER; note = 2'-O-methyluridine-3'-phosphate
  modified_base 16: mod_base = OTHER; note = 2'-O-methyladenosine-3'-phosphate
  modified_base 17: mod_base = OTHER; note = 2'-O-methyluridine-3'-phosphate
  modified_base 18: mod_base = OTHER; note = 2'-O-methylguanosine-3'-phosphate
  modified_base 19: mod_base = OTHER; note = 2'-O-methyladenosine-3'-phosphate
  modified_base 20: mod_base = OTHER; note = 2'-O-methylcytidine-3'-phosphate
  modified_base 21: mod_base = OTHER; note = 2'-O-methyladenosine-3'-phosphate ((2S,4R)-1-[29-[[2-(acetylamino)-2-deoxy-beta-D-galactopyra nosyl]oxy]-14,14-bis[[3-[[3-[[5-[[2-(acetylamino)-2-deoxy-b eta-D-galactopyranosyl]oxy]-1-oxopentyl]amino]propyl]amino] -3-oxopropoxy]methyl]-1,12,19,25-tetraoxo-16-oxa-13,20,24-t riazanonacos-1-yl]-4-hydroxy-2-pyrrolidinyl)methyl ester
taaggtgacatagctatgaca

SEQ ID NO: 956 - RNA, 21 nt, synthetic construct
  source 1..21: mol_type = other RNA
  modified_base 1: mod_base = OTHER; note = 2'-O-methyladenosine-3'-phosphorothioate
  modified_base 2: mod_base = OTHER; note = 2'-O-methylcytidine-3'-phosphorothioate
  modified_base 3: mod_base = OTHER; note = 2'-O-methyladenosine-3'-phosphate
  modified_base 4: mod_base = OTHER; note = 2'-O-methyluridine-3'-phosphate
  modified_base 5: mod_base = OTHER; note = 2'-O-methyluridine-3'-phosphate
  modified_base 6: mod_base = OTHER; note = 2'-O-methyluridine-3'-phosphate
  modified_base 7: mod_base = OTHER; note = 2'-deoxy-2'-fluoroguanosine-3'-phosphate
  modified_base 8: mod_base = OTHER; note = 2'-O-methyluridine-3'-phosphate
  modified_base 9: mod_base = OTHER; note = 2'-deoxy-2'-fluorouridine-3'-phosphate
  modified_base 10: mod_base = OTHER; note = 2'-deoxy-2'-fluoroadenosine-3'-phosphate
  modified_base 11: mod_base = OTHER; note = 2'-deoxy-2'-fluoroadenosine-3'-phosphate
  modified_base 12: mod_base = OTHER; note = 2'-O-methyladenosine-3'-phosphate
  modified_base 13: mod_base = OTHER; note = 2'-O-methyladenosine-3'-phosphate
  modified_base 14: mod_base = OTHER; note = 2'-O-methyladenosine-3'-phosphate
  modified_base 15: mod_base = OTHER; note = 2'-O-methyluridine-3'-phosphate
  modified_base 16: mod_base = OTHER; note = 2'-O-methyladenosine-3'-phosphate
  modified_base 17: mod_base = OTHER; note = 2'-O-methyladenosine-3'-phosphate
  modified_base 18: mod_base = OTHER; note = 2'-O-methyladenosine-3'-phosphate
  modified_base 19: mod_base = OTHER; note = 2'-O-methylcytidine-3'-phosphate
  modified_base 20: mod_base = OTHER; note = 2'-O-methyluridine-3'-phosphate
  modified_base 21: mod_base = OTHER; note = 2'-O-methyladenosine-3'-phosphate ((2S,4R)-1-[29-[[2-(acetylamino)-2-deoxy-beta-D-galactopyra nosyl]oxy]-14,14-bis[[3-[[3-[[5-[[2-(acetylamino)-2-deoxy-b eta-D-galactopyranosyl]oxy]-1-oxopentyl]amino]propyl]amino] -3-oxopropoxy]methyl]-1,12,19,25-tetraoxo-16-oxa-13,20,24-t riazanonacos-1-yl]-4-hydroxy-2-pyrrolidinyl)methyl ester
acatttgttaaaaataaacta

SEQ ID NO: 957 - RNA, 21 nt, synthetic construct
  source 1..21: mol_type = other RNA
  modified_base 1: mod_base = OTHER; note = 2'-O-methylcytidine-3'-phosphate
  modified_base 2: mod_base = OTHER; note = 2'-O-methylcytidine-3'-phosphate
  modified_base 3: mod_base = OTHER; note = 2'-O-methyluridine-3'-phosphate
  modified_base 4: mod_base = OTHER; note = 2'-O-methylcytidine-3'-phosphate
  modified_base 5: mod_base = OTHER; note = 2'-O-methyluridine-3'-phosphate
  modified_base 6: mod_base = OTHER; note = 2'-O-methylguanosine-3'-phosphate
  modified_base 7: mod_base = OTHER; note = 2'-deoxy-2'-fluoroguanosine-3'-phosphate
  modified_base 8: mod_base = OTHER; note = 2'-O-methyladenosine-3'-phosphate
  modified_base 9: mod_base = OTHER; note = 2'-deoxy-2'-fluorouridine-3'-phosphate
  modified_base 10: mod_base = OTHER; note = 2'-deoxy-2'-fluoroguanosine-3'-phosphate
  modified_base 11: mod_base = OTHER; note = 2'-deoxy-2'-fluoroadenosine-3'-phosphate
  modified_base 12: mod_base = OTHER; note = 2'-O-methylcytidine-3'-phosphate
  modified_base 13: mod_base = OTHER; note = 2'-O-methyluridine-3'-phosphate
  modified_base 14: mod_base = OTHER; note = 2'-O-methyladenosine-3'-phosphate
  modified_base 15: mod_base = OTHER; note = 2'-O-methyluridine-3'-phosphate
  modified_base 16: mod_base = OTHER; note = 2'-O-methylguanosine-3'-phosphate
  modified_base 17: mod_base = OTHER; note = 2'-O-methyluridine-3'-phosphate
  modified_base 18: mod_base = OTHER; note = 2'-O-methylguanosine-3'-phosphate
  modified_base 19: mod_base = OTHER; note = 2'-O-methyladenosine-3'-phosphate
  modified_base 20: mod_base = OTHER; note = 2'-O-methyladenosine-3'-phosphate
  modified_base 21: mod_base = OTHER; note = 2'-O-methyladenosine
cctctggatgactatgtgaaa

SEQ ID NO: 958 - RNA, 21 nt, synthetic construct
  source 1..21: mol_type = other RNA
  modified_base 1: mod_base = OTHER; note = 2'-O-methyladenosine-3'-phosphate
  modified_base 2: mod_base = OTHER; note = 2'-O-methylcytidine-3'-phosphate
  modified_base 3: mod_base = OTHER; note = 2'-O-methyladenosine-3'-phosphate
  modified_base 4: mod_base = OTHER; note = 2'-O-methyluridine-3'-phosphate
  modified_base 5: mod_base = OTHER; note = 2'-O-methyluridine-3'-phosphate
  modified_base 6: mod_base = OTHER; note = 2'-O-methylcytidine-3'-phosphate
  modified_base 7: mod_base = OTHER; note = 2'-deoxy-2'-fluorocytidine-3'-phosphate
  modified_base 8: mod_base = OTHER; note = 2'-O-methyluridine-3'-phosphate
  modified_base 9: mod_base = OTHER; note = 2'-deoxy-2'-fluorouridine-3'-phosphate
  modified_base 10: mod_base = OTHER; note = 2'-deoxy-2'-fluorocytidine-3'-phosphate
  modified_base 11: mod_base = OTHER; note = 2'-deoxy-2'-fluorocytidine-3'-phosphate
  modified_base 12: mod_base = OTHER; note = 2'-O-methyladenosine-3'-phosphate
  modified_base 13: mod_base = OTHER; note = 2'-O-methyladenosine-3'-phosphate
  modified_base 14: mod_base = OTHER; note = 2'-O-methyladenosine-3'-phosphate
  modified_base 15: mod_base = OTHER; note = 2'-O-methyluridine-3'-phosphate
  modified_base 16: mod_base = OTHER; note = 2'-O-methyluridine-3'-phosphate
  modified_base 17: mod_base = OTHER; note = 2'-O-methyluridine-3'-phosphate
  modified_base 18: mod_base = OTHER; note = 2'-O-methylcytidine-3'-phosphate
  modified_base 19: mod_base = OTHER; note = 2'-O-methylcytidine-3'-phosphate
  modified_base 20: mod_base = OTHER; note = 2'-O-methyladenosine-3'-phosphate
  modified_base 21: mod_base = OTHER; note = 2'-O-methyladenosine
acattccttccaaatttccaa

SEQ ID NO: 959 - RNA, 21 nt, synthetic construct
  source 1..21: mol_type = other RNA
  modified_base 1: mod_base = OTHER; note = 2'-O-methylguanosine-3'-phosphate
  modified_base 2: mod_base = OTHER; note = 2'-O-methyladenosine-3'-phosphate
  modified_base 3: mod_base = OTHER; note = 2'-O-methyladenosine-3'-phosphate
  modified_base 4: mod_base = OTHER; note = 2'-O-methylcytidine-3'-phosphate
  modified_base 5: mod_base = OTHER; note = 2'-O-methylcytidine-3'-phosphate
  modified_base 6: mod_base = OTHER; note = 2'-O-methyluridine-3'-phosphate
  modified_base 7: mod_base = OTHER; note = 2'-deoxy-2'-fluoroguanosine-3'-phosphate
  modified_base 8: mod_base = OTHER; note = 2'-O-methyladenosine-3'-phosphate
  modified_base 9: mod_base = OTHER; note = 2'-deoxy-2'-fluoroadenosine-3'-phosphate
  modified_base 10: mod_base = OTHER; note = 2'-deoxy-2'-fluoroguanosine-3'-phosphate
  modified_base 11: mod_base = OTHER; note = 2'-deoxy-2'-fluoroadenosine-3'-phosphate
  modified_base 12: mod_base = OTHER; note = 2'-O-methyladenosine-3'-phosphate
  modified_base 13: mod_base = OTHER; note = 2'-O-methylguanosine-3'-phosphate
  modified_base 14: mod_base = OTHER; note = 2'-O-methyladenosine-3'-phosphate
  modified_base 15: mod_base = OTHER; note = 2'-O-methyladenosine-3'-phosphate
  modified_base 16: mod_base = OTHER; note = 2'-O-methyluridine-3'-phosphate
  modified_base 17: mod_base = OTHER; note = 2'-O-methyluridine-3'-phosphate
  modified_base 18: mod_base = OTHER; note = 2'-O-methyladenosine-3'-phosphate
  modified_base 19: mod_base = OTHER; note = 2'-O-methylcytidine-3'-phosphate
  modified_base 20: mod_base = OTHER; note = 2'-O-methyluridine-3'-phosphate
  modified_base 21: mod_base = OTHER; note = 2'-O-methyladenosine
gaacctgaagaagaattacta

SEQ ID NO: 960 - RNA, 21 nt, synthetic construct
  source 1..21: mol_type = other RNA
  modified_base 1: mod_base = OTHER; note = 2'-O-methylcytidine-3'-phosphate
  modified_base 2: mod_base = OTHER; note = 2'-O-methylcytidine-3'-phosphate
  modified_base 3: mod_base = OTHER; note = 2'-O-methyluridine-3'-phosphate
  modified_base 4: mod_base = OTHER; note = 2'-O-methylguanosine-3'-phosphate
  modified_base 5: mod_base = OTHER; note = 2'-O-methylcytidine-3'-phosphate
  modified_base 6: mod_base = OTHER; note = 2'-O-methyladenosine-3'-phosphate
  modified_base 7: mod_base = OTHER; note = 2'-deoxy-2'-fluoroadenosine-3'-phosphate
  modified_base 8: mod_base = OTHER; note = 2'-O-methyladenosine-3'-phosphate
  modified_base 9: mod_base = OTHER; note = 2'-deoxy-2'-fluoroadenosine-3'-phosphate
  modified_base 10: mod_base = OTHER; note = 2'-deoxy-2'-fluoroadenosine-3'-phosphate
  modified_base 11: mod_base = OTHER; note = 2'-deoxy-2'-fluorouridine-3'-phosphate
  modified_base 12: mod_base = OTHER; note = 2'-O-methyluridine-3'-phosphate
  modified_base 13: mod_base = OTHER; note = 2'-O-methyluridine-3'-phosphate
  modified_base 14: mod_base = OTHER; note = 2'-O-methylguanosine-3'-phosphate
  modified_base 15: mod_base = OTHER; note = 2'-O-methylguanosine-3'-phosphate
  modified_base 16: mod_base = OTHER; note = 2'-O-methyladenosine-3'-phosphate
  modified_base 17: mod_base = OTHER; note = 2'-O-methyluridine-3'-phosphate
  modified_base 18: mod_base = OTHER; note = 2'-O-methylguanosine-3'-phosphate
  modified_base 19: mod_base = OTHER; note = 2'-O-methyladenosine-3'-phosphate
  modified_base 20: mod_base = OTHER; note = 2'-O-methyladenosine-3'-phosphate
  modified_base 21: mod_base = OTHER; note = 2'-O-methyladenosine
cctgcaaaaatttggatgaaa

SEQ ID NO: 961 - RNA, 21 nt, synthetic construct
  source 1..21: mol_type = other RNA
  modified_base 1: mod_base = OTHER; note = 2'-O-methyladenosine-3'-phosphate
  modified_base 2: mod_base = OTHER; note = 2'-O-methylguanosine-3'-phosphate
  modified_base 3: mod_base = OTHER; note = 2'-O-methylguanosine-3'-phosphate
  modified_base 4: mod_base = OTHER; note = 2'-O-methyladenosine-3'-phosphate
  modified_base 5: mod_base = OTHER; note = 2'-O-methyladenosine-3'-phosphate
  modified_base 6: mod_base = OTHER; note = 2'-O-methyladenosine-3'-phosphate
  modified_base 7: mod_base = OTHER; note = 2'-deoxy-2'-fluoroguanosine-3'-phosphate
  modified_base 8: mod_base = OTHER; note = 2'-O-methyladenosine-3'-phosphate
  modified_base 9: mod_base = OTHER; note = 2'-deoxy-2'-fluoroadenosine-3'-phosphate
  modified_base 10: mod_base = OTHER; note = 2'-deoxy-2'-fluoroguanosine-3'-phosphate
  modified_base 11: mod_base = OTHER; note = 2'-deoxy-2'-fluorouridine-3'-phosphate
  modified_base 12: mod_base = OTHER; note = 2'-O-methylguanosine-3'-phosphate
  modified_base 13: mod_base = OTHER; note = 2'-O-methyluridine-3'-phosphate
  modified_base 14: mod_base = OTHER; note = 2'-O-methylcytidine-3'-phosphate
  modified_base 15: mod_base = OTHER; note = 2'-O-methyladenosine-3'-phosphate
  modified_base 16: mod_base = OTHER; note = 2'-O-methylguanosine-3'-phosphate
  modified_base 17: mod_base = OTHER; note = 2'-O-methyluridine-3'-phosphate
  modified_base 18: mod_base = OTHER; note = 2'-O-methylcytidine-3'-phosphate
  modified_base 19: mod_base = OTHER; note = 2'-O-methyluridine-3'-phosphate
  modified_base 20: mod_base = OTHER; note = 2'-O-methyluridine-3'-phosphate
  modified_base 21: mod_base = OTHER; note = 2'-O-methyladenosine
aggaaagaagtgtcagtctta

SEQ ID NO: 962 - RNA, 21 nt, synthetic construct
  source 1..21: mol_type = other RNA
  modified_base 1: mod_base = OTHER; note = 2'-O-methylcytidine-3'-phosphate
  modified_base 2: mod_base = OTHER; note = 2'-O-methyluridine-3'-phosphate
  modified_base 3: mod_base = OTHER; note = 2'-O-methylguanosine-3'-phosphate
  modified_base 4: mod_base = OTHER; note = 2'-O-methyladenosine-3'-phosphate
  modified_base 5: mod_base = OTHER; note = 2'-O-methylcytidine-3'-phosphate
  modified_base 6: mod_base = OTHER; note = 2'-O-methylcytidine-3'-phosphate
  modified_base 7: mod_base = OTHER; note = 2'-deoxy-2'-fluoroguanosine-3'-phosphate
  modified_base 8: mod_base = OTHER; note = 2'-O-methylguanosine-3'-phosphate
  modified_base 9: mod_base = OTHER; note = 2'-deoxy-2'-fluoroadenosine-3'-phosphate
  modified_base 10: mod_base = OTHER; note = 2'-deoxy-2'-fluorocytidine-3'-phosphate
  modified_base 11: mod_base = OTHER; note = 2'-deoxy-2'-fluorocytidine-3'-phosphate
  modified_base 12: mod_base = OTHER; note = 2'-O-methylguanosine-3'-phosphate
  modified_base 13: mod_base = OTHER; note = 2'-O-methyladenosine-3'-phosphate
  modified_base 14: mod_base = OTHER; note = 2'-O-methyladenosine-3'-phosphate
  modified_base 15: mod_base = OTHER; note = 2'-O-methyluridine-3'-phosphate
  modified_base 16: mod_base = OTHER; note = 2'-O-methylguanosine-3'-phosphate
  modified_base 17: mod_base = OTHER; note = 2'-O-methyluridine-3'-phosphate
  modified_base 18: mod_base = OTHER; note = 2'-O-methyluridine-3'-phosphate
  modified_base 19: mod_base = OTHER; note = 2'-O-methyluridine-3'-phosphate
  modified_base 20: mod_base = OTHER; note = 2'-O-methylcytidine-3'-phosphate
  modified_base 21: mod_base = OTHER; note = 2'-O-methyladenosine
ctgaccggaccgaatgtttca

SEQ ID NO: 963 - RNA, 21 nt, synthetic construct
  source 1..21: mol_type = other RNA
  modified_base 1: mod_base = OTHER; note = 2'-O-methyluridine-3'-phosphate
  modified_base 2: mod_base = OTHER; note = 2'-O-methylguanosine-3'-phosphate
  modified_base 3: mod_base = OTHER; note = 2'-O-methylcytidine-3'-phosphate
  modified_base 4: mod_base = OTHER; note = 2'-O-methyladenosine-3'-phosphate
  modified_base 5: mod_base = OTHER; note = 2'-O-methyladenosine-3'-phosphate
  modified_base 6: mod_base = OTHER; note = 2'-O-methyluridine-3'-phosphate
  modified_base 7: mod_base = OTHER; note = 2'-deoxy-2'-fluorocytidine-3'-phosphate
  modified_base 8: mod_base = OTHER; note = 2'-O-methylguanosine-3'-phosphate
  modified_base 9: mod_base = OTHER; note = 2'-deoxy-2'-fluorocytidine-3'-phosphate
  modified_base 10: mod_base = OTHER; note = 2'-deoxy-2'-fluorouridine-3'-phosphate
  modified_base 11: mod_base = OTHER; note = 2'-deoxy-2'-fluoroadenosine-3'-phosphate
  modified_base 12: mod_base = OTHER; note = 2'-O-methyluridine-3'-phosphate
  modified_base 13: mod_base = OTHER; note = 2'-O-methylguanosine-3'-phosphate
  modified_base 14: mod_base = OTHER; note = 2'-O-methyladenosine-3'-phosphate
  modified_base 15: mod_base = OTHER; note = 2'-O-methylguanosine-3'-phosphate
  modified_base 16: mod_base = OTHER; note = 2'-O-methyluridine-3'-phosphate
  modified_base 17: mod_base = OTHER; note = 2'-O-methyluridine-3'-phosphate
  modified_base 18: mod_base = OTHER; note = 2'-O-methyluridine-3'-phosphate
  modified_base 19: mod_base = OTHER; note = 2'-O-methylcytidine-3'-phosphate
  modified_base 20: mod_base = OTHER; note = 2'-O-methyluridine-3'-phosphate
  modified_base 21: mod_base = OTHER; note = 2'-O-methyladenosine
tgcaatcgctatgagtttcta

SEQ ID NO: 964 - RNA, 21 nt, synthetic construct
  source 1..21: mol_type = other RNA
  modified_base 1: mod_base = OTHER; note = 2'-O-methylguanosine-3'-phosphate
  modified_base 2: mod_base = OTHER; note = 2'-O-methylguanosine-3'-phosphate
  modified_base 3: mod_base = OTHER; note = 2'-O-methyluridine-3'-phosphate
  modified_base 4: mod_base = OTHER; note = 2'-O-methylguanosine-3'-phosphate
  modified_base 5: mod_base = OTHER; note = 2'-O-methyluridine-3'-phosphate
  modified_base 6: mod_base = OTHER; note = 2'-O-methylcytidine-3'-phosphate
  modified_base 7: mod_base = OTHER; note = 2'-deoxy-2'-fluorouridine-3'-phosphate
  modified_base 8: mod_base = OTHER; note = 2'-O-methyladenosine-3'-phosphate
  modified_base 9: mod_base = OTHER; note = 2'-deoxy-2'-fluorouridine-3'-phosphate
  modified_base 10: mod_base = OTHER; note = 2'-deoxy-2'-fluoroguanosine-3'-phosphate
  modified_base 11: mod_base = OTHER; note = 2'-deoxy-2'-fluorouridine-3'-phosphate
  modified_base 12: mod_base = OTHER; note = 2'-O-methyluridine-3'-phosphate
  modified_base 13: mod_base = OTHER; note = 2'-O-methylcytidine-3'-phosphate
  modified_base 14: mod_base = OTHER; note = 2'-O-methylguanosine-3'-phosphate
  modified_base 15: mod_base = OTHER; note = 2'-O-methyluridine-3'-phosphate
  modified_base 16: mod_base = OTHER; note = 2'-O-methylguanosine-3'-phosphate
  modified_base 17: mod_base = OTHER; note = 2'-O-methyluridine-3'-phosphate
  modified_base 18: mod_base = OTHER; note = 2'-O-methyluridine-3'-phosphate
  modified_base 19: mod_base = OTHER; note = 2'-O-methyluridine-3'-phosphate
  modified_base 20: mod_base = OTHER; note = 2'-O-methylcytidine-3'-phosphate
  modified_base 21: mod_base = OTHER; note = 2'-O-methyladenosine
ggtgtctatgttcgtgtttca

SEQ ID NO: 965 - RNA, 21 nt, synthetic construct
  source 1..21: mol_type = other RNA
  modified_base 1: mod_base = OTHER; note = 2'-O-methylguanosine-3'-phosphate
  modified_base 2: mod_base = OTHER; note = 2'-O-methyluridine-3'-phosphate
  modified_base 3: mod_base = OTHER; note = 2'-O-methylguanosine-3'-phosphate
  modified_base 4: mod_base = OTHER; note = 2'-O-methyluridine-3'-phosphate
  modified_base 5: mod_base = OTHER; note = 2'-O-methylcytidine-3'-phosphate
  modified_base 6: mod_base = OTHER; note = 2'-O-methyluridine-3'-phosphate
  modified_base 7: mod_base = OTHER; note = 2'-deoxy-2'-fluoroadenosine-3'-phosphate
  modified_base 8: mod_base = OTHER; note = 2'-O-methyluridine-3'-phosphate
  modified_base 9: mod_base = OTHER; note = 2'-deoxy-2'-fluoroguanosine-3'-phosphate
  modified_base 10: mod_base = OTHER; note = 2'-deoxy-2'-fluorouridine-3'-phosphate
  modified_base 11: mod_base = OTHER; note = 2'-deoxy-2'-fluorouridine-3'-phosphate
  modified_base 12: mod_base = OTHER; note = 2'-O-methylcytidine-3'-phosphate
  modified_base 13: mod_base = OTHER; note = 2'-O-methylguanosine-3'-phosphate
  modified_base 14: mod_base = OTHER; note = 2'-O-methyluridine-3'-phosphate
  modified_base 15: mod_base = OTHER; note = 2'-O-methylguanosine-3'-phosphate
  modified_base 16: mod_base = OTHER; note = 2'-O-methyluridine-3'-phosphate
  modified_base 17: mod_base = OTHER; note = 2'-O-methyluridine-3'-phosphate
  modified_base 18: mod_base = OTHER; note = 2'-O-methyluridine-3'-phosphate
  modified_base 19: mod_base = OTHER; note = 2'-O-methylcytidine-3'-phosphate
  modified_base 20: mod_base = OTHER; note = 2'-O-methyladenosine-3'-phosphate
  modified_base 21: mod_base = OTHER; note = 2'-O-methyladenosine
gtgtctatgttcgtgtttcaa

SEQ ID NO: 966 - RNA, 21 nt, synthetic construct
  source 1..21: mol_type = other RNA
  modified_base 1: mod_base = OTHER; note = 2'-O-methyluridine-3'-phosphate
  modified_base 2: mod_base = OTHER; note = 2'-O-methylguanosine-3'-phosphate
  modified_base 3: mod_base = OTHER; note = 2'-O-methyluridine-3'-phosphate
  modified_base 4: mod_base = OTHER; note = 2'-O-methylcytidine-3'-phosphate
  modified_base 5: mod_base = OTHER; note = 2'-O-methyluridine-3'-phosphate
  modified_base 6: mod_base = OTHER; note = 2'-O-methyladenosine-3'-phosphate
  modified_base 7: mod_base = OTHER; note = 2'-deoxy-2'-fluorouridine-3'-phosphate
  modified_base 8: mod_base = OTHER; note = 2'-O-methylguanosine-3'-phosphate
  modified_base 9: mod_base = OTHER; note = 2'-deoxy-2'-fluorouridine-3'-phosphate
  modified_base 10: mod_base = OTHER; note = 2'-deoxy-2'-fluorouridine-3'-phosphate
  modified_base 11: mod_base = OTHER; note = 2'-deoxy-2'-fluorocytidine-3'-phosphate
  modified_base 12: mod_base = OTHER; note = 2'-O-methylguanosine-3'-phosphate
  modified_base 13: mod_base = OTHER; note = 2'-O-methyluridine-3'-phosphate
  modified_base 14: mod_base = OTHER; note = 2'-O-methylguanosine-3'-phosphate
  modified_base 15: mod_base = OTHER; note = 2'-O-methyluridine-3'-phosphate
  modified_base 16: mod_base = OTHER; note = 2'-O-methyluridine-3'-phosphate
  modified_base 17: mod_base = OTHER; note = 2'-O-methyluridine-3'-phosphate
  modified_base 18: mod_base = OTHER; note = 2'-O-methylcytidine-3'-phosphate
  modified_base 19: mod_base = OTHER; note = 2'-O-methyladenosine-3'-phosphate
  modified_base 20: mod_base = OTHER; note = 2'-O-methyladenosine-3'-phosphate
  modified_base 21: mod_base = OTHER; note = 2'-O-methyladenosine
tgtctatgttcgtgtttcaaa

SEQ ID NO: 967 - RNA, 21 nt, synthetic construct
  source 1..21: mol_type = other RNA
  modified_base 1: mod_base = OTHER; note = 2'-O-methylguanosine-3'-phosphate
  modified_base 2: mod_base = OTHER; note = 2'-O-methyladenosine-3'-phosphate
  modified_base 3: mod_base = OTHER; note = 2'-O-methylguanosine-3'-phosphate
  modified_base 4: mod_base = OTHER; note = 2'-O-methyluridine-3'-phosphate
  modified_base 5: mod_base = OTHER; note = 2'-O-methylguanosine-3'-phosphate
  modified_base 6: mod_base = OTHER; note = 2'-O-methyladenosine-3'-phosphate
  modified_base 7: mod_base = OTHER; note = 2'-deoxy-2'-fluorouridine-3'-phosphate
  modified_base 8: mod_base = OTHER; note = 2'-O-methylguanosine-3'-phosphate
  modified_base 9: mod_base = OTHER; note = 2'-deoxy-2'-fluoroadenosine-3'-phosphate
  modified_base 10: mod_base = OTHER; note = 2'-deoxy-2'-fluoroguanosine-3'-phosphate
  modified_base 11: mod_base = OTHER; note = 2'-deoxy-2'-fluoroadenosine-3'-phosphate
  modified_base 12: mod_base = OTHER; note = 2'-O-methyladenosine-3'-phosphate
  modified_base 13: mod_base = OTHER; note = 2'-O-methyladenosine-3'-phosphate
  modified_base 14: mod_base = OTHER; note = 2'-O-methyluridine-3'-phosphate
  modified_base 15: mod_base = OTHER; note = 2'-O-methyladenosine-3'-phosphate
  modified_base 16: mod_base = OTHER; note = 2'-O-methyladenosine-3'-phosphate
  modified_base 17: mod_base = OTHER; note = 2'-O-methyluridine-3'-phosphate
  modified_base 18: mod_base = OTHER; note = 2'-O-methyluridine-3'-phosphate
  modified_base 19: mod_base = OTHER; note = 2'-O-methyladenosine-3'-phosphate
  modified_base 20: mod_base = OTHER; note = 2'-O-methyladenosine-3'-phosphate
  modified_base 21: mod_base = OTHER; note = 2'-O-methyladenosine
gagtgatgagaaataattaaa

SEQ ID NO: 968 - RNA, 21 nt, synthetic construct
  source 1..21: mol_type = other RNA
  modified_base 1: mod_base = OTHER; note = 2'-O-methyluridine-3'-phosphate
  modified_base 2: mod_base = OTHER; note = 2'-O-methylguanosine-3'-phosphate
  modified_base 3: mod_base = OTHER; note = 2'-O-methyladenosine-3'-phosphate
  modified_base 4: mod_base = OTHER; note = 2'-O-methyluridine-3'-phosphate
  modified_base 5: mod_base = OTHER; note = 2'-O-methylguanosine-3'-phosphate
  modified_base 6: mod_base = OTHER; note = 2'-O-methyladenosine-3'-phosphate
  modified_base 7: mod_base = OTHER; note = 2'-deoxy-2'-fluoroguanosine-3'-phosphate
  modified_base 8: mod_base = OTHER; note = 2'-O-methyladenosine-3'-phosphate
  modified_base 9: mod_base = OTHER; note = 2'-deoxy-2'-fluoroadenosine-3'-phosphate
  modified_base 10: mod_base = OTHER; note = 2'-deoxy-2'-fluoroadenosine-3'-phosphate
  modified_base 11: mod_base = OTHER; note = 2'-deoxy-2'-fluorouridine-3'-phosphate
  modified_base 12: mod_base = OTHER; note = 2'-O-methyladenosine-3'-phosphate
  modified_base 13: mod_base = OTHER; note = 2'-O-methyladenosine-3'-phosphate
  modified_base 14: mod_base = OTHER; note = 2'-O-methyluridine-3'-phosphate
  modified_base 15: mod_base = OTHER; note = 2'-O-methyluridine-3'-phosphate
  modified_base 16: mod_base = OTHER; note = 2'-O-methyladenosine-3'-phosphate
  modified_base 17: mod_base = OTHER; note = 2'-O-methyladenosine-3'-phosphate
  modified_base 18: mod_base = OTHER; note = 2'-O-methyluridine-3'-phosphate
  modified_base 19: mod_base = OTHER; note = 2'-O-methyluridine-3'-phosphate
  modified_base 20: mod_base = OTHER; note = 2'-O-methylguanosine-3'-phosphate
  modified_base 21: mod_base = OTHER; note = 2'-O-methyladenosine
tgatgagaaataattaattga

SEQ ID NO: 969 - RNA, 21 nt, synthetic construct
  source 1..21: mol_type = other RNA
  modified_base 1: mod_base = OTHER; note = 2'-O-methyladenosine-3'-phosphate
  modified_base 2: mod_base = OTHER; note = 2'-O-methyluridine-3'-phosphate
  modified_base 3: mod_base = OTHER; note = 2'-O-methylguanosine-3'-phosphate
  modified_base 4: mod_base = OTHER; note = 2'-O-methyladenosine-3'-phosphate
  modified_base 5: mod_base = OTHER; note = 2'-O-methylguanosine-3'-phosphate
  modified_base 6: mod_base = OTHER; note = 2'-O-methyladenosine-3'-phosphate
  modified_base 7: mod_base = OTHER; note = 2'-deoxy-2'-fluoroadenosine-3'-phosphate
  modified_base 8: mod_base = OTHER; note = 2'-O-methyladenosine-3'-phosphate
  modified_base 9: mod_base = OTHER; note = 2'-deoxy-2'-fluorouridine-3'-phosphate
  modified_base 10: mod_base = OTHER; note = 2'-deoxy-2'-fluoroadenosine-3'-phosphate
  modified_base 11: mod_base = OTHER; note = 2'-deoxy-2'-fluoroadenosine-3'-phosphate
  modified_base 12: mod_base = OTHER; note = 2'-O-methyluridine-3'-phosphate
  modified_base 13: mod_base = OTHER; note = 2'-O-methyluridine-3'-phosphate
  modified_base 14: mod_base = OTHER; note = 2'-O-methyladenosine-3'-phosphate
  modified_base 15: mod_base = OTHER; note = 2'-O-methyladenosine-3'-phosphate
  modified_base 16: mod_base = OTHER; note = 2'-O-methyluridine-3'-phosphate
  modified_base 17: mod_base = OTHER; note = 2'-O-methyluridine-3'-phosphate
  modified_base 18: mod_base = OTHER; note = 2'-O-methylguanosine-3'-phosphate
  modified_base 19: mod_base = OTHER; note = 2'-O-methylguanosine-3'-phosphate
  modified_base 20: mod_base = OTHER; note = 2'-O-methyladenosine-3'-phosphate
  modified_base 21: mod_base = OTHER; note = 2'-O-methyladenosine
atgagaaataattaattggaa

SEQ ID NO: 970 - RNA, 21 nt, synthetic construct
  source 1..21: mol_type = other RNA
  modified_base 1: mod_base = OTHER; note = 2'-O-methyladenosine-3'-phosphate
  modified_base 2: mod_base = OTHER; note = 2'-O-methyladenosine-3'-phosphate
  modified_base 3: mod_base = OTHER; note = 2'-O-methylguanosine-3'-phosphate
  modified_base 4: mod_base = OTHER; note = 2'-O-methylguanosine-3'-phosphate
  modified_base 5: mod_base = OTHER; note = 2'-O-methyladenosine-3'-phosphate
  modified_base 6: mod_base = OTHER; note = 2'-O-methylcytidine-3'-phosphate
  modified_base 7: mod_base = OTHER; note = 2'-deoxy-2'-fluoroadenosine-3'-phosphate
  modified_base 8: mod_base = OTHER; note = 2'-O-methyladenosine-3'-phosphate
  modified_base 9: mod_base = OTHER; note = 2'-deoxy-2'-fluoroadenosine-3'-phosphate
  modified_base 10: mod_base = OTHER; note = 2'-deoxy-2'-fluorouridine-3'-phosphate
  modified_base 11: mod_base = OTHER; note = 2'-deoxy-2'-fluoroadenosine-3'-phosphate
  modified_base 12: mod_base = OTHER; note = 2'-O-methylcytidine-3'-phosphate
  modified_base 13: mod_base = OTHER; note = 2'-O-methyladenosine-3'-phosphate
  modified_base 14: mod_base = OTHER; note = 2'-O-methyluridine-3'-phosphate
  modified_base 15: mod_base = OTHER; note = 2'-O-methyluridine-3'-phosphate
  modified_base 16: mod_base = OTHER; note = 2'-O-methyluridine-3'-phosphate
  modified_base 17: mod_base = OTHER; note = 2'-O-methyluridine-3'-phosphate
  modified_base 18: mod_base = OTHER; note = 2'-O-methyladenosine-3'-phosphate
  modified_base 19: mod_base = OTHER; note = 2'-O-methylcytidine-3'-phosphate
  modified_base 20: mod_base = OTHER; note = 2'-O-methyladenosine-3'-phosphate
  modified_base 21: mod_base = OTHER; note = 2'-O-methyladenosine
aaggacaaatacattttacaa

SEQ ID NO: 971 - RNA, 23 nt, synthetic construct
  source 1..23: mol_type = other RNA
  modified_base 1: mod_base = OTHER; note = 2'-O-methyluridine-3'-phosphorothioate 5'-(E)-Vinylphosphonate
  modified_base 2: mod_base = OTHER; note = 2'-deoxy-2'-fluorouridine-3'-phosphorothioate
  modified_base 3: mod_base = OTHER; note = 2'-O-methyladenosine-3'-phosphate
  modified_base 4: mod_base = OTHER; note = 2'-O-methyluridine-3'-phosphate
  modified_base 5: mod_base = OTHER; note = 2'-O-methylguanosine-3'-phosphate
  modified_base 6: mod_base = OTHER; note = 2'-deoxy-2'-fluorouridine-3'-phosphate
  modified_base 7: mod_base = OTHER; note = 2'-O-methyluridine-3'-phosphate
  modified_base 8: mod_base = OTHER; note = 2'-O-methylcytidine-3'-phosphate
  modified_base 9: mod_base = OTHER; note = 2'-O-methylcytidine-3'-phosphate
  modified_base 10: mod_base = OTHER; note = 2'-O-methyladenosine-3'-phosphate
  modified_base 11: mod_base = OTHER; note = 2'-O-methyluridine-3'-phosphate
  modified_base 12: mod_base = OTHER; note = 2'-O-methyluridine-3'-phosphate
  modified_base 13: mod_base = OTHER; note = 2'-O-methyluridine-3'-phosphate
  modified_base 14: mod_base = OTHER; note = 2'-deoxy-2'-fluorouridine-3'-phosphate
  modified_base 15: mod_base = OTHER; note = 2'-O-methylguanosine-3'-phosphate
  modified_base 16: mod_base = OTHER; note = 2'-deoxy-2'-fluoroguanosine-3'-phosphate
  modified_base 17: mod_base = OTHER; note = 2'-O-methylguanosine-3'-phosphate
  modified_base 18: mod_base = OTHER; note = 2'-O-methyladenosine-3'-phosphate
  modified_base 19: mod_base = OTHER; note = 2'-O-methylcytidine-3'-phosphate
  modified_base 20: mod_base = OTHER; note = 2'-O-methyluridine-3'-phosphate
  modified_base 21: mod_base = OTHER; note = 2'-O-methylguanosine-3'-phosphorothioate
  modified_base 22: mod_base = OTHER; note = 2'-O-methylguanosine-3'-phosphorothioate
  modified_base 23: mod_base = OTHER; note = 2'-O-methylcytidine
ttatgttccattttgggactggc

SEQ ID NO: 972 - RNA, 23 nt, synthetic construct
  source 1..23: mol_type = other RNA
  modified_base 1: mod_base = OTHER; note = 2'-O-methyluridine-3'-phosphorothioate 5'-(E)-Vinylphosphonate
  modified_base 2: mod_base = OTHER; note = 2'-deoxy-2'-fluorouridine-3'-phosphorothioate
  modified_base 3: mod_base = OTHER; note = 2'-O-methyladenosine-3'-phosphate
  modified_base 4: mod_base = OTHER; note = 2'-O-methyluridine-3'-phosphate
  modified_base 5: mod_base = OTHER; note = 2'-O-methylguanosine-3'-phosphate
  modified_base 6: mod_base = OTHER; note = 2'-deoxy-2'-fluorouridine-3'-phosphate
  modified_base 7: mod_base = OTHER; note = 2'-O-methyladenosine-3'-phosphate
  modified_base 8: mod_base = OTHER; note = 2'-O-methylcytidine-3'-phosphate
  modified_base 9: mod_base = OTHER; note = 2'-O-methylcytidine-3'-phosphate
  modified_base 10: mod_base = OTHER; note = 2'-O-methyladenosine-3'-phosphate
  modified_base 11: mod_base = OTHER; note = 2'-O-methyluridine-3'-phosphate
  modified_base 12: mod_base = OTHER; note = 2'-O-methyluridine-3'-phosphate
  modified_base 13: mod_base = OTHER; note = 2'-O-methyluridine-3'-phosphate
  modified_base 14: mod_base = OTHER; note = 2'-deoxy-2'-fluorouridine-3'-phosphate
  modified_base 15: mod_base = OTHER; note = 2'-O-methylguanosine-3'-phosphate
  modified_base 16: mod_base = OTHER; note = 2'-deoxy-2'-fluoroguanosine-3'-phosphate
  modified_base 17: mod_base = OTHER; note = 2'-O-methylguanosine-3'-phosphate
  modified_base 18: mod_base = OTHER; note = 2'-O-methyladenosine-3'-phosphate
  modified_base 19: mod_base = OTHER; note = 2'-O-methylcytidine-3'-phosphate
  modified_base 20: mod_base = OTHER; note = 2'-O-methyluridine-3'-phosphate
  modified_base 21: mod_base = OTHER; note = 2'-O-methylguanosine-3'-phosphorothioate
  modified_base 22: mod_base = OTHER; note = 2'-O-methylguanosine-3'-phosphorothioate
  modified_base 23: mod_base = OTHER; note = 2'-O-methylcytidine
ttatgtaccattttgggactggc

SEQ ID NO: 973 - RNA, 23 nt, synthetic construct
  source 1..23: mol_type = other RNA
  modified_base 1: mod_base = OTHER; note = 2'-O-methyluridine-3'-phosphorothioate 5'-(E)-Vinylphosphonate
  modified_base 2: mod_base = OTHER; note = 2'-deoxy-2'-fluorouridine-3'-phosphorothioate
  modified_base 3: mod_base = OTHER; note = 2'-O-methyluridine-3'-phosphate
  modified_base 4: mod_base = OTHER; note = 2'-O-methyladenosine-3'-phosphate
  modified_base 5: mod_base = OTHER; note = 2'-O-methyluridine-3'-phosphate
  modified_base 6: mod_base = OTHER; note = 2'-deoxy-2'-fluoroguanosine-3'-phosphate
  modified_base 7: mod_base = OTHER; note = 2'-O-methyluridine-3'-phosphate
  modified_base 8: mod_base = OTHER; note = 2'-O-methyluridine-3'-phosphate
  modified_base 9: mod_base = OTHER; note = 2'-O-methylcytidine-3'-phosphate
  modified_base 10: mod_base = OTHER; note = 2'-O-methylcytidine-3'-phosphate
  modified_base 11: mod_base = OTHER; note = 2'-O-methyladenosine-3'-phosphate
  modified_base 12: mod_base = OTHER; note = 2'-O-methyluridine-3'-phosphate
  modified_base 13: mod_base = OTHER; note = 2'-O-methyluridine-3'-phosphate
  modified_base 14: mod_base = OTHER; note = 2'-deoxy-2'-fluorouridine-3'-phosphate
  modified_base 15: mod_base = OTHER; note = 2'-O-methyluridine-3'-phosphate
  modified_base 16: mod_base = OTHER; note = 2'-deoxy-2'-fluoroguanosine-3'-phosphate
  modified_base 17: mod_base = OTHER; note = 2'-O-methylguanosine-3'-phosphate
  modified_base 18: mod_base = OTHER; note = 2'-O-methylguanosine-3'-phosphate
  modified_base 19: mod_base = OTHER; note = 2'-O-methyladenosine-3'-phosphate
  modified_base 20: mod_base = OTHER; note = 2'-O-methylcytidine-3'-phosphate
  modified_base 21: mod_base = OTHER; note = 2'-O-methyluridine-3'-phosphorothioate
  modified_base 22: mod_base = OTHER; note = 2'-O-methylguanosine-3'-phosphorothioate
  modified_base 23: mod_base = OTHER; note = 2'-O-methylguanosine
tttatgttccattttgggactgg

SEQ ID NO: 974 - RNA, 23 nt, synthetic construct
  source 1..23: mol_type = other RNA
  modified_base 1: mod_base = OTHER; note = 2'-O-methyluridine-3'-phosphorothioate 5'-(E)-Vinylphosphonate
  modified_base 2: mod_base = OTHER; note = 2'-deoxy-2'-fluorouridine-3'-phosphorothioate
  modified_base 3: mod_base = OTHER; note = 2'-O-methyluridine-3'-phosphate
  modified_base 4: mod_base = OTHER; note = 2'-O-methyladenosine-3'-phosphate
  modified_base 5: mod_base = OTHER; note = 2'-O-methyluridine-3'-phosphate
  modified_base 6: mod_base = OTHER; note = 2'-deoxy-2'-fluoroguanosine-3'-phosphate
  modified_base 7: mod_base = OTHER; note = 2'-O-methyladenosine-3'-phosphate
  modified_base 8: mod_base = OTHER; note = 2'-O-methyluridine-3'-phosphate
  modified_base 9: mod_base = OTHER; note = 2'-O-methylcytidine-3'-phosphate
  modified_base 10: mod_base = OTHER; note = 2'-O-methylcytidine-3'-phosphate
  modified_base 11: mod_base = OTHER; note = 2'-O-methyladenosine-3'-phosphate
  modified_base 12: mod_base = OTHER; note = 2'-O-methyluridine-3'-phosphate
  modified_base 13: mod_base = OTHER; note = 2'-O-methyluridine-3'-phosphate
  modified_base 14: mod_base = OTHER; note = 2'-deoxy-2'-fluorouridine-3'-phosphate
  modified_base 15: mod_base = OTHER; note = 2'-O-methyluridine-3'-phosphate
  modified_base 16: mod_base = OTHER; note = 2'-deoxy-2'-fluoroguanosine-3'-phosphate
  modified_base 17: mod_base = OTHER; note = 2'-O-methylguanosine-3'-phosphate
  modified_base 18: mod_base = OTHER; note = 2'-O-methylguanosine-3'-phosphate
  modified_base 19: mod_base = OTHER; note = 2'-O-methyladenosine-3'-phosphate
  modified_base 20: mod_base = OTHER; note = 2'-O-methylcytidine-3'-phosphate
  modified_base 21: mod_base = OTHER; note = 2'-O-methyluridine-3'-phosphorothioate
  modified_base 22: mod_base = OTHER; note = 2'-O-methylguanosine-3'-phosphorothioate
  modified_base 23: mod_base = OTHER; note = 2'-O-methylguanosine
tttatgatccattttgggactgg

SEQ ID NO: 975 - RNA, 23 nt, synthetic construct
  source 1..23: mol_type = other RNA
  modified_base 1: mod_base = OTHER; note = 2'-O-methyluridine-3'-phosphorothioate 5'-(E)-Vinylphosphonate
  modified_base 2: mod_base = OTHER; note = 2'-deoxy-2'-fluorouridine-3'-phosphorothioate
  modified_base 3: mod_base = OTHER; note = 2'-O-methylcytidine-3'-phosphate
  modified_base 4: mod_base = OTHER; note = 2'-O-methylcytidine-3'-phosphate
  modified_base 5: mod_base = OTHER; note = 2'-O-methyluridine-3'-phosphate
  modified_base 6: mod_base = OTHER; note = 2'-deoxy-2'-fluorouridine-3'-phosphate
  modified_base 7: mod_base = OTHER; note = 2'-O-methyladenosine-3'-phosphate
  modified_base 8: mod_base = OTHER; note = 2'-O-methyluridine-3'-phosphate
  modified_base 9: mod_base = OTHER; note = 2'-O-methylguanosine-3'-phosphate
  modified_base 10: mod_base = OTHER; note = 2'-O-methyluridine-3'-phosphate
  modified_base 11: mod_base = OTHER; note = 2'-O-methyluridine-3'-phosphate
  modified_base 12: mod_base = OTHER; note = 2'-O-methylcytidine-3'-phosphate
  modified_base 13: mod_base = OTHER; note = 2'-O-methylcytidine-3'-phosphate
  modified_base 14: mod_base = OTHER; note = 2'-deoxy-2'-fluoroadenosine-3'-phosphate
  modified_base 15: mod_base = OTHER; note = 2'-O-methyluridine-3'-phosphate
  modified_base 16: mod_base = OTHER; note = 2'-deoxy-2'-fluorouridine-3'-phosphate
  modified_base 17: mod_base = OTHER; note = 2'-O-methyluridine-3'-phosphate
  modified_base 18: mod_base = OTHER; note = 2'-O-methyluridine-3'-phosphate
  modified_base 19: mod_base = OTHER; note = 2'-O-methylguanosine-3'-phosphate
  modified_base 20: mod_base = OTHER; note = 2'-O-methylguanosine-3'-phosphate
  modified_base 21: mod_base = OTHER; note = 2'-O-methylguanosine-3'-phosphorothioate
  modified_base 22: mod_base = OTHER; note = 2'-O-methyladenosine-3'-phosphorothioate
  modified_base 23: mod_base = OTHER; note = 2'-O-methylcytidine
ttccttatgttccattttgggac

SEQ ID NO: 976 - RNA, 23 nt, synthetic construct
  source 1..23: mol_type = other RNA
  modified_base 1: mod_base = OTHER; note = 2'-O-methyluridine-3'-phosphorothioate 5'-(E)-Vinylphosphonate
  modified_base 2: mod_base = OTHER; note = 2'-deoxy-2'-fluorouridine-3'-phosphorothioate
  modified_base 3: mod_base = OTHER; note = 2'-O-methyluridine-3'-phosphate
  modified_base 4: mod_base = OTHER; note = 2'-O-methylcytidine-3'-phosphate
  modified_base 5: mod_base = OTHER; note = 2'-O-methyladenosine-3'-phosphate
  modified_base 6: mod_base = OTHER; note = 2'-deoxy-2'-fluorocytidine-3'-phosphate
  modified_base 7: mod_base = OTHER; note = 2'-O-methyladenosine-3'-phosphate
  modified_base 8: mod_base = OTHER; note = 2'-O-methyluridine-3'-phosphate
  modified_base 9: mod_base = OTHER; note = 2'-O-methyladenosine-3'-phosphate
  modified_base 10: mod_base = OTHER; note = 2'-O-methylguanosine-3'-phosphate
  modified_base 11: mod_base = OTHER; note = 2'-O-methyluridine-3'-phosphate
  modified_base 12: mod_base = OTHER; note = 2'-O-methylcytidine-3'-phosphate
  modified_base 13: mod_base = OTHER; note = 2'-O-methyladenosine-3'-phosphate
  modified_base 14: mod_base = OTHER; note = 2'-deoxy-2'-fluorouridine-3'-phosphate
  modified_base 15: mod_base = OTHER; note = 2'-O-methylcytidine-3'-phosphate
  modified_base 16: mod_base = OTHER; note = 2'-deoxy-2'-fluorocytidine-3'-phosphate
  modified_base 17: mod_base = OTHER; note = 2'-O-methyladenosine-3'-phosphate
  modified_base 18: mod_base = OTHER; note = 2'-O-methylguanosine-3'-phosphate
  modified_base 19: mod_base = OTHER; note = 2'-O-methyladenosine-3'-phosphate
  modified_base 20: mod_base = OTHER; note = 2'-O-methylguanosine-3'-phosphate
  modified_base 21: mod_base = OTHER; note = 2'-O-methylguanosine-3'-phosphorothioate
  modified_base 22: mod_base = OTHER; note = 2'-O-methylcytidine-3'-phosphorothioate
  modified_base 23: mod_base = OTHER; note = 2'-O-methyluridine
tttcacatagtcatccagaggct

SEQ ID NO: 977 - RNA, 23 nt, synthetic construct
  source 1..23: mol_type = other RNA
  modified_base 1: mod_base = OTHER; note = 2'-O-methyluridine-3'-phosphorothioate 5'-(E)-Vinylphosphonate
  modified_base 2: mod_base = OTHER; note = 2'-deoxy-2'-fluorouridine-3'-phosphorothioate
  modified_base 3: mod_base = OTHER; note = 2'-O-methyluridine-3'-phosphate
  modified_base 4: mod_base = OTHER; note = 2'-O-methylcytidine-3'-phosphate
  modified_base 5: mod_base = OTHER; note = 2'-O-methyladenosine-3'-phosphate
  modified_base 6: mod_base = OTHER; note = 2'-deoxy-2'-fluoroadenosine-3'-phosphate
  modified_base 7: mod_base = OTHER; note = 2'-O-methyladenosine-3'-phosphate
  modified_base 8: mod_base = OTHER; note = 2'-O-methyluridine-3'-phosphate
  modified_base 9: mod_base = OTHER; note = 2'-O-methyladenosine-3'-phosphate
  modified_base 10: mod_base = OTHER; note = 2'-O-methylguanosine-3'-phosphate
  modified_base 11: mod_base = OTHER; note = 2'-O-methyluridine-3'-phosphate
  modified_base 12: mod_base = OTHER; note = 2'-O-methylcytidine-3'-phosphate
  modified_base 13: mod_base = OTHER; note = 2'-O-methyladenosine-3'-phosphate
  modified_base 14: mod_base = OTHER; note = 2'-deoxy-2'-fluorouridine-3'-phosphate
  modified_base 15: mod_base = OTHER; note = 2'-O-methylcytidine-3'-phosphate
  modified_base 16: mod_base = OTHER; note = 2'-deoxy-2'-fluorocytidine-3'-phosphate
  modified_base 17: mod_base = OTHER; note = 2'-O-methyladenosine-3'-phosphate
  modified_base 18: mod_base = OTHER; note = 2'-O-methylguanosine-3'-phosphate
  modified_base 19: mod_base = OTHER; note = 2'-O-methyladenosine-3'-phosphate
  modified_base 20: mod_base = OTHER; note = 2'-O-methylguanosine-3'-phosphate
  modified_base 21: mod_base = OTHER; note = 2'-O-methylguanosine-3'-phosphorothioate
  modified_base 22: mod_base = OTHER; note = 2'-O-methylcytidine-3'-phosphorothioate
  modified_base 23: mod_base = OTHER; note = 2'-O-methyluridine
tttcaaatagtcatccagaggct

SEQ ID NO: 978 - RNA, 23 nt, synthetic construct
  source 1..23: mol_type = other RNA
  modified_base 1: mod_base = OTHER; note = 2'-O-methyluridine-3'-phosphorothioate 5'-(E)-Vinylphosphonate
  modified_base 2: mod_base = OTHER; note = 2'-deoxy-2'-fluorouridine-3'-phosphorothioate
  modified_base 3: mod_base = OTHER; note = 2'-O-methylguanosine-3'-phosphate
  modified_base 4: mod_base = OTHER; note = 2'-O-methylcytidine-3'-phosphate
  modified_base 5: mod_base = OTHER; note = 2'-O-methyluridine-3'-phosphate
  modified_base 6: mod_base = OTHER; note = 2'-deoxy-2'-fluorocytidine-3'-phosphate
  modified_base 7: mod_base = OTHER; note = 2'-O-methyluridine-3'-phosphate
  modified_base 8: mod_base = OTHER; note = 2'-O-methyluridine-3'-phosphate
  modified_base 9: mod_base = OTHER; note = 2'-O-methyluridine-3'-phosphate
  modified_base 10: mod_base = OTHER; note = 2'-O-methyladenosine-3'-phosphate
  modified_base 11: mod_base = OTHER; note = 2'-O-methylcytidine-3'-phosphate
  modified_base 12: mod_base = OTHER; note = 2'-O-methyluridine-3'-phosphate
  modified_base 13: mod_base = OTHER; note = 2'-O-methylguanosine-3'-phosphate
  modified_base 14: mod_base = OTHER; note = 2'-deoxy-2'-fluorouridine-3'-phosphate
  modified_base 15: mod_base = OTHER; note = 2'-O-methylguanosine-3'-phosphate
  modified_base 16: mod_base = OTHER; note = 2'-deoxy-2'-fluoroadenosine-3'-phosphate
  modified_base 17: mod_base = OTHER; note = 2'-O-methyluridine-3'-phosphate
  modified_base 18: mod_base = OTHER; note = 2'-O-methyladenosine-3'-phosphate
  modified_base 19: mod_base = OTHER; note = 2'-O-methyluridine-3'-phosphate
  modified_base 20: mod_base = OTHER; note = 2'-O-methyluridine-3'-phosphate
  modified_base 21: mod_base = OTHER; note = 2'-O-methylguanosine-3'-phosphorothioate
  modified_base 22: mod_base = OTHER; note = 2'-O-methylguanosine-3'-phosphorothioate
  modified_base 23: mod_base = OTHER; note = 2'-O-methyladenosine
ttgctctttactgtgatattgga

SEQ ID NO: 979 - RNA, 23 nt, synthetic construct
  source 1..23: mol_type = other RNA
  modified_base 1: mod_base = OTHER; note = 2'-O-methyluridine-3'-phosphorothioate 5'-(E)-Vinylphosphonate
  modified_base 2: mod_base = OTHER; note = 2'-deoxy-2'-fluorouridine-3'-phosphorothioate
  modified_base 3: mod_base = OTHER; note = 2'-O-methylguanosine-3'-phosphate
  modified_base 4: mod_base = OTHER; note = 2'-O-methylcytidine-3'-phosphate
  modified_base 5: mod_base = OTHER; note = 2'-O-methyluridine-3'-phosphate
  modified_base 6: mod_base = OTHER; note = 2'-deoxy-2'-fluorocytidine-3'-phosphate
  modified_base 7: mod_base = OTHER; note = 2'-O-methyladenosine-3'-phosphate
  modified_base 8: mod_base = OTHER; note = 2'-O-methyluridine-3'-phosphate
  modified_base 9: mod_base = OTHER; note = 2'-O-methyluridine-3'-phosphate
  modified_base 10: mod_base = OTHER; note = 2'-O-methyladenosine-3'-phosphate
  modified_base 11: mod_base = OTHER; note = 2'-O-methylcytidine-3'-phosphate
  modified_base 12: mod_base = OTHER; note = 2'-O-methyluridine-3'-phosphate
  modified_base 13: mod_base = OTHER; note = 2'-O-methylguanosine-3'-phosphate
  modified_base 14: mod_base = OTHER; note = 2'-deoxy-2'-fluorouridine-3'-phosphate
  modified_base 15: mod_base = OTHER; note = 2'-O-methylguanosine-3'-phosphate
  modified_base 16: mod_base = OTHER; note = 2'-deoxy-2'-fluoroadenosine-3'-phosphate
  modified_base 17: mod_base = OTHER; note = 2'-O-methyluridine-3'-phosphate
  modified_base 18: mod_base = OTHER; note = 2'-O-methyladenosine-3'-phosphate
  modified_base 19: mod_base = OTHER; note = 2'-O-methyluridine-3'-phosphate
  modified_base 20: mod_base = OTHER; note = 2'-O-methyluridine-3'-phosphate
  modified_base 21: mod_base = OTHER; note = 2'-O-methylguanosine-3'-phosphorothioate
  modified_base 22: mod_base = OTHER; note = 2'-O-methylguanosine-3'-phosphorothioate
  modified_base 23: mod_base = OTHER; note = 2'-O-methyladenosine
ttgctcattactgtgatattgga

SEQ ID NO: 980 - RNA, 23 nt, synthetic construct
  source 1..23: mol_type = other RNA
  modified_base 1: mod_base = OTHER; note = 2'-O-methyluridine-3'-phosphorothioate 5'-(E)-Vinylphosphonate
  modified_base 2: mod_base = OTHER; note = 2'-deoxy-2'-fluoroguanosine-3'-phosphorothioate
  modified_base 3: mod_base = OTHER; note = 2'-O-methyluridine-3'-phosphate
  modified_base 4: mod_base = OTHER; note = 2'-O-methyluridine-3'-phosphate
  modified_base 5: mod_base = OTHER; note = 2'-O-methylguanosine-3'-phosphate
  modified_base 6: mod_base = OTHER; note = 2'-deoxy-2'-fluorocytidine-3'-phosphate
  modified_base 7: mod_base = OTHER; note = 2'-O-methyluridine-3'-phosphate
  modified_base 8: mod_base = OTHER; note = 2'-O-methylcytidine-3'-phosphate
  modified_base 9: mod_base = OTHER; note = 2'-O-methyluridine-3'-phosphate
  modified_base 10: mod_base = OTHER; note = 2'-O-methyluridine-3'-phosphate
  modified_base 11: mod_base = OTHER; note = 2'-O-methyluridine-3'-phosphate
  modified_base 12: mod_base = OTHER; note = 2'-O-methyladenosine-3'-phosphate
  modified_base 13: mod_base = OTHER; note = 2'-O-methylcytidine-3'-phosphate
  modified_base 14: mod_base = OTHER; note = 2'-deoxy-2'-fluorouridine-3'-phosphate
  modified_base 15: mod_base = OTHER; note = 2'-O-methylguanosine-3'-phosphate
  modified_base 16: mod_base = OTHER; note = 2'-deoxy-2'-fluorouridine-3'-phosphate
  modified_base 17: mod_base = OTHER; note = 2'-O-methylguanosine-3'-phosphate
  modified_base 18: mod_base = OTHER; note = 2'-O-methyladenosine-3'-phosphate
  modified_base 19: mod_base = OTHER; note = 2'-O-methyluridine-3'-phosphate
  modified_base 20: mod_base = OTHER; note = 2'-O-methyladenosine-3'-phosphate
  modified_base 21: mod_base = OTHER; note = 2'-O-methyluridine-3'-phosphorothioate
  modified_base 22: mod_base = OTHER; note = 2'-O-methyluridine-3'-phosphorothioate
  modified_base 23: mod_base = OTHER; note = 2'-O-methylguanosine
tgttgctctttactgtgatattg

SEQ ID NO: 981 - RNA, 23 nt, synthetic construct
  source 1..23: mol_type = other RNA
  modified_base 1: mod_base = OTHER; note = 2'-O-methyluridine-3'-phosphorothioate 5'-(E)-Vinylphosphonate
  modified_base 2: mod_base = OTHER; note = 2'-deoxy-2'-fluoroguanosine-3'-phosphorothioate
  modified_base 3: mod_base = OTHER; note = 2'-O-methyluridine-3'-phosphate
  modified_base 4: mod_base = OTHER; note = 2'-O-methyluridine-3'-phosphate
  modified_base 5: mod_base = OTHER; note = 2'-O-methylguanosine-3'-phosphate
  modified_base 6: mod_base = OTHER; note = 2'-deoxy-2'-fluorocytidine-3'-phosphate
  modified_base 7: mod_base = OTHER; note = 2'-O-methyladenosine-3'-phosphate
  modified_base 8: mod_base = OTHER; note = 2'-O-methylcytidine-3'-phosphate
  modified_base 9: mod_base = OTHER; note = 2'-O-methyluridine-3'-phosphate
  modified_base 10: mod_base = OTHER; note = 2'-O-methyluridine-3'-phosphate
  modified_base 11: mod_base = OTHER; note = 2'-O-methyluridine-3'-phosphate
  modified_base 12: mod_base = OTHER; note = 2'-O-methyladenosine-3'-phosphate
  modified_base 13: mod_base = OTHER; note = 2'-O-methylcytidine-3'-phosphate
  modified_base 14: mod_base = OTHER; note = 2'-deoxy-2'-fluorouridine-3'-phosphate
  modified_base 15: mod_base = OTHER; note = 2'-O-methylguanosine-3'-phosphate
  modified_base 16: mod_base = OTHER; note = 2'-deoxy-2'-fluorouridine-3'-phosphate
  modified_base 17: mod_base = OTHER; note = 2'-O-methylguanosine-3'-phosphate
  modified_base 18: mod_base = OTHER; note = 2'-O-methyladenosine-3'-phosphate
  modified_base 19: mod_base = OTHER; note = 2'-O-methyluridine-3'-phosphate
  modified_base 20: mod_base = OTHER; note = 2'-O-methyladenosine-3'-phosphate
  modified_base 21: mod_base = OTHER; note = 2'-O-methyluridine-3'-phosphorothioate
  modified_base 22: mod_base = OTHER; note = 2'-O-methyluridine-3'-phosphorothioate
  modified_base 23: mod_base = OTHER; note = 2'-O-methylguanosine
tgttgcactttactgtgatattg

SEQ ID NO: 982 - RNA, 23 nt, synthetic construct
  source 1..23: mol_type = other RNA
  modified_base 1: mod_base = OTHER; note = 2'-O-methyluridine-3'-phosphorothioate 5'-(E)-Vinylphosphonate
  modified_base 2: mod_base = OTHER; note = 2'-deoxy-2'-fluorocytidine-3'-phosphorothioate
  modified_base 3: mod_base = OTHER; note = 2'-O-methyladenosine-3'-phosphate
  modified_base 4: mod_base = OTHER; note = 2'-O-methylcytidine-3'-phosphate
  modified_base 5: mod_base = OTHER; note = 2'-O-methyladenosine-3'-phosphate
  modified_base 6: mod_base = OTHER; note = 2'-deoxy-2'-fluorouridine-3'-phosphate
  modified_base 7: mod_base = OTHER; note = 2'-O-methyluridine-3'-phosphate
  modified_base 8: mod_base = OTHER; note = 2'-O-methylguanosine-3'-phosphate
  modified_base 9: mod_base = OTHER; note = 2'-O-methyluridine-3'-phosphate
  modified_base 10: mod_base = OTHER; note = 2'-O-methyluridine-3'-phosphate
  modified_base 11: mod_base = OTHER; note = 2'-O-methylguanosine-3'-phosphate
  modified_base 12: mod_base = OTHER; note = 2'-O-methylcytidine-3'-phosphate
  modified_base 13: mod_base = OTHER; note = 2'-O-methyluridine-3'-phosphate
  modified_base 14: mod_base = OTHER; note = 2'-deoxy-2'-fluorocytidine-3'-phosphate
  modified_base 15: mod_base = OTHER; note = 2'-O-methyluridine-3'-phosphate
  modified_base 16: mod_base = OTHER; note = 2'-deoxy-2'-fluorouridine-3'-phosphate
  modified_base 17: mod_base = OTHER; note = 2'-O-methyluridine-3'-phosphate
  modified_base 18: mod_base = OTHER; note = 2'-O-methyladenosine-3'-phosphate
  modified_base 19: mod_base = OTHER; note = 2'-O-methylcytidine-3'-phosphate
  modified_base 20: mod_base = OTHER; note = 2'-O-methyluridine-3'-phosphate
  modified_base 21: mod_base = OTHER; note = 2'-O-methylguanosine-3'-phosphorothioate
  modified_base 22: mod_base = OTHER; note = 2'-O-methyluridine-3'-phosphorothioate
  modified_base 23: mod_base = OTHER; note = 2'-O-methylguanosine
tcacattgttgctctttactgtg

SEQ ID NO: 983 - RNA, 23 nt, synthetic construct
  source 1..23: mol_type = other RNA
  modified_base 1: mod_base = OTHER; note = 2'-O-methyluridine-3'-phosphorothioate 5'-(E)-Vinylphosphonate
  modified_base 2: mod_base = OTHER; note = 2'-deoxy-2'-fluoroadenosine-3'-phosphorothioate
  modified_base 3: mod_base = OTHER; note = 2'-O-methylcytidine-3'-phosphate
  modified_base 4: mod_base = OTHER; note = 2'-O-methyladenosine-3'-phosphate
  modified_base 5: mod_base = OTHER; note = 2'-O-methylcytidine-3'-phosphate
  modified_base 6: mod_base = OTHER; note = 2'-deoxy-2'-fluoroadenosine-3'-phosphate
  modified_base 7: mod_base = OTHER; note = 2'-O-methyluridine-3'-phosphate
  modified_base 8: mod_base = OTHER; note = 2'-O-methyluridine-3'-phosphate
  modified_base 9: mod_base = OTHER; note = 2'-O-methylguanosine-3'-phosphate
  modified_base 10: mod_base = OTHER; note = 2'-O-methyluridine-3'-phosphate
  modified_base 11: mod_base = OTHER; note = 2'-O-methyluridine-3'-phosphate
  modified_base 12: mod_base = OTHER; note = 2'-O-methylguanosine-3'-phosphate
  modified_base 13: mod_base = OTHER; note = 2'-O-methylcytidine-3'-phosphate
  modified_base 14: mod_base = OTHER; note = 2'-deoxy-2'-fluorouridine-3'-phosphate
  modified_base 15: mod_base = OTHER; note = 2'-O-methylcytidine-3'-phosphate
  modified_base 16: mod_base = OTHER; note = 2'-deoxy-2'-fluorouridine-3'-phosphate
  modified_base 17: mod_base = OTHER; note = 2'-O-methyluridine-3'-phosphate
  modified_base 18: mod_base = OTHER; note = 2'-O-methyluridine-3'-phosphate
  modified_base 19: mod_base = OTHER; note = 2'-O-methyladenosine-3'-phosphate
  modified_base 20: mod_base = OTHER; note = 2'-O-methylcytidine-3'-phosphate
  modified_base 21: mod_base = OTHER; note = 2'-O-methyluridine-3'-phosphorothioate
  modified_base 22: mod_base = OTHER; note = 2'-O-methylguanosine-3'-phosphorothioate
  modified_base 23: mod_base = OTHER; note = 2'-O-methyluridine
tacacattgttgctctttactgt

SEQ ID NO: 984 - RNA, 23 nt, synthetic construct
  source 1..23: mol_type = other RNA
  modified_base 1: mod_base = OTHER; note = 2'-O-methyluridine-3'-phosphorothioate 5'-(E)-Vinylphosphonate
  modified_base 2: mod_base = OTHER; note = 2'-deoxy-2'-fluorouridine-3'-phosphorothioate
  modified_base 3: mod_base = OTHER; note = 2'-O-methylcytidine-3'-phosphate
  modified_base 4: mod_base = OTHER; note = 2'-O-methylcytidine-3'-phosphate
  modified_base 5: mod_base = OTHER; note = 2'-O-methyladenosine-3'-phosphate
  modified_base 6: mod_base = OTHER; note = 2'-deoxy-2'-fluorocytidine-3'-phosphate
  modified_base 7: mod_base = OTHER; note = 2'-O-methyluridine-3'-phosphate
  modified_base 8: mod_base = OTHER; note = 2'-O-methylguanosine-3'-phosphate
  modified_base 9: mod_base = OTHER; note = 2'-O-methylcytidine-3'-phosphate
  modified_base 10: mod_base = OTHER; note = 2'-O-methyladenosine-3'-phosphate
  modified_base 11: mod_base = OTHER; note = 2'-O-methyladenosine-3'-phosphate
  modified_base 12: mod_base = OTHER; note = 2'-O-methyluridine-3'-phosphate
  modified_base 13: mod_base = OTHER; note = 2'-O-methylguanosine-3'-phosphate
  modified_base 14: mod_base = OTHER; note = 2'-deoxy-2'-fluorocytidine-3'-phosphate
  modified_base 15: mod_base = OTHER; note = 2'-O-methyladenosine-3'-phosphate
  modified_base 16: mod_base = OTHER; note = 2'-deoxy-2'-fluorouridine-3'-phosphate
  modified_base 17: mod_base = OTHER; note = 2'-O-methyladenosine-3'-phosphate
  modified_base 18: mod_base = OTHER; note = 2'-O-methylcytidine-3'-phosphate
  modified_base 19: mod_base = OTHER; note = 2'-O-methyladenosine-3'-phosphate
  modified_base 20: mod_base = OTHER; note = 2'-O-methyluridine-3'-phosphate
  modified_base 21: mod_base = OTHER; note = 2'-O-methyluridine-3'-phosphorothioate
  modified_base 22: mod_base = OTHER; note = 2'-O-methylcytidine-3'-phosphorothioate
  modified_base 23: mod_base = OTHER; note = 2'-O-methylcytidine
ttccactgcaatgcatacattcc

SEQ ID NO: 985 - RNA, 23 nt, synthetic construct
  source 1..23: mol_type = other RNA
  modified_base 1: mod_base = OTHER; note = 2'-O-methyluridine-3'-phosphorothioate 5'-(E)-Vinylphosphonate
  modified_base 2: mod_base = OTHER; note = 2'-deoxy-2'-fluorouridine-3'-phosphorothioate
  modified_base 3: mod_base = OTHER; note = 2'-O-methylcytidine-3'-phosphate
  modified_base 4: mod_base = OTHER; note = 2'-O-methylcytidine-3'-phosphate
  modified_base 5: mod_base = OTHER; note = 2'-O-methyladenosine-3'-phosphate
  modified_base 6: mod_base = OTHER; note = 2'-deoxy-2'-fluorocytidine-3'-phosphate
  modified_base 7: mod_base = OTHER; note = 2'-O-methyladenosine-3'-phosphate
  modified_base 8: mod_base = OTHER; note = 2'-O-methylguanosine-3'-phosphate
  modified_base 9: mod_base = OTHER; note = 2'-O-methylcytidine-3'-phosphate
  modified_base 10: mod_base = OTHER; note = 2'-O-methyladenosine-3'-phosphate
  modified_base 11: mod_base = OTHER; note = 2'-O-methyladenosine-3'-phosphate
  modified_base 12: mod_base = OTHER; note = 2'-O-methyluridine-3'-phosphate
  modified_base 13: mod_base = OTHER; note = 2'-O-methylguanosine-3'-phosphate
  modified_base 14: mod_base = OTHER; note = 2'-deoxy-2'-fluorocytidine-3'-phosphate
  modified_base 15: mod_base = OTHER; note = 2'-O-methyladenosine-3'-phosphate
  modified_base 16: mod_base = OTHER; note = 2'-deoxy-2'-fluorouridine-3'-phosphate
  modified_base 17: mod_base = OTHER; note = 2'-O-methyladenosine-3'-phosphate
  modified_base 18: mod_base = OTHER; note = 2'-O-methylcytidine-3'-phosphate
  modified_base 19: mod_base = OTHER; note = 2'-O-methyladenosine-3'-phosphate
  modified_base 20: mod_base = OTHER; note = 2'-O-methyluridine-3'-phosphate
  modified_base 21: mod_base = OTHER; note = 2'-O-methyluridine-3'-phosphorothioate
  modified_base 22: mod_base = OTHER; note = 2'-O-methylcytidine-3'-phosphorothioate
  modified_base 23: mod_base = OTHER; note = 2'-O-methylcytidine
ttccacagcaatgcatacattcc

SEQ ID NO: 986 - RNA, 23 nt, synthetic construct
  source 1..23: mol_type = other RNA
  modified_base 1: mod_base = OTHER; note = 2'-O-methyluridine-3'-phosphorothioate 5'-(E)-Vinylphosphonate
  modified_base 2: mod_base = OTHER; note = 2'-deoxy-2'-fluorouridine-3'-phosphorothioate
  modified_base 3: mod_base = OTHER; note = 2'-O-methylguanosine-3'-phosphate
  modified_base 4: mod_base = OTHER; note = 2'-O-methylguanosine-3'-phosphate
  modified_base 5: mod_base = OTHER; note = 2'-O-methyluridine-3'-phosphate
  modified_base 6: mod_base = OTHER; note = 2'-deoxy-2'-fluorocytidine-3'-phosphate
  modified_base 7: mod_base = OTHER; note = 2'-O-methyluridine-3'-phosphate
  modified_base 8: mod_base = OTHER; note = 2'-O-methyluridine-3'-phosphate
  modified_base 9: mod_base = OTHER; note = 2'-O-methylguanosine-3'-phosphate
  modified_base 10: mod_base = OTHER; note = 2'-O-methylguanosine-3'-phosphate
  modified_base 11: mod_base = OTHER; note = 2'-O-methyladenosine-3'-phosphate
  modified_base 12: mod_base = OTHER; note = 2'-O-methyladenosine-3'-phosphate
  modified_base 13: mod_base = OTHER; note = 2'-O-methyladenosine-3'-phosphate
  modified_base 14: mod_base = OTHER; note = 2'-deoxy-2'-fluorouridine-3'-phosphate
  modified_base 15: mod_base = OTHER; note = 2'-O-methyluridine-3'-phosphate
  modified_base 16: mod_base = OTHER; note = 2'-deoxy-2'-fluorouridine-3'-phosphate
  modified_base 17: mod_base = OTHER; note = 2'-O-methyluridine-3'-phosphate
  modified_base 18: mod_base = OTHER; note = 2'-O-methylguanosine-3'-phosphate
  modified_base 19: mod_base = OTHER; note = 2'-O-methylcytidine-3'-phosphate
  modified_base 20: mod_base = OTHER; note = 2'-O-methylcytidine-3'-phosphate
  modified_base 21: mod_base = OTHER; note = 2'-O-methylguanosine-3'-phosphorothioate
  modified_base 22: mod_base = OTHER; note = 2'-O-methyluridine-3'-phosphorothioate
  modified_base 23: mod_base = OTHER; note = 2'-O-methylcytidine
ttggtcttggaaattttgccgtc

SEQ ID NO: 987 - RNA, 23 nt, synthetic construct
  source 1..23: mol_type = other RNA
  modified_base 1: mod_base = OTHER; note = 2'-O-methyluridine-3'-phosphorothioate 5'-(E)-Vinylphosphonate
  modified_base 2: mod_base = OTHER; note = 2'-deoxy-2'-fluorouridine-3'-phosphorothioate
  modified_base 3: mod_base = OTHER; note = 2'-O-methylguanosine-3'-phosphate
  modified_base 4: mod_base = OTHER; note = 2'-O-methylguanosine-3'-phosphate
  modified_base 5: mod_base = OTHER; note = 2'-O-methyluridine-3'-phosphate
  modified_base 6: mod_base = OTHER; note = 2'-deoxy-2'-fluorocytidine-3'-phosphate
  modified_base 7: mod_base = OTHER; note = 2'-O-methyladenosine-3'-phosphate
  modified_base 8: mod_base = OTHER; note = 2'-O-methyluridine-3'-phosphate
  modified_base 9: mod_base = OTHER; note = 2'-O-methylguanosine-3'-phosphate
  modified_base 10: mod_base = OTHER; note = 2'-O-methylguanosine-3'-phosphate
  modified_base 11: mod_base = OTHER; note = 2'-O-methyladenosine-3'-phosphate
  modified_base 12: mod_base = OTHER; note = 2'-O-methyladenosine-3'-phosphate
  modified_base 13: mod_base = OTHER; note = 2'-O-methyladenosine-3'-phosphate
  modified_base 14: mod_base = OTHER; note = 2'-deoxy-2'-fluorouridine-3'-phosphate
  modified_base 15: mod_base = OTHER; note = 2'-O-methyluridine-3'-phosphate
  modified_base 16: mod_base = OTHER; note = 2'-deoxy-2'-fluorouridine-3'-phosphate
  modified_base 17: mod_base = OTHER; note = 2'-O-methyluridine-3'-phosphate
  modified_base 18: mod_base = OTHER; note = 2'-O-methylguanosine-3'-phosphate
  modified_base 19: mod_base = OTHER; note = 2'-O-methylcytidine-3'-phosphate
  modified_base 20: mod_base = OTHER; note = 2'-O-methylcytidine-3'-phosphate
  modified_base 21: mod_base = OTHER; note = 2'-O-methylguanosine-3'-phosphorothioate
  modified_base 22: mod_base = OTHER; note = 2'-O-methyluridine-3'-phosphorothioate
  modified_base 23: mod_base = OTHER; note = 2'-O-methylcytidine
ttggtcatggaaattttgccgtc

SEQ ID NO: 988 - RNA, 23 nt, synthetic construct
  source 1..23: mol_type = other RNA
  modified_base 1: mod_base = OTHER; note = 2'-O-methyluridine-3'-phosphorothioate 5'-(E)-Vinylphosphonate
  modified_base 2: mod_base = OTHER; note = 2'-deoxy-2'-fluoroadenosine-3'-phosphorothioate
  modified_base 3: mod_base = OTHER; note = 2'-O-methyluridine-3'-phosphate
  modified_base 4: mod_base = OTHER; note = 2'-O-methylguanosine-3'-phosphate
  modified_base 5: mod_base = OTHER; note = 2'-O-methylguanosine-3'-phosphate
  modified_base 6: mod_base = OTHER; note = 2'-deoxy-2'-fluorouridine-3'-phosphate
  modified_base 7: mod_base = OTHER; note = 2'-O-methylcytidine-3'-phosphate
  modified_base 8: mod_base = OTHER; note = 2'-O-methyluridine-3'-phosphate
  modified_base 9: mod_base = OTHER; note = 2'-O-methyluridine-3'-phosphate
  modified_base 10: mod_base = OTHER; note = 2'-O-methylguanosine-3'-phosphate
  modified_base 11: mod_base = OTHER; note = 2'-O-methylguanosine-3'-phosphate
  modified_base 12: mod_base = OTHER; note = 2'-O-methyladenosine-3'-phosphate
  modified_base 13: mod_base = OTHER; note = 2'-O-methyladenosine-3'-phosphate
  modified_base 14: mod_base = OTHER; note = 2'-deoxy-2'-fluoroadenosine-3'-phosphate
  modified_base 15: mod_base = OTHER; note = 2'-O-methyluridine-3'-phosphate
  modified_base 16: mod_base = OTHER; note = 2'-deoxy-2'-fluorouridine-3'-phosphate
  modified_base 17: mod_base = OTHER; note = 2'-O-methyluridine-3'-phosphate
  modified_base 18: mod_base = OTHER; note = 2'-O-methyluridine-3'-phosphate
  modified_base 19: mod_base = OTHER; note = 2'-O-methylguanosine-3'-phosphate
  modified_base 20: mod_base = OTHER; note = 2'-O-methylcytidine-3'-phosphate
  modified_base 21: mod_base = OTHER; note = 2'-O-methylcytidine-3'-phosphorothioate
  modified_base 22: mod_base = OTHER; note = 2'-O-methylguanosine-3'-phosphorothioate
  modified_base 23: mod_base = OTHER; note = 2'-O-methyluridine
tatggtcttggaaattttgccgt

SEQ ID NO: 989 - RNA, 23 nt, synthetic construct
  source 1..23: mol_type = other RNA
  modified_base 1: mod_base = OTHER; note = 2'-O-methyluridine-3'-phosphorothioate 5'-(E)-Vinylphosphonate
  modified_base 2: mod_base = OTHER; note = 2'-deoxy-2'-fluoroadenosine-3'-phosphorothioate
  modified_base 3: mod_base = OTHER; note = 2'-O-methyluridine-3'-phosphate
  modified_base 4: mod_base = OTHER; note = 2'-O-methylguanosine-3'-phosphate
  modified_base 5: mod_base = OTHER; note = 2'-O-methylguanosine-3'-phosphate
  modified_base 6: mod_base = OTHER; note = 2'-deoxy-2'-fluorouridine-3'-phosphate
  modified_base 7: mod_base = OTHER; note = 2'-O-methyladenosine-3'-phosphate
  modified_base 8: mod_base = OTHER; note = 2'-O-methyluridine-3'-phosphate
  modified_base 9: mod_base = OTHER; note = 2'-O-methyluridine-3'-phosphate
  modified_base 10: mod_base = OTHER; note = 2'-O-methylguanosine-3'-phosphate
  modified_base 11: mod_base = OTHER; note = 2'-O-methylguanosine-3'-phosphate
  modified_base 12: mod_base = OTHER; note = 2'-O-methyladenosine-3'-phosphate
  modified_base 13: mod_base = OTHER; note = 2'-O-methyladenosine-3'-phosphate
  modified_base 14: mod_base = OTHER; note = 2'-deoxy-2'-fluoroadenosine-3'-phosphate
  modified_base 15: mod_base = OTHER; note = 2'-O-methyluridine-3'-phosphate
  modified_base 16: mod_base = OTHER; note = 2'-deoxy-2'-fluorouridine-3'-phosphate
  modified_base 17: mod_base = OTHER; note = 2'-O-methyluridine-3'-phosphate
  modified_base 18: mod_base = OTHER; note = 2'-O-methyluridine-3'-phosphate
  modified_base 19: mod_base = OTHER; note = 2'-O-methylguanosine-3'-phosphate
  modified_base 20: mod_base = OTHER; note = 2'-O-methylcytidine-3'-phosphate
  modified_base 21: mod_base = OTHER; note = 2'-O-methylcytidine-3'-phosphorothioate
  modified_base 22: mod_base = OTHER; note = 2'-O-methylguanosine-3'-phosphorothioate
  modified_base 23: mod_base = OTHER; note = 2'-O-methyluridine
tatggtattggaaattttgccgt

SEQ ID NO: 990 - RNA, 23 nt, synthetic construct
  source 1..23: mol_type = other RNA
  modified_base 1: mod_base = OTHER; note = 2'-O-methyluridine-3'-phosphorothioate 5'-(E)-Vinylphosphonate
  modified_base 2: mod_base = OTHER; note = 2'-deoxy-2'-fluorocytidine-3'-phosphorothioate
  modified_base 3: mod_base = OTHER; note = 2'-O-methyladenosine-3'-phosphate
  modified_base 4: mod_base = OTHER; note = 2'-O-methyluridine-3'-phosphate
  modified_base 5: mod_base = OTHER; note = 2'-O-methylguanosine-3'-phosphate
  modified_base 6: mod_base = OTHER; note = 2'-deoxy-2'-fluoroguanosine-3'-phosphate
  modified_base 7: mod_base = OTHER; note = 2'-O-methyluridine-3'-phosphate
  modified_base 8: mod_base = OTHER; note = 2'-O-methylcytidine-3'-phosphate
  modified_base 9: mod_base = OTHER; note = 2'-O-methyluridine-3'-phosphate
  modified_base 10: mod_base = OTHER; note = 2'-O-methyluridine-3'-phosphate
  modified_base 11: mod_base = OTHER; note = 2'-O-methylguanosine-3'-phosphate
  modified_base 12: mod_base = OTHER; note = 2'-O-methylguanosine-3'-phosphate
  modified_base 13: mod_base = OTHER; note = 2'-O-methyladenosine-3'-phosphate
  modified_base 14: mod_base = OTHER; note = 2'-deoxy-2'-fluoroadenosine-3'-phosphate
  modified_base 15: mod_base = OTHER; note = 2'-O-methyladenosine-3'-phosphate
  modified_base 16: mod_base = OTHER; note = 2'-deoxy-2'-fluorouridine-3'-phosphate
  modified_base 17: mod_base = OTHER; note = 2'-O-methyluridine-3'-phosphate
  modified_base 18: mod_base = OTHER; note = 2'-O-methyluridine-3'-phosphate
  modified_base 19: mod_base = OTHER; note = 2'-O-methyluridine-3'-phosphate
  modified_base 20: mod_base = OTHER; note = 2'-O-methylguanosine-3'-phosphate
  modified_base 21: mod_base = OTHER; note = 2'-O-methylcytidine-3'-phosphorothioate
  modified_base 22: mod_base = OTHER; note = 2'-O-methylcytidine-3'-phosphorothioate
  modified_base 23: mod_base = OTHER; note = 2'-O-methylguanosine
tcatggtcttggaaattttgccg

SEQ ID NO: 991 - RNA, 23 nt, synthetic construct
  source 1..23: mol_type = other RNA
  modified_base 1: mod_base = OTHER; note = 2'-O-methyluridine-3'-phosphorothioate 5'-(E)-Vinylphosphonate
  modified_base 2: mod_base = OTHER; note = 2'-deoxy-2'-fluorocytidine-3'-phosphorothioate
  modified_base 3: mod_base = OTHER; note = 2'-O-methyladenosine-3'-phosphate
  modified_base 4: mod_base = OTHER; note = 2'-O-methyluridine-3'-phosphate
  modified_base 5: mod_base = OTHER; note = 2'-O-methylguanosine-3'-phosphate
  modified_base 6: mod_base = OTHER; note = 2'-deoxy-2'-fluoroguanosine-3'-phosphate
  modified_base 7: mod_base = OTHER; note = 2'-O-methyladenosine-3'-phosphate
  modified_base 8: mod_base = OTHER; note = 2'-O-methylcytidine-3'-phosphate
  modified_base 9: mod_base = OTHER; note = 2'-O-methyluridine-3'-phosphate
  modified_base 10: mod_base = OTHER; note = 2'-O-methyluridine-3'-phosphate
  modified_base 11: mod_base = OTHER; note = 2'-O-methylguanosine-3'-phosphate
  modified_base 12: mod_base = OTHER; note = 2'-O-methylguanosine-3'-phosphate
  modified_base 13: mod_base = OTHER; note = 2'-O-methyladenosine-3'-phosphate
  modified_base 14: mod_base = OTHER; note = 2'-deoxy-2'-fluoroadenosine-3'-phosphate
  modified_base 15: mod_base = OTHER; note = 2'-O-methyladenosine-3'-phosphate
  modified_base 16: mod_base = OTHER; note = 2'-deoxy-2'-fluorouridine-3'-phosphate
  modified_base 17: mod_base = OTHER; note = 2'-O-methyluridine-3'-phosphate
  modified_base 18: mod_base = OTHER; note = 2'-O-methyluridine-3'-phosphate
  modified_base 19: mod_base = OTHER; note = 2'-O-methyluridine-3'-phosphate
  modified_base 20: mod_base = OTHER; note = 2'-O-methylguanosine-3'-phosphate
  modified_base 21: mod_base = OTHER; note = 2'-O-methylcytidine-3'-phosphorothioate
  modified_base 22: mod_base = OTHER; note = 2'-O-methylcytidine-3'-phosphorothioate
  modified_base 23: mod_base = OTHER; note = 2'-O-methylguanosine
tcatggacttggaaattttgccg

SEQ ID NO: 992 - RNA, 23 nt, synthetic construct
  source 1..23: mol_type = other RNA
  modified_base 1: mod_base = OTHER; note = 2'-O-methyluridine-3'-phosphorothioate 5'-(E)-Vinylphosphonate
  modified_base 2: mod_base = OTHER; note = 2'-deoxy-2'-fluoroadenosine-3'-phosphorothioate
  modified_base 3: mod_base = OTHER; note = 2'-O-methyladenosine-3'-phosphate
  modified_base 4: mod_base = OTHER; note = 2'-O-methyluridine-3'-phosphate
  modified_base 5: mod_base = OTHER; note = 2'-O-methyluridine-3'-phosphate
  modified_base 6: mod_base = OTHER; note = 2'-deoxy-2'-fluorouridine-3'-phosphate
  modified_base 7: mod_base = OTHER; note = 2'-O-methylguanosine-3'-phosphate
  modified_base 8: mod_base = OTHER; note = 2'-O-methylguanosine-3'-phosphate
  modified_base 9: mod_base = OTHER; note = 2'-O-methyladenosine-3'-phosphate
  modified_base 10: mod_base = OTHER; note = 2'-O-methyladenosine-3'-phosphate
  modified_base 11: mod_base = OTHER; note = 2'-O-methylguanosine-3'-phosphate
  modified_base 12: mod_base = OTHER; note = 2'-O-methylguanosine-3'-phosphate
  modified_base 13: mod_base = OTHER; note = 2'-O-methyladenosine-3'-phosphate
  modified_base 14: mod_base = OTHER; note = 2'-deoxy-2'-fluoroadenosine-3'-phosphate
  modified_base 15: mod_base = OTHER; note = 2'-O-methyluridine-3'-phosphate
  modified_base 16: mod_base = OTHER; note = 2'-deoxy-2'-fluoroguanosine-3'-phosphate
  modified_base 17: mod_base = OTHER; note = 2'-O-methyluridine-3'-phosphate
  modified_base 18: mod_base = OTHER; note = 2'-O-methyladenosine-3'-phosphate
  modified_base 19: mod_base = OTHER; note = 2'-O-methyluridine-3'-phosphate
  modified_base 20: mod_base = OTHER; note = 2'-O-methylcytidine-3'-phosphate
  modified_base 21: mod_base = OTHER; note = 2'-O-methylcytidine-3'-phosphorothioate
  modified_base 22: mod_base = OTHER; note = 2'-O-methyladenosine-3'-phosphorothioate
  modified_base 23: mod_base = OTHER; note = 2'-O-methyluridine
taatttggaaggaatgtatccat

SEQ ID NO: 993 - RNA, 23 nt, synthetic construct
  source 1..23: mol_type = other RNA
  modified_base 1: mod_base = OTHER; note = 2'-O-methyluridine-3'-phosphorothioate 5'-(E)-Vinylphosphonate
  modified_base 2: mod_base = OTHER; note = 2'-deoxy-2'-fluoroadenosine-3'-phosphorothioate
  modified_base 3: mod_base = OTHER; note = 2'-O-methyladenosine-3'-phosphate
  modified_base 4: mod_base = OTHER; note = 2'-O-methyluridine-3'-phosphate
  modified_base 5: mod_base = OTHER; note = 2'-O-methyluridine-3'-phosphate
  modified_base 6: mod_base = OTHER; note = 2'-deoxy-2'-fluorouridine-3'-phosphate
  modified_base 7: mod_base = OTHER; note = 2'-O-methyladenosine-3'-phosphate
  modified_base 8: mod_base = OTHER; note = 2'-O-methylguanosine-3'-phosphate
  modified_base 9: mod_base = OTHER; note = 2'-O-methyladenosine-3'-phosphate
  modified_base 10: mod_base = OTHER; note = 2'-O-methyladenosine-3'-phosphate
  modified_base 11: mod_base = OTHER; note = 2'-O-methylguanosine-3'-phosphate
  modified_base 12: mod_base = OTHER; note = 2'-O-methylguanosine-3'-phosphate
  modified_base 13: mod_base = OTHER; note = 2'-O-methyladenosine-3'-phosphate
  modified_base 14: mod_base = OTHER; note = 2'-deoxy-2'-fluoroadenosine-3'-phosphate
  modified_base 15: mod_base = OTHER; note = 2'-O-methyluridine-3'-phosphate
  modified_base 16: mod_base = OTHER; note = 2'-deoxy-2'-fluoroguanosine-3'-phosphate
  modified_base 17: mod_base = OTHER; note = 2'-O-methyluridine-3'-phosphate
  modified_base 18: mod_base = OTHER; note = 2'-O-methyladenosine-3'-phosphate
  modified_base 19: mod_base = OTHER; note = 2'-O-methyluridine-3'-phosphate
  modified_base 20: mod_base = OTHER; note = 2'-O-methylcytidine-3'-phosphate
  modified_base 21: mod_base = OTHER; note = 2'-O-methylcytidine-3'-phosphorothioate
  modified_base 22: mod_base = OTHER; note = 2'-O-methyladenosine-3'-phosphorothioate
  modified_base 23: mod_base = OTHER; note = 2'-O-methyluridine
taatttagaaggaatgtatccat

SEQ ID NO: 994 - RNA, 23 nt, synthetic construct
  source 1..23: mol_type = other RNA
  modified_base 1: mod_base = OTHER; note = 2'-O-methyluridine-3'-phosphorothioate 5'-(E)-Vinylphosphonate
  modified_base 2: mod_base = OTHER; note = 2'-deoxy-2'-fluorouridine-3'-phosphorothioate
  modified_base 3: mod_base = OTHER; note = 2'-O-methylguanosine-3'-phosphate
  modified_base 4: mod_base = OTHER; note = 2'-O-methylguanosine-3'-phosphate
  modified_base 5: mod_base = OTHER; note = 2'-O-methyladenosine-3'-phosphate
  modified_base 6: mod_base = OTHER; note = 2'-deoxy-2'-fluoroadenosine-3'-phosphate
  modified_base 7: mod_base = OTHER; note = 2'-O-methyladenosine-3'-phosphate
  modified_base 8: mod_base = OTHER; note = 2'-O-methyluridine-3'-phosphate
  modified_base 9: mod_base = OTHER; note = 2'-O-methyluridine-3'-phosphate
  modified_base 10: mod_base = OTHER; note = 2'-O-methyluridine-3'-phosphate
  modified_base 11: mod_base = OTHER; note = 2'-O-methylguanosine-3'-phosphate
  modified_base 12: mod_base = OTHER; note = 2'-O-methylguanosine-3'-phosphate
  modified_base 13: mod_base = OTHER; note = 2'-O-methyladenosine-3'-phosphate
  modified_base 14: mod_base = OTHER; note = 2'-deoxy-2'-fluoroadenosine-3'-phosphate
  modified_base 15: mod_base = OTHER; note = 2'-O-methylguanosine-3'-phosphate
  modified_base 16: mod_base = OTHER; note = 2'-deoxy-2'-fluoroguanosine-3'-phosphate
  modified_base 17: mod_base = OTHER; note = 2'-O-methyladenosine-3'-phosphate
  modified_base 18: mod_base = OTHER; note = 2'-O-methyladenosine-3'-phosphate
  modified_base 19: mod_base = OTHER; note = 2'-O-methyluridine-3'-phosphate
  modified_base 20: mod_base = OTHER; note = 2'-O-methylguanosine-3'-phosphate
  modified_base 21: mod_base = OTHER; note = 2'-O-methyluridine-3'-phosphorothioate
  modified_base 22: mod_base = OTHER; note = 2'-O-methyladenosine-3'-phosphorothioate
  modified_base 23: mod_base = OTHER; note = 2'-O-methyluridine
ttggaaatttggaaggaatgtat

SEQ ID NO: 995 - RNA, 23 nt, synthetic construct
  source 1..23: mol_type = other RNA
  modified_base 1: mod_base = OTHER; note = 2'-O-methyluridine-3'-phosphorothioate 5'-(E)-Vinylphosphonate
  modified_base 2: mod_base = OTHER; note = 2'-deoxy-2'-fluorouridine-3'-phosphorothioate
  modified_base 3: mod_base = OTHER; note = 2'-O-methyluridine-3'-phosphate
  modified_base 4: mod_base = OTHER; note = 2'-O-methylguanosine-3'-phosphate
  modified_base 5: mod_base = OTHER; note = 2'-O-methylguanosine-3'-phosphate
  modified_base 6: mod_base = OTHER; note = 2'-deoxy-2'-fluoroadenosine-3'-phosphate
  modified_base 7: mod_base = OTHER; note = 2'-O-methyladenosine-3'-phosphate
  modified_base 8: mod_base = OTHER; note = 2'-O-methyladenosine-3'-phosphate
  modified_base 9: mod_base = OTHER; note = 2'-O-methyluridine-3'-phosphate
  modified_base 10: mod_base = OTHER; note = 2'-O-methyluridine-3'-phosphate
  modified_base 11: mod_base = OTHER; note = 2'-O-methyluridine-3'-phosphate
  modified_base 12: mod_base = OTHER; note = 2'-O-methylguanosine-3'-phosphate
  modified_base 13: mod_base = OTHER; note = 2'-O-methylguanosine-3'-phosphate
  modified_base 14: mod_base = OTHER; note = 2'-deoxy-2'-fluoroadenosine-3'-phosphate
  modified_base 15: mod_base = OTHER; note = 2'-O-methyladenosine-3'-phosphate
  modified_base 16: mod_base = OTHER; note = 2'-deoxy-2'-fluoroguanosine-3'-phosphate
  modified_base 17: mod_base = OTHER; note = 2'-O-methylguanosine-3'-phosphate
  modified_base 18: mod_base = OTHER; note = 2'-O-methyladenosine-3'-phosphate
  modified_base 19: mod_base = OTHER; note = 2'-O-methyladenosine-3'-phosphate
  modified_base 20: mod_base = OTHER; note = 2'-O-methyluridine-3'-phosphate
  modified_base 21: mod_base = OTHER; note = 2'-O-methylguanosine-3'-phosphorothioate
  modified_base 22: mod_base = OTHER; note = 2'-O-methyluridine-3'-phosphorothioate
  modified_base 23: mod_base = OTHER; note = 2'-O-methyladenosine
tttggaaatttggaaggaatgta

SEQ ID NO: 996 - RNA, 23 nt, synthetic construct
  source 1..23: mol_type = other RNA
  modified_base 1: mod_base = OTHER; note = 2'-O-methyluridine-3'-phosphorothioate 5'-(E)-Vinylphosphonate
  modified_base 2: mod_base = OTHER; note = 2'-deoxy-2'-fluorouridine-3'-phosphorothioate
  modified_base 3: mod_base = OTHER; note = 2'-O-methylguanosine-3'-phosphate
  modified_base 4: mod_base = OTHER; note = 2'-O-methyluridine-3'-phosphate
  modified_base 5: mod_base = OTHER; note = 2'-O-methyluridine-3'-phosphate
  modified_base 6: mod_base = OTHER; note = 2'-deoxy-2'-fluorouridine-3'-phosphate
  modified_base 7: mod_base = OTHER; note = 2'-O-methylguanosine-3'-phosphate
  modified_base 8: mod_base = OTHER; note = 2'-O-methylguanosine-3'-phosphate
  modified_base 9: mod_base = OTHER; note = 2'-O-methyladenosine-3'-phosphate
  modified_base 10: mod_base = OTHER; note = 2'-O-methyladenosine-3'-phosphate
  modified_base 11: mod_base = OTHER; note = 2'-O-methyladenosine-3'-phosphate
  modified_base 12: mod_base = OTHER; note = 2'-O-methyluridine-3'-phosphate
  modified_base 13: mod_base = OTHER; note = 2'-O-methyluridine-3'-phosphate
  modified_base 14: mod_base = OTHER; note = 2'-deoxy-2'-fluorouridine-3'-phosphate
  modified_base 15: mod_base = OTHER; note = 2'-O-methylguanosine-3'-phosphate
  modified_base 16: mod_base = OTHER; note = 2'-deoxy-2'-fluoroguanosine-3'-phosphate
  modified_base 17: mod_base = OTHER; note = 2'-O-methyladenosine-3'-phosphate
  modified_base 18: mod_base = OTHER; note = 2'-O-methyladenosine-3'-phosphate
  modified_base 19: mod_base = OTHER; note = 2'-O-methylguanosine-3'-phosphate
  modified_base 20: mod_base = OTHER; note = 2'-O-methylguanosine-3'-phosphate
  modified_base 21: mod_base = OTHER; note = 2'-O-methyladenosine-3'-phosphorothioate
  modified_base 22: mod_base = OTHER; note = 2'-O-methyladenosine-3'-phosphorothioate
  modified_base 23: mod_base = OTHER; note = 2'-O-methyluridine
ttgtttggaaatttggaaggaat

SEQ ID NO: 997 - RNA, 23 nt, synthetic construct
  source 1..23: mol_type = other RNA
  modified_base 1: mod_base = OTHER; note = 2'-O-methyluridine-3'-phosphorothioate 5'-(E)-Vinylphosphonate
  modified_base 2: mod_base = OTHER; note = 2'-deoxy-2'-fluorouridine-3'-phosphorothioate
  modified_base 3: mod_base = OTHER; note = 2'-O-methylguanosine-3'-phosphate
  modified_base 4: mod_base = OTHER; note = 2'-O-methyluridine-3'-phosphate
  modified_base 5: mod_base = OTHER; note = 2'-O-methyluridine-3'-phosphate
  modified_base 6: mod_base = OTHER; note = 2'-deoxy-2'-fluorouridine-3'-phosphate
  modified_base 7: mod_base = OTHER; note = 2'-O-methyladenosine-3'-phosphate
  modified_base 8: mod_base = OTHER; note = 2'-O-methylguanosine-3'-phosphate
  modified_base 9: mod_base = OTHER; note = 2'-O-methyladenosine-3'-phosphate
  modified_base 10: mod_base = OTHER; note = 2'-O-methyladenosine-3'-phosphate
  modified_base 11: mod_base = OTHER; note = 2'-O-methyladenosine-3'-phosphate
  modified_base 12: mod_base = OTHER; note = 2'-O-methyluridine-3'-phosphate
  modified_base 13: mod_base = OTHER; note = 2'-O-methyluridine-3'-phosphate
  modified_base 14: mod_base = OTHER; note = 2'-deoxy-2'-fluorouridine-3'-phosphate
  modified_base 15: mod_base = OTHER; note = 2'-O-methylguanosine-3'-phosphate
  modified_base 16: mod_base = OTHER; note = 2'-deoxy-2'-fluoroguanosine-3'-phosphate
  modified_base 17: mod_base = OTHER; note = 2'-O-methyladenosine-3'-phosphate
  modified_base 18: mod_base = OTHER; note = 2'-O-methyladenosine-3'-phosphate
  modified_base 19: mod_base = OTHER; note = 2'-O-methylguanosine-3'-phosphate
  modified_base 20: mod_base = OTHER; note = 2'-O-methylguanosine-3'-phosphate
  modified_base 21: mod_base = OTHER; note = 2'-O-methyladenosine-3'-phosphorothioate
  modified_base 22: mod_base = OTHER; note = 2'-O-methyladenosine-3'-phosphorothioate
  modified_base 23: mod_base = OTHER; note = 2'-O-methyluridine
ttgtttagaaatttggaaggaat

SEQ ID NO: 998 - RNA, 23 nt, synthetic construct
  source 1..23: mol_type = other RNA
  modified_base 1: mod_base = OTHER; note = 2'-O-methyluridine-3'-phosphorothioate 5'-(E)-Vinylphosphonate
  modified_base 2: mod_base = OTHER; note = 2'-deoxy-2'-fluorouridine-3'-phosphorothioate
  modified_base 3: mod_base = OTHER; note = 2'-O-methyluridine-3'-phosphate
  modified_base 4: mod_base = OTHER; note = 2'-O-methylguanosine-3'-phosphate
  modified_base 5: mod_base = OTHER; note = 2'-O-methyluridine-3'-phosphate
  modified_base 6: mod_base = OTHER; note = 2'-deoxy-2'-fluorouridine-3'-phosphate
  modified_base 7: mod_base = OTHER; note = 2'-O-methyluridine-3'-phosphate
  modified_base 8: mod_base = OTHER; note = 2'-O-methylguanosine-3'-phosphate
  modified_base 9: mod_base = OTHER; note = 2'-O-methylguanosine-3'-phosphate
  modified_base 10: mod_base = OTHER; note = 2'-O-methyladenosine-3'-phosphate
  modified_base 11: mod_base = OTHER; note = 2'-O-methyladenosine-3'-phosphate
  modified_base 12: mod_base = OTHER; note = 2'-O-methyladenosine-3'-phosphate
  modified_base 13: mod_base = OTHER; note = 2'-O-methyluridine-3'-phosphate
  modified_base 14: mod_base = OTHER; note = 2'-deoxy-2'-fluorouridine-3'-phosphate
  modified_base 15: mod_base = OTHER; note = 2'-O-methyluridine-3'-phosphate
  modified_base 16: mod_base = OTHER; note = 2'-deoxy-2'-fluoroguanosine-3'-phosphate
  modified_base 17: mod_base = OTHER; note = 2'-O-methylguanosine-3'-phosphate
  modified_base 18: mod_base = OTHER; note = 2'-O-methyladenosine-3'-phosphate
  modified_base 19: mod_base = OTHER; note = 2'-O-methyladenosine-3'-phosphate
  modified_base 20: mod_base = OTHER; note = 2'-O-methylguanosine-3'-phosphate
  modified_base 21: mod_base = OTHER; note = 2'-O-methylguanosine-3'-phosphorothioate
  modified_base 22: mod_base = OTHER; note = 2'-O-methyladenosine-3'-phosphorothioate
  modified_base 23: mod_base = OTHER; note = 2'-O-methyladenosine
tttgtttggaaatttggaaggaa

SEQ ID NO: 999 - RNA, 23 nt, synthetic construct
  source 1..23: mol_type = other RNA
  modified_base 1: mod_base = OTHER; note = 2'-O-methyluridine-3'-phosphorothioate 5'-(E)-Vinylphosphonate
  modified_base 2: mod_base = OTHER; note = 2'-deoxy-2'-fluorouridine-3'-phosphorothioate
  modified_base 3: mod_base = OTHER; note = 2'-O-methyluridine-3'-phosphate
  modified_base 4: mod_base = OTHER; note = 2'-O-methylguanosine-3'-phosphate
  modified_base 5: mod_base = OTHER; note = 2'-O-methyluridine-3'-phosphate
  modified_base 6: mod_base = OTHER; note = 2'-deoxy-2'-fluorouridine-3'-phosphate
  modified_base 7: mod_base = OTHER; note = 2'-O-methyladenosine-3'-phosphate
  modified_base 8: mod_base = OTHER; note = 2'-O-methylguanosine-3'-phosphate
  modified_base 9: mod_base = OTHER; note = 2'-O-methylguanosine-3'-phosphate
  modified_base 10: mod_base = OTHER; note = 2'-O-methyladenosine-3'-phosphate
  modified_base 11: mod_base = OTHER; note = 2'-O-methyladenosine-3'-phosphate
  modified_base 12: mod_base = OTHER; note = 2'-O-methyladenosine-3'-phosphate
  modified_base 13: mod_base = OTHER; note = 2'-O-methyluridine-3'-phosphate
  modified_base 14: mod_base = OTHER; note = 2'-deoxy-2'-fluorouridine-3'-phosphate
  modified_base 15: mod_base = OTHER; note = 2'-O-methyluridine-3'-phosphate
  modified_base 16: mod_base = OTHER; note = 2'-deoxy-2'-fluoroguanosine-3'-phosphate
  modified_base 17: mod_base = OTHER; note = 2'-O-methylguanosine-3'-phosphate
  modified_base 18: mod_base = OTHER; note = 2'-O-methyladenosine-3'-phosphate
  modified_base 19: mod_base = OTHER; note = 2'-O-methyladenosine-3'-phosphate
  modified_base 20: mod_base = OTHER; note = 2'-O-methylguanosine-3'-phosphate
  modified_base 21: mod_base = OTHER; note = 2'-O-methylguanosine-3'-phosphorothioate
  modified_base 22: mod_base = OTHER; note = 2'-O-methyladenosine-3'-phosphorothioate
  modified_base 23: mod_base = OTHER; note = 2'-O-methyladenosine
tttgttaggaaatttggaaggaa

SEQ ID NO: 1000 - RNA, 23 nt, synthetic construct
  source 1..23: mol_type = other RNA
  modified_base 1: mod_base = OTHER; note = 2'-O-methyluridine-3'-phosphorothioate 5'-(E)-Vinylphosphonate
  modified_base 2: mod_base = OTHER; note = 2'-deoxy-2'-fluorocytidine-3'-phosphorothioate
  modified_base 3: mod_base = OTHER; note = 2'-O-methyluridine-3'-phosphate
  modified_base 4: mod_base = OTHER; note = 2'-O-methyluridine-3'-phosphate
  modified_base 5: mod_base = OTHER; note = 2'-O-methylguanosine-3'-phosphate
  modified_base 6: mod_base = OTHER; note = 2'-deoxy-2'-fluorouridine-3'-phosphate
  modified_base 7: mod_base = OTHER; note = 2'-O-methyluridine-3'-phosphate
  modified_base 8: mod_base = OTHER; note = 2'-O-methyluridine-3'-phosphate
  modified_base 9: mod_base = OTHER; note = 2'-O-methylguanosine-3'-phosphate
  modified_base 10: mod_base = OTHER; note = 2'-O-methylguanosine-3'-phosphate
  modified_base 11: mod_base = OTHER; note = 2'-O-methyladenosine-3'-phosphate
  modified_base 12: mod_base = OTHER; note = 2'-O-methyladenosine-3'-phosphate
  modified_base 13: mod_base = OTHER; note = 2'-O-methyladenosine-3'-phosphate
  modified_base 14: mod_base = OTHER; note = 2'-deoxy-2'-fluorouridine-3'-phosphate
  modified_base 15: mod_base = OTHER; note = 2'-O-methyluridine-3'-phosphate
  modified_base 16: mod_base = OTHER; note = 2'-deoxy-2'-fluorouridine-3'-phosphate
  modified_base 17: mod_base = OTHER; note = 2'-O-methylguanosine-3'-phosphate
  modified_base 18: mod_base = OTHER; note = 2'-O-methylguanosine-3'-phosphate
  modified_base 19: mod_base = OTHER; note = 2'-O-methyladenosine-3'-phosphate
  modified_base 20: mod_base = OTHER; note = 2'-O-methyladenosine-3'-phosphate
  modified_base 21: mod_base = OTHER; note = 2'-O-methylguanosine-3'-phosphorothioate
  modified_base 22: mod_base = OTHER; note = 2'-O-methylguanosine-3'-phosphorothioate
  modified_base 23: mod_base = OTHER; note = 2'-O-methyladenosine
tcttgtttggaaatttggaagga

SEQ ID NO: 1001 - RNA, 23 nt, synthetic construct
  source 1..23: mol_type = other RNA
  modified_base 1: mod_base = OTHER; note = 2'-O-methyluridine-3'-phosphorothioate 5'-(E)-Vinylphosphonate
  modified_base 2: mod_base = OTHER; note = 2'-deoxy-2'-fluorouridine-3'-phosphorothioate
  modified_base 3: mod_base = OTHER; note = 2'-O-methylcytidine-3'-phosphate
  modified_base 4: mod_base = OTHER; note = 2'-O-methyluridine-3'-phosphate
  modified_base 5: mod_base = OTHER; note = 2'-O-methyluridine-3'-phosphate
  modified_base 6: mod_base = OTHER; note = 2'-deoxy-2'-fluoroguanosine-3'-phosphate
  modified_base 7: mod_base = OTHER; note = 2'-O-methyluridine-3'-phosphate
  modified_base 8: mod_base = OTHER; note = 2'-O-methyluridine-3'-phosphate
  modified_base 9: mod_base = OTHER; note = 2'-O-methyluridine-3'-phosphate
  modified_base 10: mod_base = OTHER; note = 2'-O-methylguanosine-3'-phosphate
  modified_base 11: mod_base = OTHER; note = 2'-O-methylguanosine-3'-phosphate
  modified_base 12: mod_base = OTHER; note = 2'-O-methyladenosine-3'-phosphate
  modified_base 13: mod_base = OTHER; note = 2'-O-methyladenosine-3'-phosphate
  modified_base 14: mod_base = OTHER; note = 2'-deoxy-2'-fluoroadenosine-3'-phosphate
  modified_base 15: mod_base = OTHER; note = 2'-O-methyluridine-3'-phosphate
  modified_base 16: mod_base = OTHER; note = 2'-deoxy-2'-fluorouridine-3'-phosphate
  modified_base 17: mod_base = OTHER; note = 2'-O-methyluridine-3'-phosphate
  modified_base 18: mod_base = OTHER; note = 2'-O-methylguanosine-3'-phosphate
  modified_base 19: mod_base = OTHER; note = 2'-O-methylguanosine-3'-phosphate
  modified_base 20: mod_base = OTHER; note = 2'-O-methyladenosine-3'-phosphate
  modified_base 21: mod_base = OTHER; note = 2'-O-methyladenosine-3'-phosphorothioate
  modified_base 22: mod_base = OTHER; note = 2'-O-methylguanosine-3'-phosphorothioate
  modified_base 23: mod_base = OTHER; note = 2'-O-methylguanosine
ttcttgtttggaaatttggaagg

SEQ ID NO: 1002 - RNA, 23 nt, synthetic construct
  source 1..23: mol_type = other RNA
  modified_base 1: mod_base = OTHER; note = 2'-O-methyluridine-3'-phosphorothioate 5'-(E)-Vinylphosphonate
  modified_base 2: mod_base = OTHER; note = 2'-deoxy-2'-fluorouridine-3'-phosphorothioate
  modified_base 3: mod_base = OTHER; note = 2'-O-methylcytidine-3'-phosphate
  modified_base 4: mod_base = OTHER; note = 2'-O-methyluridine-3'-phosphate
  modified_base 5: mod_base = OTHER; note = 2'-O-methyluridine-3'-phosphate
  modified_base 6: mod_base = OTHER; note = 2'-deoxy-2'-fluoroguanosine-3'-phosphate
  modified_base 7: mod_base = OTHER; note = 2'-O-methyladenosine-3'-phosphate
  modified_base 8: mod_base = OTHER; note = 2'-O-methyluridine-3'-phosphate
  modified_base 9: mod_base = OTHER; note = 2'-O-methyluridine-3'-phosphate
  modified_base 10: mod_base = OTHER; note = 2'-O-methylguanosine-3'-phosphate
  modified_base 11: mod_base = OTHER; note = 2'-O-methylguanosine-3'-phosphate
  modified_base 12: mod_base = OTHER; note = 2'-O-methyladenosine-3'-phosphate
  modified_base 13: mod_base = OTHER; note = 2'-O-methyladenosine-3'-phosphate
  modified_base 14: mod_base = OTHER; note = 2'-deoxy-2'-fluoroadenosine-3'-phosphate
  modified_base 15: mod_base = OTHER; note = 2'-O-methyluridine-3'-phosphate
  modified_base 16: mod_base = OTHER; note = 2'-deoxy-2'-fluorouridine-3'-phosphate
  modified_base 17: mod_base = OTHER; note = 2'-O-methyluridine-3'-phosphate
  modified_base 18: mod_base = OTHER; note = 2'-O-methylguanosine-3'-phosphate
  modified_base 19: mod_base = OTHER; note = 2'-O-methylguanosine-3'-phosphate
  modified_base 20: mod_base = OTHER; note = 2'-O-methyladenosine-3'-phosphate
  modified_base 21: mod_base = OTHER; note = 2'-O-methyladenosine-3'-phosphorothioate
  modified_base 22: mod_base = OTHER; note = 2'-O-methylguanosine-3'-phosphorothioate
  modified_base 23: mod_base = OTHER; note = 2'-O-methylguanosine
ttcttgattggaaatttggaagg

SEQ ID NO: 1003 - RNA, 23 nt, synthetic construct
  source 1..23: mol_type = other RNA
  modified_base 1: mod_base = OTHER; note = 2'-O-methyluridine-3'-phosphorothioate 5'-(E)-Vinylphosphonate
  modified_base 2: mod_base = OTHER; note = 2'-deoxy-2'-fluoroguanosine-3'-phosphorothioate
  modified_base 3: mod_base = OTHER; note = 2'-O-methyluridine-3'-phosphate
  modified_base 4: mod_base = OTHER; note = 2'-O-methyluridine-3'-phosphate
  modified_base 5: mod_base = OTHER; note = 2'-O-methylcytidine-3'-phosphate
  modified_base 6: mod_base = OTHER; note = 2'-deoxy-2'-fluorouridine-3'-phosphate
  modified_base 7: mod_base = OTHER; note = 2'-O-methyluridine-3'-phosphate
  modified_base 8: mod_base = OTHER; note = 2'-O-methylguanosine-3'-phosphate
  modified_base 9: mod_base = OTHER; note = 2'-O-methyluridine-3'-phosphate
  modified_base 10: mod_base = OTHER; note = 2'-O-methyluridine-3'-phosphate
  modified_base 11: mod_base = OTHER; note = 2'-O-methyluridine-3'-phosphate
  modified_base 12: mod_base = OTHER; note = 2'-O-methylguanosine-3'-phosphate
  modified_base 13: mod_base = OTHER; note = 2'-O-methylguanosine-3'-phosphate
  modified_base 14: mod_base = OTHER; note = 2'-deoxy-2'-fluoroadenosine-3'-phosphate
  modified_base 15: mod_base = OTHER; note = 2'-O-methyladenosine-3'-phosphate
  modified_base 16: mod_base = OTHER; note = 2'-deoxy-2'-fluoroadenosine-3'-phosphate
  modified_base 17: mod_base = OTHER; note = 2'-O-methyluridine-3'-phosphate
  modified_base 18: mod_base = OTHER; note = 2'-O-methyluridine-3'-phosphate
  modified_base 19: mod_base = OTHER; note = 2'-O-methyluridine-3'-phosphate
  modified_base 20: mod_base = OTHER; note = 2'-O-methylguanosine-3'-phosphate
  modified_base 21: mod_base = OTHER; note = 2'-O-methylguanosine-3'-phosphorothioate
  modified_base 22: mod_base = OTHER; note = 2'-O-methyladenosine-3'-phosphorothioate
  modified_base 23: mod_base = OTHER; note = 2'-O-methyladenosine
tgttcttgtttggaaatttggaa

SEQ ID NO: 1004 - RNA, 23 nt, synthetic construct
  source 1..23: mol_type = other RNA
  modified_base 1: mod_base = OTHER; note = 2'-O-methyluridine-3'-phosphorothioate 5'-(E)-Vinylphosphonate
  modified_base 2: mod_base = OTHER; note = 2'-deoxy-2'-fluoroguanosine-3'-phosphorothioate
  modified_base 3: mod_base = OTHER; note = 2'-O-methyluridine-3'-phosphate
  modified_base 4: mod_base = OTHER; note = 2'-O-methyluridine-3'-phosphate
  modified_base 5: mod_base = OTHER; note = 2'-O-methylcytidine-3'-phosphate
  modified_base 6: mod_base = OTHER; note = 2'-deoxy-2'-fluorouridine-3'-phosphate
  modified_base 7: mod_base = OTHER; note = 2'-O-methyladenosine-3'-phosphate
  modified_base 8: mod_base = OTHER; note = 2'-O-methylguanosine-3'-phosphate
  modified_base 9: mod_base = OTHER; note = 2'-O-methyluridine-3'-phosphate
  modified_base 10: mod_base = OTHER; note = 2'-O-methyluridine-3'-phosphate
  modified_base 11: mod_base = OTHER; note = 2'-O-methyluridine-3'-phosphate
  modified_base 12: mod_base = OTHER; note = 2'-O-methylguanosine-3'-phosphate
  modified_base 13: mod_base = OTHER; note = 2'-O-methylguanosine-3'-phosphate
  modified_base 14: mod_base = OTHER; note = 2'-deoxy-2'-fluoroadenosine-3'-phosphate
  modified_base 15: mod_base = OTHER; note = 2'-O-methyladenosine-3'-phosphate
  modified_base 16: mod_base = OTHER; note = 2'-deoxy-2'-fluoroadenosine-3'-phosphate
  modified_base 17: mod_base = OTHER; note = 2'-O-methyluridine-3'-phosphate
  modified_base 18: mod_base = OTHER; note = 2'-O-methyluridine-3'-phosphate
  modified_base 19: mod_base = OTHER; note = 2'-O-methyluridine-3'-phosphate
  modified_base 20: mod_base = OTHER; note = 2'-O-methylguanosine-3'-phosphate
  modified_base 21: mod_base = OTHER; note = 2'-O-methylguanosine-3'-phosphorothioate
  modified_base 22: mod_base = OTHER; note = 2'-O-methyladenosine-3'-phosphorothioate
  modified_base 23: mod_base = OTHER; note = 2'-O-methyladenosine
tgttctagtttggaaatttggaa

SEQ ID NO: 1005 - RNA, 23 nt, synthetic construct
  source 1..23: mol_type = other RNA
  modified_base 1: mod_base = OTHER; note = 2'-O-methyluridine-3'-phosphorothioate 5'-(E)-Vinylphosphonate
  modified_base 2: mod_base = OTHER; note = 2'-deoxy-2'-fluorocytidine-3'-phosphorothioate
  modified_base 3: mod_base = OTHER; note = 2'-O-methyluridine-3'-phosphate
  modified_base 4: mod_base = OTHER; note = 2'-O-methyluridine-3'-phosphate
  modified_base 5: mod_base = OTHER; note = 2'-O-methylcytidine-3'-phosphate
  modified_base 6: mod_base = OTHER; note = 2'-deoxy-2'-fluorouridine-3'-phosphate
  modified_base 7: mod_base = OTHER; note = 2'-O-methyluridine-3'-phosphate
  modified_base 8: mod_base = OTHER; note = 2'-O-methylcytidine-3'-phosphate
  modified_base 9: mod_base = OTHER; note = 2'-O-methyladenosine-3'-phosphate
  modified_base 10: mod_base = OTHER; note = 2'-O-methylguanosine-3'-phosphate
  modified_base 11: mod_base = OTHER; note = 2'-O-methylguanosine-3'-phosphate
  modified_base 12: mod_base = OTHER; note = 2'-O-methyluridine-3'-phosphate
  modified_base 13: mod_base = OTHER; note = 2'-O-methyluridine-3'-phosphate
  modified_base 14: mod_base = OTHER; note = 2'-deoxy-2'-fluorocytidine-3'-phosphate
  modified_base 15: mod_base = OTHER; note = 2'-O-methyluridine-3'-phosphate
  modified_base 16: mod_base = OTHER; note = 2'-deoxy-2'-fluorouridine-3'-phosphate
  modified_base 17: mod_base = OTHER; note = 2'-O-methylguanosine-3'-phosphate
  modified_base 18: mod_base = OTHER; note = 2'-O-methyluridine-3'-phosphate
  modified_base 19: mod_base = OTHER; note = 2'-O-methyluridine-3'-phosphate
  modified_base 20: mod_base = OTHER; note = 2'-O-methyluridine-3'-phosphate
  modified_base 21: mod_base = OTHER; note = 2'-O-methylguanosine-3'-phosphorothioate
  modified_base 22: mod_base = OTHER; note = 2'-O-methylguanosine-3'-phosphorothioate
  modified_base 23: mod_base = OTHER; note = 2'-O-methyladenosine
tcttcttcaggttcttgtttgga

SEQ ID NO: 1006 - RNA, 23 nt, synthetic construct
  source 1..23: mol_type = other RNA
  modified_base 1: mod_base = OTHER; note = 2'-O-methyluridine-3'-phosphorothioate 5'-(E)-Vinylphosphonate
  modified_base 2: mod_base = OTHER; note = 2'-deoxy-2'-fluorouridine-3'-phosphorothioate
  modified_base 3: mod_base = OTHER; note = 2'-O-methylcytidine-3'-phosphate
  modified_base 4: mod_base = OTHER; note = 2'-O-methyluridine-3'-phosphate
  modified_base 5: mod_base = OTHER; note = 2'-O-methyluridine-3'-phosphate
  modified_base 6: mod_base = OTHER; note = 2'-deoxy-2'-fluorocytidine-3'-phosphate
  modified_base 7: mod_base = OTHER; note = 2'-O-methyluridine-3'-phosphate
  modified_base 8: mod_base = OTHER; note = 2'-O-methyluridine-3'-phosphate
  modified_base 9: mod_base = OTHER; note = 2'-O-methylcytidine-3'-phosphate
  modified_base 10: mod_base = OTHER; note = 2'-O-methyladenosine-3'-phosphate
  modified_base 11: mod_base = OTHER; note = 2'-O-methylguanosine-3'-phosphate
  modified_base 12: mod_base = OTHER; note = 2'-O-methylguanosine-3'-phosphate
  modified_base 13: mod_base = OTHER; note = 2'-O-methyluridine-3'-phosphate
  modified_base 14: mod_base = OTHER; note = 2'-deoxy-2'-fluorouridine-3'-phosphate
  modified_base 15: mod_base = OTHER; note = 2'-O-methylcytidine-3'-phosphate
  modified_base 16: mod_base = OTHER; note = 2'-deoxy-2'-fluorouridine-3'-phosphate
  modified_base 17: mod_base = OTHER; note = 2'-O-methyluridine-3'-phosphate
  modified_base 18: mod_base = OTHER; note = 2'-O-methylguanosine-3'-phosphate
  modified_base 19: mod_base = OTHER; note = 2'-O-methyluridine-3'-phosphate
  modified_base 20: mod_base = OTHER; note = 2'-O-methyluridine-3'-phosphate
  modified_base 21: mod_base = OTHER; note = 2'-O-methyluridine-3'-phosphorothioate
  modified_base 22: mod_base = OTHER; note = 2'-O-methylguanosine-3'-phosphorothioate
  modified_base 23: mod_base = OTHER; note = 2'-O-methylguanosine
ttcttcttcaggttcttgtttgg

SEQ ID NO: 1007 - RNA, 23 nt, synthetic construct
  source 1..23: mol_type = other RNA
  modified_base 1: mod_base = OTHER; note = 2'-O-methyluridine-3'-phosphorothioate 5'-(E)-Vinylphosphonate
  modified_base 2: mod_base = OTHER; note = 2'-deoxy-2'-fluorouridine-3'-phosphorothioate
  modified_base 3: mod_base = OTHER; note = 2'-O-methylcytidine-3'-phosphate
  modified_base 4: mod_base = OTHER; note = 2'-O-methyluridine-3'-phosphate
  modified_base 5: mod_base = OTHER; note = 2'-O-methyluridine-3'-phosphate
  modified_base 6: mod_base = OTHER; note = 2'-deoxy-2'-fluorocytidine-3'-phosphate
  modified_base 7: mod_base = OTHER; note = 2'-O-methyladenosine-3'-phosphate
  modified_base 8: mod_base = OTHER; note = 2'-O-methyluridine-3'-phosphate
  modified_base 9: mod_base = OTHER; note = 2'-O-methylcytidine-3'-phosphate
  modified_base 10: mod_base = OTHER; note = 2'-O-methyladenosine-3'-phosphate
  modified_base 11: mod_base = OTHER; note = 2'-O-methylguanosine-3'-phosphate
  modified_base 12: mod_base = OTHER; note = 2'-O-methylguanosine-3'-phosphate
  modified_base 13: mod_base = OTHER; note = 2'-O-methyluridine-3'-phosphate
  modified_base 14: mod_base = OTHER; note = 2'-deoxy-2'-fluorouridine-3'-phosphate
  modified_base 15: mod_base = OTHER; note = 2'-O-methylcytidine-3'-phosphate
  modified_base 16: mod_base = OTHER; note = 2'-deoxy-2'-fluorouridine-3'-phosphate
  modified_base 17: mod_base = OTHER; note = 2'-O-methyluridine-3'-phosphate
  modified_base 18: mod_base = OTHER; note = 2'-O-methylguanosine-3'-phosphate
  modified_base 19: mod_base = OTHER; note = 2'-O-methyluridine-3'-phosphate
  modified_base 20: mod_base = OTHER; note = 2'-O-methyluridine-3'-phosphate
  modified_base 21: mod_base = OTHER; note = 2'-O-methyluridine-3'-phosphorothioate
  modified_base 22: mod_base = OTHER; note = 2'-O-methylguanosine-3'-phosphorothioate
  modified_base 23: mod_base = OTHER; note = 2'-O-methylguanosine
ttcttcatcaggttcttgtttgg

SEQ ID NO: 1008 - RNA, 23 nt, synthetic construct
  source 1..23: mol_type = other RNA
  modified_base 1: mod_base = OTHER; note = 2'-O-methyluridine-3'-phosphorothioate 5'-(E)-Vinylphosphonate
  modified_base 2: mod_base = OTHER; note = 2'-deoxy-2'-fluorouridine-3'-phosphorothioate
  modified_base 3: mod_base = OTHER; note = 2'-O-methyluridine-3'-phosphate
  modified_base 4: mod_base = OTHER; note = 2'-O-methylcytidine-3'-phosphate
  modified_base 5: mod_base = OTHER; note = 2'-O-methyluridine-3'-phosphate
  modified_base 6: mod_base = OTHER; note = 2'-deoxy-2'-fluorouridine-3'-phosphate
  modified_base 7: mod_base = OTHER; note = 2'-O-methylcytidine-3'-phosphate
  modified_base 8: mod_base = OTHER; note = 2'-O-methyluridine-3'-phosphate
  modified_base 9: mod_base = OTHER; note = 2'-O-methyluridine-3'-phosphate
  modified_base 10: mod_base = OTHER; note = 2'-O-methylcytidine-3'-phosphate
  modified_base 11: mod_base = OTHER; note = 2'-O-methyladenosine-3'-phosphate
  modified_base 12: mod_base = OTHER; note = 2'-O-methylguanosine-3'-phosphate
  modified_base 13: mod_base = OTHER; note = 2'-O-methylguanosine-3'-phosphate
  modified_base 14: mod_base = OTHER; note = 2'-deoxy-2'-fluorouridine-3'-phosphate
  modified_base 15: mod_base = OTHER; note = 2'-O-methyluridine-3'-phosphate
  modified_base 16: mod_base = OTHER; note = 2'-deoxy-2'-fluorocytidine-3'-phosphate
  modified_base 17: mod_base = OTHER; note = 2'-O-methyluridine-3'-phosphate
  modified_base 18: mod_base = OTHER; note = 2'-O-methyluridine-3'-phosphate
  modified_base 19: mod_base = OTHER; note = 2'-O-methylguanosine-3'-phosphate
  modified_base 20: mod_base = OTHER; note = 2'-O-methyluridine-3'-phosphate
  modified_base 21: mod_base = OTHER; note = 2'-O-methyluridine-3'-phosphorothioate
  modified_base 22: mod_base = OTHER; note = 2'-O-methyluridine-3'-phosphorothioate
  modified_base 23: mod_base = OTHER; note = 2'-O-methylguanosine
tttcttcttcaggttcttgtttg

SEQ ID NO: 1009 - RNA, 23 nt, synthetic construct
  source 1..23: mol_type = other RNA
  modified_base 1: mod_base = OTHER; note = 2'-O-methyluridine-3'-phosphorothioate 5'-(E)-Vinylphosphonate
  modified_base 2: mod_base = OTHER; note = 2'-deoxy-2'-fluorouridine-3'-phosphorothioate
  modified_base 3: mod_base = OTHER; note = 2'-O-methyluridine-3'-phosphate
  modified_base 4: mod_base = OTHER; note = 2'-O-methylcytidine-3'-phosphate
  modified_base 5: mod_base = OTHER; note = 2'-O-methyluridine-3'-phosphate
  modified_base 6: mod_base = OTHER; note = 2'-deoxy-2'-fluorouridine-3'-phosphate
  modified_base 7: mod_base = OTHER; note = 2'-O-methyladenosine-3'-phosphate
  modified_base 8: mod_base = OTHER; note = 2'-O-methyluridine-3'-phosphate
  modified_base 9: mod_base = OTHER; note = 2'-O-methyluridine-3'-phosphate
  modified_base 10: mod_base = OTHER; note = 2'-O-methylcytidine-3'-phosphate
  modified_base 11: mod_base = OTHER; note = 2'-O-methyladenosine-3'-phosphate
  modified_base 12: mod_base = OTHER; note = 2'-O-methylguanosine-3'-phosphate
  modified_base 13: mod_base = OTHER; note = 2'-O-methylguanosine-3'-phosphate
  modified_base 14: mod_base = OTHER; note = 2'-deoxy-2'-fluorouridine-3'-phosphate
  modified_base 15: mod_base = OTHER; note = 2'-O-methyluridine-3'-phosphate
  modified_base 16: mod_base = OTHER; note = 2'-deoxy-2'-fluorocytidine-3'-phosphate
  modified_base 17: mod_base = OTHER; note = 2'-O-methyluridine-3'-phosphate
  modified_base 18: mod_base = OTHER; note = 2'-O-methyluridine-3'-phosphate
  modified_base 19: mod_base = OTHER; note = 2'-O-methylguanosine-3'-phosphate
  modified_base 20: mod_base = OTHER; note = 2'-O-methyluridine-3'-phosphate
  modified_base 21: mod_base = OTHER; note = 2'-O-methyluridine-3'-phosphorothioate
  modified_base 22: mod_base = OTHER; note = 2'-O-methyluridine-3'-phosphorothioate
  modified_base 23: mod_base = OTHER; note = 2'-O-methylguanosine
tttcttattcaggttcttgtttg

SEQ ID NO: 1010 - RNA, 23 nt, synthetic construct
  source 1..23: mol_type = other RNA
  modified_base 1: mod_base = OTHER; note = 2'-O-methyluridine-3'-phosphorothioate 5'-(E)-Vinylphosphonate
  modified_base 2: mod_base = OTHER; note = 2'-deoxy-2'-fluoroadenosine-3'-phosphorothioate
  modified_base 3: mod_base = OTHER; note = 2'-O-methyladenosine-3'-phosphate
  modified_base 4: mod_base = OTHER; note = 2'-O-methyluridine-3'-phosphate
  modified_base 5: mod_base = OTHER; note = 2'-O-methyluridine-3'-phosphate
  modified_base 6: mod_base = OTHER; note = 2'-deoxy-2'-fluorocytidine-3'-phosphate
  modified_base 7: mod_base = OTHER; note = 2'-O-methyluridine-3'-phosphate
  modified_base 8: mod_base = OTHER; note = 2'-O-methyluridine-3'-phosphate
  modified_base 9: mod_base = OTHER; note = 2'-O-methylcytidine-3'-phosphate
  modified_base 10: mod_base = OTHER; note = 2'-O-methyluridine-3'-phosphate
  modified_base 11: mod_base = OTHER; note = 2'-O-methyluridine-3'-phosphate
  modified_base 12: mod_base = OTHER; note = 2'-O-methylcytidine-3'-phosphate
  modified_base 13: mod_base = OTHER; note = 2'-O-methyladenosine-3'-phosphate
  modified_base 14: mod_base = OTHER; note = 2'-deoxy-2'-fluoroguanosine-3'-phosphate
  modified_base 15: mod_base = OTHER; note = 2'-O-methylguanosine-3'-phosphate
  modified_base 16: mod_base = OTHER; note = 2'-deoxy-2'-fluorouridine-3'-phosphate
  modified_base 17: mod_base = OTHER; note = 2'-O-methyluridine-3'-phosphate
  modified_base 18: mod_base = OTHER; note = 2'-O-methylcytidine-3'-phosphate
  modified_base 19: mod_base = OTHER; note = 2'-O-methyluridine-3'-phosphate
  modified_base 20: mod_base = OTHER; note = 2'-O-methyluridine-3'-phosphate
  modified_base 21: mod_base = OTHER; note = 2'-O-methylguanosine-3'-phosphorothioate
  modified_base 22: mod_base = OTHER; note = 2'-O-methyluridine-3'-phosphorothioate
  modified_base 23: mod_base = OTHER; note = 2'-O-methyluridine
taattcttcttcaggttcttgtt

SEQ ID NO: 1011 - RNA, 23 nt, synthetic construct
  source 1..23: mol_type = other RNA
  modified_base 1: mod_base = OTHER; note = 2'-O-methyluridine-3'-phosphorothioate 5'-(E)-Vinylphosphonate
  modified_base 2: mod_base = OTHER; note = 2'-deoxy-2'-fluoroadenosine-3'-phosphorothioate
  modified_base 3: mod_base = OTHER; note = 2'-O-methyladenosine-3'-phosphate
  modified_base 4: mod_base = OTHER; note = 2'-O-methyluridine-3'-phosphate
  modified_base 5: mod_base = OTHER; note = 2'-O-methyluridine-3'-phosphate
  modified_base 6: mod_base = OTHER; note = 2'-deoxy-2'-fluorocytidine-3'-phosphate
  modified_base 7: mod_base = OTHER; note = 2'-O-methyladenosine-3'-phosphate
  modified_base 8: mod_base = OTHER; note = 2'-O-methyluridine-3'-phosphate
  modified_base 9: mod_base = OTHER; note = 2'-O-methylcytidine-3'-phosphate
  modified_base 10: mod_base = OTHER; note = 2'-O-methyluridine-3'-phosphate
  modified_base 11: mod_base = OTHER; note = 2'-O-methyluridine-3'-phosphate
  modified_base 12: mod_base = OTHER; note = 2'-O-methylcytidine-3'-phosphate
  modified_base 13: mod_base = OTHER; note = 2'-O-methyladenosine-3'-phosphate
  modified_base 14: mod_base = OTHER; note = 2'-deoxy-2'-fluoroguanosine-3'-phosphate
  modified_base 15: mod_base = OTHER; note = 2'-O-methylguanosine-3'-phosphate
  modified_base 16: mod_base = OTHER; note = 2'-deoxy-2'-fluorouridine-3'-phosphate
  modified_base 17: mod_base = OTHER; note = 2'-O-methyluridine-3'-phosphate
  modified_base 18: mod_base = OTHER; note = 2'-O-methylcytidine-3'-phosphate
  modified_base 19: mod_base = OTHER; note = 2'-O-methyluridine-3'-phosphate
  modified_base 20: mod_base = OTHER; note = 2'-O-methyluridine-3'-phosphate
  modified_base 21: mod_base = OTHER; note = 2'-O-methylguanosine-3'-phosphorothioate
  modified_base 22: mod_base = OTHER; note = 2'-O-methyluridine-3'-phosphorothioate
  modified_base 23: mod_base = OTHER; note = 2'-O-methyluridine
taattcatcttcaggttcttgtt

SEQ ID NO: 1012 - RNA, 23 nt, synthetic construct
  source 1..23: mol_type = other RNA
  modified_base 1: mod_base = OTHER; note = 2'-O-methyluridine-3'-phosphorothioate 5'-(E)-Vinylphosphonate
  modified_base 2: mod_base = OTHER; note = 2'-deoxy-2'-fluoroguanosine-3'-phosphorothioate
  modified_base 3: mod_base = OTHER; note = 2'-O-methyluridine-3'-phosphate
  modified_base 4: mod_base = OTHER; note = 2'-O-methyladenosine-3'-phosphate
  modified_base 5: mod_base = OTHER; note = 2'-O-methyladenosine-3'-phosphate
  modified_base 6: mod_base = OTHER; note = 2'-deoxy-2'-fluorouridine-3'-phosphate
  modified_base 7: mod_base = OTHER; note = 2'-O-methyluridine-3'-phosphate
  modified_base 8: mod_base = OTHER; note = 2'-O-methylcytidine-3'-phosphate
  modified_base 9: mod_base = OTHER; note = 2'-O-methyluridine-3'-phosphate
  modified_base 10: mod_base = OTHER; note = 2'-O-methyluridine-3'-phosphate
  modified_base 11: mod_base = OTHER; note = 2'-O-methylcytidine-3'-phosphate
  modified_base 12: mod_base = OTHER; note = 2'-O-methyluridine-3'-phosphate
  modified_base 13: mod_base = OTHER; note = 2'-O-methyluridine-3'-phosphate
  modified_base 14: mod_base = OTHER; note = 2'-deoxy-2'-fluorocytidine-3'-phosphate
  modified_base 15: mod_base = OTHER; note = 2'-O-methyladenosine-3'-phosphate
  modified_base 16: mod_base = OTHER; note = 2'-deoxy-2'-fluoroguanosine-3'-phosphate
  modified_base 17: mod_base = OTHER; note = 2'-O-methylguanosine-3'-phosphate
  modified_base 18: mod_base = OTHER; note = 2'-O-methyluridine-3'-phosphate
  modified_base 19: mod_base = OTHER; note = 2'-O-methyluridine-3'-phosphate
  modified_base 20: mod_base = OTHER; note = 2'-O-methylcytidine-3'-phosphate
  modified_base 21: mod_base = OTHER; note = 2'-O-methyluridine-3'-phosphorothioate
  modified_base 22: mod_base = OTHER; note = 2'-O-methyluridine-3'-phosphorothioate
  modified_base 23: mod_base = OTHER; note = 2'-O-methylguanosine
tgtaattcttcttcaggttcttg

SEQ ID NO: 1013 - RNA, 23 nt, synthetic construct
  source 1..23: mol_type = other RNA
  modified_base 1: mod_base = OTHER; note = 2'-O-methyluridine-3'-phosphorothioate 5'-(E)-Vinylphosphonate
  modified_base 2: mod_base = OTHER; note = 2'-deoxy-2'-fluoroadenosine-3'-phosphorothioate
  modified_base 3: mod_base = OTHER; note = 2'-O-methylguanosine-3'-phosphate
  modified_base 4: mod_base = OTHER; note = 2'-O-methyluridine-3'-phosphate
  modified_base 5: mod_base = OTHER; note = 2'-O-methyladenosine-3'-phosphate
  modified_base 6: mod_base = OTHER; note = 2'-deoxy-2'-fluoroadenosine-3'-phosphate
  modified_base 7: mod_base = OTHER; note = 2'-O-methyluridine-3'-phosphate
  modified_base 8: mod_base = OTHER; note = 2'-O-methyluridine-3'-phosphate
  modified_base 9: mod_base = OTHER; note = 2'-O-methylcytidine-3'-phosphate
  modified_base 10: mod_base = OTHER; note = 2'-O-methyluridine-3'-phosphate
  modified_base 11: mod_base = OTHER; note = 2'-O-methyluridine-3'-phosphate
  modified_base 12: mod_base = OTHER; note = 2'-O-methylcytidine-3'-phosphate
  modified_base 13: mod_base = OTHER; note = 2'-O-methyluridine-3'-phosphate
  modified_base 14: mod_base = OTHER; note = 2'-deoxy-2'-fluorouridine-3'-phosphate
  modified_base 15: mod_base = OTHER; note = 2'-O-methylcytidine-3'-phosphate
  modified_base 16: mod_base = OTHER; note = 2'-deoxy-2'-fluoroadenosine-3'-phosphate
  modified_base 17: mod_base = OTHER; note = 2'-O-methylguanosine-3'-phosphate
  modified_base 18: mod_base = OTHER; note = 2'-O-methylguanosine-3'-phosphate
  modified_base 19: mod_base = OTHER; note = 2'-O-methyluridine-3'-phosphate
  modified_base 20: mod_base = OTHER; note = 2'-O-methyluridine-3'-phosphate
  modified_base 21: mod_base = OTHER; note = 2'-O-methylcytidine-3'-phosphorothioate
  modified_base 22: mod_base = OTHER; note = 2'-O-methyluridine-3'-phosphorothioate
  modified_base 23: mod_base = OTHER; note = 2'-O-methyluridine
tagtaattcttcttcaggttctt

SEQ ID NO: 1014 - RNA, 23 nt, synthetic construct
  source 1..23: mol_type = other RNA
  modified_base 1: mod_base = OTHER; note = 2'-O-methyluridine-3'-phosphorothioate 5'-(E)-Vinylphosphonate
  modified_base 2: mod_base = OTHER; note = 2'-deoxy-2'-fluorocytidine-3'-phosphorothioate
  modified_base 3: mod_base = OTHER; note = 2'-O-methyladenosine-3'-phosphate
  modified_base 4: mod_base = OTHER; note = 2'-O-methylguanosine-3'-phosphate
  modified_base 5: mod_base = OTHER; note = 2'-O-methyluridine-3'-phosphate
  modified_base 6: mod_base = OTHER; note = 2'-deoxy-2'-fluoroadenosine-3'-phosphate
  modified_base 7: mod_base = OTHER; note = 2'-O-methyladenosine-3'-phosphate
  modified_base 8: mod_base = OTHER; note = 2'-O-methyluridine-3'-phosphate
  modified_base 9: mod_base = OTHER; note = 2'-O-methyluridine-3'-phosphate
  modified_base 10: mod_base = OTHER; note = 2'-O-methylcytidine-3'-phosphate
  modified_base 11: mod_base = OTHER; note = 2'-O-methyluridine-3'-phosphate
  modified_base 12: mod_base = OTHER; note = 2'-O-methyluridine-3'-phosphate
  modified_base 13: mod_base = OTHER; note = 2'-O-methylcytidine-3'-phosphate
  modified_base 14: mod_base = OTHER; note = 2'-deoxy-2'-fluorouridine-3'-phosphate
  modified_base 15: mod_base = OTHER; note = 2'-O-methyluridine-3'-phosphate
  modified_base 16: mod_base = OTHER; note = 2'-deoxy-2'-fluorocytidine-3'-phosphate
  modified_base 17: mod_base = OTHER; note = 2'-O-methyladenosine-3'-phosphate
  modified_base 18: mod_base = OTHER; note = 2'-O-methylguanosine-3'-phosphate
  modified_base 19: mod_base = OTHER; note = 2'-O-methylguanosine-3'-phosphate
  modified_base 20: mod_base = OTHER; note = 2'-O-methyluridine-3'-phosphate
  modified_base 21: mod_base = OTHER; note = 2'-O-methyluridine-3'-phosphorothioate
  modified_base 22: mod_base = OTHER; note = 2'-O-methylcytidine-3'-phosphorothioate
  modified_base 23: mod_base = OTHER; note = 2'-O-methyluridine
tcagtaattcttcttcaggttct

SEQ ID NO: 1015 - RNA, 23 nt, synthetic construct
  source 1..23: mol_type = other RNA
  modified_base 1: mod_base = OTHER; note = 2'-O-methyluridine-3'-phosphorothioate 5'-(E)-Vinylphosphonate
  modified_base 2: mod_base = OTHER; note = 2'-deoxy-2'-fluoroadenosine-3'-phosphorothioate
  modified_base 3: mod_base = OTHER; note = 2'-O-methylcytidine-3'-phosphate
  modified_base 4: mod_base = OTHER; note = 2'-O-methylcytidine-3'-phosphate
  modified_base 5: mod_base = OTHER; note = 2'-O-methyladenosine-3'-phosphate
  modified_base 6: mod_base = OTHER; note = 2'-deoxy-2'-fluoroguanosine-3'-phosphate
  modified_base 7: mod_base = OTHER; note = 2'-O-methyladenosine-3'-phosphate
  modified_base 8: mod_base = OTHER; note = 2'-O-methyladenosine-3'-phosphate
  modified_base 9: mod_base = OTHER; note = 2'-O-methylguanosine-3'-phosphate
  modified_base 10: mod_base = OTHER; note = 2'-O-methyladenosine-3'-phosphate
  modified_base 11: mod_base = OTHER; note = 2'-O-methyluridine-3'-phosphate
  modified_base 12: mod_base = OTHER; note = 2'-O-methylguanosine-3'-phosphate
  modified_base 13: mod_base = OTHER; note = 2'-O-methylguanosine-3'-phosphate
  modified_base 14: mod_base = OTHER; note = 2'-deoxy-2'-fluorouridine-3'-phosphate
  modified_base 15: mod_base = OTHER; note = 2'-O-methylguanosine-3'-phosphate
  modified_base 16: mod_base = OTHER; note = 2'-deoxy-2'-fluoroguanosine-3'-phosphate
  modified_base 17: mod_base = OTHER; note = 2'-O-methyladenosine-3'-phosphate
  modified_base 18: mod_base = OTHER; note = 2'-O-methylguanosine-3'-phosphate
  modified_base 19: mod_base = OTHER; note = 2'-O-methylguanosine-3'-phosphate
  modified_base 20: mod_base = OTHER; note = 2'-O-methyluridine-3'-phosphate
  modified_base 21: mod_base = OTHER; note = 2'-O-methylguanosine-3'-phosphorothioate
  modified_base 22: mod_base = OTHER; note = 2'-O-methyluridine-3'-phosphorothioate
  modified_base 23: mod_base = OTHER; note = 2'-O-methyluridine
taccagaagatggtggaggtgtt

SEQ ID NO: 1016 - RNA, 23 nt, synthetic construct
  source 1..23: mol_type = other RNA
  modified_base 1: mod_base = OTHER; note = 2'-O-methyluridine-3'-phosphorothioate 5'-(E)-Vinylphosphonate
  modified_base 2: mod_base = OTHER; note = 2'-deoxy-2'-fluoroguanosine-3'-phosphorothioate
  modified_base 3: mod_base = OTHER; note = 2'-O-methylguanosine-3'-phosphate
  modified_base 4: mod_base = OTHER; note = 2'-O-methyladenosine-3'-phosphate
  modified_base 5: mod_base = OTHER; note = 2'-O-methylcytidine-3'-phosphate
  modified_base 6: mod_base = OTHER; note = 2'-deoxy-2'-fluorocytidine-3'-phosphate
  modified_base 7: mod_base = OTHER; note = 2'-O-methyladenosine-3'-phosphate
  modified_base 8: mod_base = OTHER; note = 2'-O-methylguanosine-3'-phosphate
  modified_base 9: mod_base = OTHER; note = 2'-O-methyladenosine-3'-phosphate
  modified_base 10: mod_base = OTHER; note = 2'-O-methyladenosine-3'-phosphate
  modified_base 11: mod_base = OTHER; note = 2'-O-methylguanosine-3'-phosphate
  modified_base 12: mod_base = OTHER; note = 2'-O-methyladenosine-3'-phosphate
  modified_base 13: mod_base = OTHER; note = 2'-O-methyluridine-3'-phosphate
  modified_base 14: mod_base = OTHER; note = 2'-deoxy-2'-fluoroguanosine-3'-phosphate
  modified_base 15: mod_base = OTHER; note = 2'-O-methylguanosine-3'-phosphate
  modified_base 16: mod_base = OTHER; note = 2'-deoxy-2'-fluorouridine-3'-phosphate
  modified_base 17: mod_base = OTHER; note = 2'-O-methylguanosine-3'-phosphate
  modified_base 18: mod_base = OTHER; note = 2'-O-methylguanosine-3'-phosphate
  modified_base 19: mod_base = OTHER; note = 2'-O-methyladenosine-3'-phosphate
  modified_base 20: mod_base = OTHER; note = 2'-O-methylguanosine-3'-phosphate
  modified_base 21: mod_base = OTHER; note = 2'-O-methylguanosine-3'-phosphorothioate
  modified_base 22: mod_base = OTHER; note = 2'-O-methyluridine-3'-phosphorothioate
  modified_base 23: mod_base = OTHER; note = 2'-O-methylguanosine
tggaccagaagatggtggaggtg

SEQ ID NO: 1017 - RNA, 23 nt, synthetic construct
  source 1..23: mol_type = other RNA
  modified_base 1: mod_base = OTHER; note = 2'-O-methyluridine-3'-phosphorothioate 5'-(E)-Vinylphosphonate
  modified_base 2: mod_base = OTHER; note = 2'-deoxy-2'-fluoroguanosine-3'-phosphorothioate
  modified_base 3: mod_base = OTHER; note = 2'-O-methylguanosine-3'-phosphate
  modified_base 4: mod_base = OTHER; note = 2'-O-methyladenosine-3'-phosphate
  modified_base 5: mod_base = OTHER; note = 2'-O-methylcytidine-3'-phosphate
  modified_base 6: mod_base = OTHER; note = 2'-deoxy-2'-fluoroadenosine-3'-phosphate
  modified_base 7: mod_base = OTHER; note = 2'-O-methyladenosine-3'-phosphate
  modified_base 8: mod_base = OTHER; note = 2'-O-methylguanosine-3'-phosphate
  modified_base 9: mod_base = OTHER; note = 2'-O-methyladenosine-3'-phosphate
  modified_base 10: mod_base = OTHER; note = 2'-O-methyladenosine-3'-phosphate
  modified_base 11: mod_base = OTHER; note = 2'-O-methylguanosine-3'-phosphate
  modified_base 12: mod_base = OTHER; note = 2'-O-methyladenosine-3'-phosphate
  modified_base 13: mod_base = OTHER; note = 2'-O-methyluridine-3'-phosphate
  modified_base 14: mod_base = OTHER; note = 2'-deoxy-2'-fluoroguanosine-3'-phosphate
  modified_base 15: mod_base = OTHER; note = 2'-O-methylguanosine-3'-phosphate
  modified_base 16: mod_base = OTHER; note = 2'-deoxy-2'-fluorouridine-3'-phosphate
  modified_base 17: mod_base = OTHER; note = 2'-O-methylguanosine-3'-phosphate
  modified_base 18: mod_base = OTHER; note = 2'-O-methylguanosine-3'-phosphate
  modified_base 19: mod_base = OTHER; note = 2'-O-methyladenosine-3'-phosphate
  modified_base 20: mod_base = OTHER; note = 2'-O-methylguanosine-3'-phosphate
  modified_base 21: mod_base = OTHER; note = 2'-O-methylguanosine-3'-phosphorothioate
  modified_base 22: mod_base = OTHER; note = 2'-O-methyluridine-3'-phosphorothioate
  modified_base 23: mod_base = OTHER; note = 2'-O-methylguanosine
tggacaagaagatggtggaggtg

SEQ ID NO: 1018 - RNA, 23 nt, synthetic construct
  source 1..23: mol_type = other RNA
  modified_base 1: mod_base = OTHER; note = 2'-O-methyluridine-3'-phosphorothioate 5'-(E)-Vinylphosphonate
  modified_base 2: mod_base = OTHER; note = 2'-deoxy-2'-fluoroguanosine-3'-phosphorothioate
  modified_base 3: mod_base = OTHER; note = 2'-O-methylguanosine-3'-phosphate
  modified_base 4: mod_base = OTHER; note = 2'-O-methylguanosine-3'-phosphate
  modified_base 5: mod_base = OTHER; note = 2'-O-methyladenosine-3'-phosphate
  modified_base 6: mod_base = OTHER; note = 2'-deoxy-2'-fluorocytidine-3'-phosphate
  modified_base 7: mod_base = OTHER; note = 2'-O-methylcytidine-3'-phosphate
  modified_base 8: mod_base = OTHER; note = 2'-O-methyladenosine-3'-phosphate
  modified_base 9: mod_base = OTHER; note = 2'-O-methylguanosine-3'-phosphate
  modified_base 10: mod_base = OTHER; note = 2'-O-methyladenosine-3'-phosphate
  modified_base 11: mod_base = OTHER; note = 2'-O-methyladenosine-3'-phosphate
  modified_base 12: mod_base = OTHER; note = 2'-O-methylguanosine-3'-phosphate
  modified_base 13: mod_base = OTHER; note = 2'-O-methyladenosine-3'-phosphate
  modified_base 14: mod_base = OTHER; note = 2'-deoxy-2'-fluorouridine-3'-phosphate
  modified_base 15: mod_base = OTHER; note = 2'-O-methylguanosine-3'-phosphate
  modified_base 16: mod_base = OTHER; note = 2'-deoxy-2'-fluoroguanosine-3'-phosphate
  modified_base 17: mod_base = OTHER; note = 2'-O-methyluridine-3'-phosphate
  modified_base 18: mod_base = OTHER; note = 2'-O-methylguanosine-3'-phosphate
  modified_base 19: mod_base = OTHER; note = 2'-O-methylguanosine-3'-phosphate
  modified_base 20: mod_base = OTHER; note = 2'-O-methyladenosine-3'-phosphate
  modified_base 21: mod_base = OTHER; note = 2'-O-methylguanosine-3'-phosphorothioate
  modified_base 22: mod_base = OTHER; note = 2'-O-methylguanosine-3'-phosphorothioate
  modified_base 23: mod_base = OTHER; note = 2'-O-methyluridine
tgggaccagaagatggtggaggt

SEQ ID NO: 1019 - RNA, 23 nt, synthetic construct
  source 1..23: mol_type = other RNA
  modified_base 1: mod_base = OTHER; note = 2'-O-methyluridine-3'-phosphorothioate 5'-(E)-Vinylphosphonate
  modified_base 2: mod_base = OTHER; note = 2'-deoxy-2'-fluoroguanosine-3'-phosphorothioate
  modified_base 3: mod_base = OTHER; note = 2'-O-methylguanosine-3'-phosphate
  modified_base 4: mod_base = OTHER; note = 2'-O-methylguanosine-3'-phosphate
  modified_base 5: mod_base = OTHER; note = 2'-O-methyladenosine-3'-phosphate
  modified_base 6: mod_base = OTHER; note = 2'-deoxy-2'-fluorocytidine-3'-phosphate
  modified_base 7: mod_base = OTHER; note = 2'-O-methyladenosine-3'-phosphate
  modified_base 8: mod_base = OTHER; note = 2'-O-methyladenosine-3'-phosphate
  modified_base 9: mod_base = OTHER; note = 2'-O-methylguanosine-3'-phosphate
  modified_base 10: mod_base = OTHER; note = 2'-O-methyladenosine-3'-phosphate
  modified_base 11: mod_base = OTHER; note = 2'-O-methyladenosine-3'-phosphate
  modified_base 12: mod_base = OTHER; note = 2'-O-methylguanosine-3'-phosphate
  modified_base 13: mod_base = OTHER; note = 2'-O-methyladenosine-3'-phosphate
  modified_base 14: mod_base = OTHER; note = 2'-deoxy-2'-fluorouridine-3'-phosphate
  modified_base 15: mod_base = OTHER; note = 2'-O-methylguanosine-3'-phosphate
  modified_base 16: mod_base = OTHER; note = 2'-deoxy-2'-fluoroguanosine-3'-phosphate
  modified_base 17: mod_base = OTHER; note = 2'-O-methyluridine-3'-phosphate
  modified_base 18: mod_base = OTHER; note = 2'-O-methylguanosine-3'-phosphate
  modified_base 19: mod_base = OTHER; note = 2'-O-methylguanosine-3'-phosphate
  modified_base 20: mod_base = OTHER; note = 2'-O-methyladenosine-3'-phosphate
  modified_base 21: mod_base = OTHER; note = 2'-O-methylguanosine-3'-phosphorothioate
  modified_base 22: mod_base = OTHER; note = 2'-O-methylguanosine-3'-phosphorothioate
  modified_base 23: mod_base = OTHER; note = 2'-O-methyluridine
tgggacaagaagatggtggaggt

SEQ ID NO: 1020 - RNA, 23 nt, synthetic construct
  source 1..23: mol_type = other RNA
  modified_base 1: mod_base = OTHER; note = 2'-O-methyluridine-3'-phosphorothioate 5'-(E)-Vinylphosphonate
  modified_base 2: mod_base = OTHER; note = 2'-deoxy-2'-fluorouridine-3'-phosphorothioate
  modified_base 3: mod_base = OTHER; note = 2'-O-methyluridine-3'-phosphate
  modified_base 4: mod_base = OTHER; note = 2'-O-methyluridine-3'-phosphate
  modified_base 5: mod_base = OTHER; note = 2'-O-methyluridine-3'-phosphate
  modified_base 6: mod_base = OTHER; note = 2'-deoxy-2'-fluorocytidine-3'-phosphate
  modified_base 7: mod_base = OTHER; note = 2'-O-methyladenosine-3'-phosphate
  modified_base 8: mod_base = OTHER; note = 2'-O-methylcytidine-3'-phosphate
  modified_base 9: mod_base = OTHER; note = 2'-O-methylcytidine-3'-phosphate
  modified_base 10: mod_base = OTHER; note = 2'-O-methyluridine-3'-phosphate
  modified_base 11: mod_base = OTHER; note = 2'-O-methylguanosine-3'-phosphate
  modified_base 12: mod_base = OTHER; note = 2'-O-methyluridine-3'-phosphate
  modified_base 13: mod_base = OTHER; note = 2'-O-methyluridine-3'-phosphate
  modified_base 14: mod_base = OTHER; note = 2'-deoxy-2'-fluorocytidine-3'-phosphate
  modified_base 15: mod_base = OTHER; note = 2'-O-methylcytidine-3'-phosphate
  modified_base 16: mod_base = OTHER; note = 2'-deoxy-2'-fluorocytidine-3'-phosphate
  modified_base 17: mod_base = OTHER; note = 2'-O-methyluridine-3'-phosphate
  modified_base 18: mod_base = OTHER; note = 2'-O-methyluridine-3'-phosphate
  modified_base 19: mod_base = OTHER; note = 2'-O-methylcytidine-3'-phosphate
  modified_base 20: mod_base = OTHER; note = 2'-O-methyladenosine-3'-phosphate
  modified_base 21: mod_base = OTHER; note = 2'-O-methylguanosine-3'-phosphorothioate
  modified_base 22: mod_base = OTHER; note = 2'-O-methyladenosine-3'-phosphorothioate
  modified_base 23: mod_base = OTHER; note = 2'-O-methylcytidine
tttttcacctgttcccttcagac

SEQ ID NO: 1021 - RNA, 23 nt, synthetic construct
  source 1..23: mol_type = other RNA
  modified_base 1: mod_base = OTHER; note = 2'-O-methyluridine-3'-phosphorothioate 5'-(E)-Vinylphosphonate
  modified_base 2: mod_base = OTHER; note = 2'-deoxy-2'-fluorouridine-3'-phosphorothioate
  modified_base 3: mod_base = OTHER; note = 2'-O-methyluridine-3'-phosphate
  modified_base 4: mod_base = OTHER; note = 2'-O-methyluridine-3'-phosphate
  modified_base 5: mod_base = OTHER; note = 2'-O-methyluridine-3'-phosphate
  modified_base 6: mod_base = OTHER; note = 2'-deoxy-2'-fluoroadenosine-3'-phosphate
  modified_base 7: mod_base = OTHER; note = 2'-O-methyladenosine-3'-phosphate
  modified_base 8: mod_base = OTHER; note = 2'-O-methylcytidine-3'-phosphate
  modified_base 9: mod_base = OTHER; note = 2'-O-methylcytidine-3'-phosphate
  modified_base 10: mod_base = OTHER; note = 2'-O-methyluridine-3'-phosphate
  modified_base 11: mod_base = OTHER; note = 2'-O-methylguanosine-3'-phosphate
  modified_base 12: mod_base = OTHER; note = 2'-O-methyluridine-3'-phosphate
  modified_base 13: mod_base = OTHER; note = 2'-O-methyluridine-3'-phosphate
  modified_base 14: mod_base = OTHER; note = 2'-deoxy-2'-fluorocytidine-3'-phosphate
  modified_base 15: mod_base = OTHER; note = 2'-O-methylcytidine-3'-phosphate
  modified_base 16: mod_base = OTHER; note = 2'-deoxy-2'-fluorocytidine-3'-phosphate
  modified_base 17: mod_base = OTHER; note = 2'-O-methyluridine-3'-phosphate
  modified_base 18: mod_base = OTHER; note = 2'-O-methyluridine-3'-phosphate
  modified_base 19: mod_base = OTHER; note = 2'-O-methylcytidine-3'-phosphate
  modified_base 20: mod_base = OTHER; note = 2'-O-methyladenosine-3'-phosphate
  modified_base 21: mod_base = OTHER; note = 2'-O-methylguanosine-3'-phosphorothioate
  modified_base 22: mod_base = OTHER; note = 2'-O-methyladenosine-3'-phosphorothioate
  modified_base 23: mod_base = OTHER; note = 2'-O-methylcytidine
tttttaacctgttcccttcagac

SEQ ID NO: 1022 - RNA, 23 nt, synthetic construct
  source 1..23: mol_type = other RNA
  modified_base 1: mod_base = OTHER; note = 2'-O-methyluridine-3'-phosphorothioate 5'-(E)-Vinylphosphonate
  modified_base 2: mod_base = OTHER; note = 2'-deoxy-2'-fluoroadenosine-3'-phosphorothioate
  modified_base 3: mod_base = OTHER; note = 2'-O-methylguanosine-3'-phosphate
  modified_base 4: mod_base = OTHER; note = 2'-O-methyluridine-3'-phosphate
  modified_base 5: mod_base = OTHER; note = 2'-O-methyluridine-3'-phosphate
  modified_base 6: mod_base = OTHER; note = 2'-deoxy-2'-fluorouridine-3'-phosphate
  modified_base 7: mod_base = OTHER; note = 2'-O-methyluridine-3'-phosphate
  modified_base 8: mod_base = OTHER; note = 2'-O-methylcytidine-3'-phosphate
  modified_base 9: mod_base = OTHER; note = 2'-O-methyluridine-3'-phosphate
  modified_base 10: mod_base = OTHER; note = 2'-O-methylguanosine-3'-phosphate
  modified_base 11: mod_base = OTHER; note = 2'-O-methylguanosine-3'-phosphate
  modified_base 12: mod_base = OTHER; note = 2'-O-methyluridine-3'-phosphate
  modified_base 13: mod_base = OTHER; note = 2'-O-methylguanosine-3'-phosphate
  modified_base 14: mod_base = OTHER; note = 2'-deoxy-2'-fluorouridine-3'-phosphate
  modified_base 15: mod_base = OTHER; note = 2'-O-methylcytidine-3'-phosphate
  modified_base 16: mod_base = OTHER; note = 2'-deoxy-2'-fluorocytidine-3'-phosphate
  modified_base 17: mod_base = OTHER; note = 2'-O-methyluridine-3'-phosphate
  modified_base 18: mod_base = OTHER; note = 2'-O-methylguanosine-3'-phosphate
  modified_base 19: mod_base = OTHER; note = 2'-O-methyluridine-3'-phosphate
  modified_base 20: mod_base = OTHER; note = 2'-O-methyluridine-3'-phosphate
  modified_base 21: mod_base = OTHER; note = 2'-O-methyladenosine-3'-phosphorothioate
  modified_base 22: mod_base = OTHER; note = 2'-O-methyluridine-3'-phosphorothioate
  modified_base 23: mod_base = OTHER; note = 2'-O-methylguanosine
tagttttctggtgtcctgttatg

SEQ ID NO: 1023 - RNA, 23 nt, synthetic construct
  source 1..23: mol_type = other RNA
  modified_base 1: mod_base = OTHER; note = 2'-O-methyluridine-3'-phosphorothioate 5'-(E)-Vinylphosphonate
  modified_base 2: mod_base = OTHER; note = 2'-deoxy-2'-fluoroadenosine-3'-phosphorothioate
  modified_base 3: mod_base = OTHER; note = 2'-O-methyladenosine-3'-phosphate
  modified_base 4: mod_base = OTHER; note = 2'-O-methylguanosine-3'-phosphate
  modified_base 5: mod_base = OTHER; note = 2'-O-methyluridine-3'-phosphate
  modified_base 6: mod_base = OTHER; note = 2'-deoxy-2'-fluorouridine-3'-phosphate
  modified_base 7: mod_base = OTHER; note = 2'-O-methyluridine-3'-phosphate
  modified_base 8: mod_base = OTHER; note = 2'-O-methyluridine-3'-phosphate
  modified_base 9: mod_base = OTHER; note = 2'-O-methylcytidine-3'-phosphate
  modified_base 10: mod_base = OTHER; note = 2'-O-methyluridine-3'-phosphate
  modified_base 11: mod_base = OTHER; note = 2'-O-methylguanosine-3'-phosphate
  modified_base 12: mod_base = OTHER; note = 2'-O-methylguanosine-3'-phosphate
  modified_base 13: mod_base = OTHER; note = 2'-O-methyluridine-3'-phosphate
  modified_base 14: mod_base = OTHER; note = 2'-deoxy-2'-fluoroguanosine-3'-phosphate
  modified_base 15: mod_base = OTHER; note = 2'-O-methyluridine-3'-phosphate
  modified_base 16: mod_base = OTHER; note = 2'-deoxy-2'-fluorocytidine-3'-phosphate
  modified_base 17: mod_base = OTHER; note = 2'-O-methylcytidine-3'-phosphate
  modified_base 18: mod_base = OTHER; note = 2'-O-methyluridine-3'-phosphate
  modified_base 19: mod_base = OTHER; note = 2'-O-methylguanosine-3'-phosphate
  modified_base 20: mod_base = OTHER; note = 2'-O-methyluridine-3'-phosphate
  modified_base 21: mod_base = OTHER; note = 2'-O-methyluridine-3'-phosphorothioate
  modified_base 22: mod_base = OTHER; note = 2'-O-methyladenosine-3'-phosphorothioate
  modified_base 23: mod_base = OTHER; note = 2'-O-methyluridine
taagttttctggtgtcctgttat

SEQ ID NO: 1024 - RNA, 23 nt, synthetic construct
  source 1..23: mol_type = other RNA
  modified_base 1: mod_base = OTHER; note = 2'-O-methyluridine-3'-phosphorothioate 5'-(E)-Vinylphosphonate
  modified_base 2: mod_base = OTHER; note = 2'-deoxy-2'-fluorouridine-3'-phosphorothioate
  modified_base 3: mod_base = OTHER; note = 2'-O-methyluridine-3'-phosphate
  modified_base 4: mod_base = OTHER; note = 2'-O-methylcytidine-3'-phosphate
  modified_base 5: mod_base = OTHER; note = 2'-O-methyladenosine-3'-phosphate
  modified_base 6: mod_base = OTHER; note = 2'-deoxy-2'-fluorouridine-3'-phosphate
  modified_base 7: mod_base = OTHER; note = 2'-O-methyladenosine-3'-phosphate
  modified_base 8: mod_base = OTHER; note = 2'-O-methylcytidine-3'-phosphate
  modified_base 9: mod_base = OTHER; note = 2'-O-methyladenosine-3'-phosphate
  modified_base 10: mod_base = OTHER; note = 2'-O-methyladenosine-3'-phosphate
  modified_base 11: mod_base = OTHER; note = 2'-O-methyladenosine-3'-phosphate
  modified_base 12: mod_base = OTHER; note = 2'-O-methyluridine-3'-phosphate
  modified_base 13: mod_base = OTHER; note = 2'-O-methyluridine-3'-phosphate
  modified_base 14: mod_base = OTHER; note = 2'-deoxy-2'-fluorouridine-3'-phosphate
  modified_base 15: mod_base = OTHER; note = 2'-O-methyluridine-3'-phosphate
  modified_base 16: mod_base = OTHER; note = 2'-deoxy-2'-fluorouridine-3'-phosphate
  modified_base 17: mod_base = OTHER; note = 2'-O-methylguanosine-3'-phosphate
  modified_base 18: mod_base = OTHER; note = 2'-O-methylcytidine-3'-phosphate
  modified_base 19: mod_base = OTHER; note = 2'-O-methyladenosine-3'-phosphate
  modified_base 20: mod_base = OTHER; note = 2'-O-methylguanosine-3'-phosphate
  modified_base 21: mod_base = OTHER; note = 2'-O-methylguanosine-3'-phosphorothioate
  modified_base 22: mod_base = OTHER; note = 2'-O-methylguanosine-3'-phosphorothioate
  modified_base 23: mod_base = OTHER; note = 2'-O-methylguanosine
tttcatacaaatttttgcagggg

SEQ ID NO: 1025 - RNA, 23 nt, synthetic construct
  source 1..23: mol_type = other RNA
  modified_base 1: mod_base = OTHER; note = 2'-O-methyluridine-3'-phosphorothioate 5'-(E)-Vinylphosphonate
  modified_base 2: mod_base = OTHER; note = 2'-deoxy-2'-fluorouridine-3'-phosphorothioate
  modified_base 3: mod_base = OTHER; note = 2'-O-methyluridine-3'-phosphate
  modified_base 4: mod_base = OTHER; note = 2'-O-methylcytidine-3'-phosphate
  modified_base 5: mod_base = OTHER; note = 2'-O-methyladenosine-3'-phosphate
  modified_base 6: mod_base = OTHER; note = 2'-deoxy-2'-fluorouridine-3'-phosphate
  modified_base 7: mod_base = OTHER; note = 2'-O-methylcytidine-3'-phosphate
  modified_base 8: mod_base = OTHER; note = 2'-O-methylcytidine-3'-phosphate
  modified_base 9: mod_base = OTHER; note = 2'-O-methyladenosine-3'-phosphate
  modified_base 10: mod_base = OTHER; note = 2'-O-methyladenosine-3'-phosphate
  modified_base 11: mod_base = OTHER; note = 2'-O-methyladenosine-3'-phosphate
  modified_base 12: mod_base = OTHER; note = 2'-O-methyluridine-3'-phosphate
  modified_base 13: mod_base = OTHER; note = 2'-O-methyluridine-3'-phosphate
  modified_base 14: mod_base = OTHER; note = 2'-deoxy-2'-fluorouridine-3'-phosphate
  modified_base 15: mod_base = OTHER; note = 2'-O-methyluridine-3'-phosphate
  modified_base 16: mod_base = OTHER; note = 2'-deoxy-2'-fluorouridine-3'-phosphate
  modified_base 17: mod_base = OTHER; note = 2'-O-methylguanosine-3'-phosphate
  modified_base 18: mod_base = OTHER; note = 2'-O-methylcytidine-3'-phosphate
  modified_base 19: mod_base = OTHER; note = 2'-O-methyladenosine-3'-phosphate
  modified_base 20: mod_base = OTHER; note = 2'-O-methylguanosine-3'-phosphate
  modified_base 21: mod_base = OTHER; note = 2'-O-methylguanosine-3'-phosphorothioate
  modified_base 22: mod_base = OTHER; note = 2'-O-methylguanosine-3'-phosphorothioate
  modified_base 23: mod_base = OTHER; note = 2'-O-methylguanosine
tttcatccaaatttttgcagggg

SEQ ID NO: 1026 - RNA, 23 nt, synthetic construct
  source 1..23: mol_type = other RNA
  modified_base 1: mod_base = OTHER; note = 2'-O-methyluridine-3'-phosphorothioate 5'-(E)-Vinylphosphonate
  modified_base 2: mod_base = OTHER; note = 2'-deoxy-2'-fluorouridine-3'-phosphorothioate
  modified_base 3: mod_base = OTHER; note = 2'-O-methyluridine-3'-phosphate
  modified_base 4: mod_base = OTHER; note = 2'-O-methyluridine-3'-phosphate
  modified_base 5: mod_base = OTHER; note = 2'-O-methylcytidine-3'-phosphate
  modified_base 6: mod_base = OTHER; note = 2'-deoxy-2'-fluoroadenosine-3'-phosphate
  modified_base 7: mod_base = OTHER; note = 2'-O-methyluridine-3'-phosphate
  modified_base 8: mod_base = OTHER; note = 2'-O-methylcytidine-3'-phosphate
  modified_base 9: mod_base = OTHER; note = 2'-O-methylcytidine-3'-phosphate
  modified_base 10: mod_base = OTHER; note = 2'-O-methyladenosine-3'-phosphate
  modified_base 11: mod_base = OTHER; note = 2'-O-methyladenosine-3'-phosphate
  modified_base 12: mod_base = OTHER; note = 2'-O-methyladenosine-3'-phosphate
  modified_base 13: mod_base = OTHER; note = 2'-O-methyluridine-3'-phosphate
  modified_base 14: mod_base = OTHER; note = 2'-deoxy-2'-fluorouridine-3'-phosphate
  modified_base 15: mod_base = OTHER; note = 2'-O-methyluridine-3'-phosphate
  modified_base 16: mod_base = OTHER; note = 2'-deoxy-2'-fluorouridine-3'-phosphate
  modified_base 17: mod_base = OTHER; note = 2'-O-methyluridine-3'-phosphate
  modified_base 18: mod_base = OTHER; note = 2'-O-methylguanosine-3'-phosphate
  modified_base 19: mod_base = OTHER; note = 2'-O-methylcytidine-3'-phosphate
  modified_base 20: mod_base = OTHER; note = 2'-O-methyladenosine-3'-phosphate
  modified_base 21: mod_base = OTHER; note = 2'-O-methylguanosine-3'-phosphorothioate
  modified_base 22: mod_base = OTHER; note = 2'-O-methylguanosine-3'-phosphorothioate
  modified_base 23: mod_base = OTHER; note = 2'-O-methylguanosine
ttttcatccaaatttttgcaggg

SEQ ID NO: 1027 - RNA, 23 nt, synthetic construct
  source 1..23: mol_type = other RNA
  modified_base 1: mod_base = OTHER; note = 2'-O-methyluridine-3'-phosphorothioate 5'-(E)-Vinylphosphonate
  modified_base 2: mod_base = OTHER; note = 2'-deoxy-2'-fluorouridine-3'-phosphorothioate
  modified_base 3: mod_base = OTHER; note = 2'-O-methyluridine-3'-phosphate
  modified_base 4: mod_base = OTHER; note = 2'-O-methyluridine-3'-phosphate
  modified_base 5: mod_base = OTHER; note = 2'-O-methylcytidine-3'-phosphate
  modified_base 6: mod_base = OTHER; note = 2'-deoxy-2'-fluoroadenosine-3'-phosphate
  modified_base 7: mod_base = OTHER; note = 2'-O-methyladenosine-3'-phosphate
  modified_base 8: mod_base = OTHER; note = 2'-O-methylcytidine-3'-phosphate
  modified_base 9: mod_base = OTHER; note = 2'-O-methylcytidine-3'-phosphate
  modified_base 10: mod_base = OTHER; note = 2'-O-methyladenosine-3'-phosphate
  modified_base 11: mod_base = OTHER; note = 2'-O-methyladenosine-3'-phosphate
  modified_base 12: mod_base = OTHER; note = 2'-O-methyladenosine-3'-phosphate
  modified_base 13: mod_base = OTHER; note = 2'-O-methyluridine-3'-phosphate
  modified_base 14: mod_base = OTHER; note = 2'-deoxy-2'-fluorouridine-3'-phosphate
  modified_base 15: mod_base = OTHER; note = 2'-O-methyluridine-3'-phosphate
  modified_base 16: mod_base = OTHER; note = 2'-deoxy-2'-fluorouridine-3'-phosphate
  modified_base 17: mod_base = OTHER; note = 2'-O-methyluridine-3'-phosphate
  modified_base 18: mod_base = OTHER; note = 2'-O-methylguanosine-3'-phosphate
  modified_base 19: mod_base = OTHER; note = 2'-O-methylcytidine-3'-phosphate
  modified_base 20: mod_base = OTHER; note = 2'-O-methyladenosine-3'-phosphate
  modified_base 21: mod_base = OTHER; note = 2'-O-methylguanosine-3'-phosphorothioate
  modified_base 22: mod_base = OTHER; note = 2'-O-methylguanosine-3'-phosphorothioate
  modified_base 23: mod_base = OTHER; note = 2'-O-methylguanosine
ttttcaaccaaatttttgcaggg

SEQ ID NO: 1028 - RNA, 23 nt, synthetic construct
  source 1..23: mol_type = other RNA
  modified_base 1: mod_base = OTHER; note = 2'-O-methyluridine-3'-phosphorothioate 5'-(E)-Vinylphosphonate
  modified_base 2: mod_base = OTHER; note = 2'-deoxy-2'-fluorouridine-3'-phosphorothioate
  modified_base 3: mod_base = OTHER; note = 2'-O-methyluridine-3'-phosphate
  modified_base 4: mod_base = OTHER; note = 2'-O-methyluridine-3'-phosphate
  modified_base 5: mod_base = OTHER; note = 2'-O-methyluridine-3'-phosphate
  modified_base 6: mod_base = OTHER; note = 2'-deoxy-2'-fluorocytidine-3'-phosphate
  modified_base 7: mod_base = OTHER; note = 2'-O-methyladenosine-3'-phosphate
  modified_base 8: mod_base = OTHER; note = 2'-O-methyluridine-3'-phosphate
  modified_base 9: mod_base = OTHER; note = 2'-O-methylcytidine-3'-phosphate
  modified_base 10: mod_base = OTHER; note = 2'-O-methylcytidine-3'-phosphate
  modified_base 11: mod_base = OTHER; note = 2'-O-methyladenosine-3'-phosphate
  modified_base 12: mod_base = OTHER; note = 2'-O-methyladenosine-3'-phosphate
  modified_base 13: mod_base = OTHER; note = 2'-O-methyladenosine-3'-phosphate
  modified_base 14: mod_base = OTHER; note = 2'-deoxy-2'-fluorouridine-3'-phosphate
  modified_base 15: mod_base = OTHER; note = 2'-O-methyluridine-3'-phosphate
  modified_base 16: mod_base = OTHER; note = 2'-deoxy-2'-fluorouridine-3'-phosphate
  modified_base 17: mod_base = OTHER; note = 2'-O-methyluridine-3'-phosphate
  modified_base 18: mod_base = OTHER; note = 2'-O-methyluridine-3'-phosphate
  modified_base 19: mod_base = OTHER; note = 2'-O-methylguanosine-3'-phosphate
  modified_base 20: mod_base = OTHER; note = 2'-O-methylcytidine-3'-phosphate
  modified_base 21: mod_base = OTHER; note = 2'-O-methyladenosine-3'-phosphorothioate
  modified_base 22: mod_base = OTHER; note = 2'-O-methylguanosine-3'-phosphorothioate
  modified_base 23: mod_base = OTHER; note = 2'-O-methylguanosine
tttttcatccaaatttttgcagg

SEQ ID NO: 1029 - RNA, 23 nt, synthetic construct
  source 1..23: mol_type = other RNA
  modified_base 1: mod_base = OTHER; note = 2'-O-methyluridine-3'-phosphorothioate 5'-(E)-Vinylphosphonate
  modified_base 2: mod_base = OTHER; note = 2'-deoxy-2'-fluorouridine-3'-phosphorothioate
  modified_base 3: mod_base = OTHER; note = 2'-O-methyluridine-3'-phosphate
  modified_base 4: mod_base = OTHER; note = 2'-O-methyluridine-3'-phosphate
  modified_base 5: mod_base = OTHER; note = 2'-O-methyluridine-3'-phosphate
  modified_base 6: mod_base = OTHER; note = 2'-deoxy-2'-fluoroadenosine-3'-phosphate
  modified_base 7: mod_base = OTHER; note = 2'-O-methyladenosine-3'-phosphate
  modified_base 8: mod_base = OTHER; note = 2'-O-methyluridine-3'-phosphate
  modified_base 9: mod_base = OTHER; note = 2'-O-methylcytidine-3'-phosphate
  modified_base 10: mod_base = OTHER; note = 2'-O-methylcytidine-3'-phosphate
  modified_base 11: mod_base = OTHER; note = 2'-O-methyladenosine-3'-phosphate
  modified_base 12: mod_base = OTHER; note = 2'-O-methyladenosine-3'-phosphate
  modified_base 13: mod_base = OTHER; note = 2'-O-methyladenosine-3'-phosphate
  modified_base 14: mod_base = OTHER; note = 2'-deoxy-2'-fluorouridine-3'-phosphate
  modified_base 15: mod_base = OTHER; note = 2'-O-methyluridine-3'-phosphate
  modified_base 16: mod_base = OTHER; note = 2'-deoxy-2'-fluorouridine-3'-phosphate
  modified_base 17: mod_base = OTHER; note = 2'-O-methyluridine-3'-phosphate
  modified_base 18: mod_base = OTHER; note = 2'-O-methyluridine-3'-phosphate
  modified_base 19: mod_base = OTHER; note = 2'-O-methylguanosine-3'-phosphate
  modified_base 20: mod_base = OTHER; note = 2'-O-methylcytidine-3'-phosphate
  modified_base 21: mod_base = OTHER; note = 2'-O-methyladenosine-3'-phosphorothioate
  modified_base 22: mod_base = OTHER; note = 2'-O-methylguanosine-3'-phosphorothioate
  modified_base 23: mod_base = OTHER; note = 2'-O-methylguanosine
tttttaatccaaatttttgcagg

SEQ ID NO: 1030 - RNA, 23 nt, synthetic construct
  source 1..23: mol_type = other RNA
  modified_base 1: mod_base = OTHER; note = 2'-O-methyluridine-3'-phosphorothioate 5'-(E)-Vinylphosphonate
  modified_base 2: mod_base = OTHER; note = 2'-deoxy-2'-fluorouridine-3'-phosphorothioate
  modified_base 3: mod_base = OTHER; note = 2'-O-methyladenosine-3'-phosphate
  modified_base 4: mod_base = OTHER; note = 2'-O-methylguanosine-3'-phosphate
  modified_base 5: mod_base = OTHER; note = 2'-O-methyluridine-3'-phosphate
  modified_base 6: mod_base = OTHER; note = 2'-deoxy-2'-fluorouridine-3'-phosphate
  modified_base 7: mod_base = OTHER; note = 2'-O-methyluridine-3'-phosphate
  modified_base 8: mod_base = OTHER; note = 2'-O-methyluridine-3'-phosphate
  modified_base 9: mod_base = OTHER; note = 2'-O-methylcytidine-3'-phosphate
  modified_base 10: mod_base = OTHER; note = 2'-O-methyladenosine-3'-phosphate
  modified_base 11: mod_base = OTHER; note = 2'-O-methyluridine-3'-phosphate
  modified_base 12: mod_base = OTHER; note = 2'-O-methylcytidine-3'-phosphate
  modified_base 13: mod_base = OTHER; note = 2'-O-methylcytidine-3'-phosphate
  modified_base 14: mod_base = OTHER; note = 2'-deoxy-2'-fluoroadenosine-3'-phosphate
  modified_base 15: mod_base = OTHER; note = 2'-O-methyladenosine-3'-phosphate
  modified_base 16: mod_base = OTHER; note = 2'-deoxy-2'-fluoroadenosine-3'-phosphate
  modified_base 17: mod_base = OTHER; note = 2'-O-methyluridine-3'-phosphate
  modified_base 18: mod_base = OTHER; note = 2'-O-methyluridine-3'-phosphate
  modified_base 19: mod_base = OTHER; note = 2'-O-methyluridine-3'-phosphate
  modified_base 20: mod_base = OTHER; note = 2'-O-methyluridine-3'-phosphate
  modified_base 21: mod_base = OTHER; note = 2'-O-methyluridine-3'-phosphorothioate
  modified_base 22: mod_base = OTHER; note = 2'-O-methylguanosine-3'-phosphorothioate
  modified_base 23: mod_base = OTHER; note = 2'-O-methylcytidine
ttagttttcatccaaatttttgc

SEQ ID NO: 1031 - RNA, 23 nt, synthetic construct
  source 1..23: mol_type = other RNA
  modified_base 1: mod_base = OTHER; note = 2'-O-methyluridine-3'-phosphorothioate 5'-(E)-Vinylphosphonate
  modified_base 2: mod_base = OTHER; note = 2'-deoxy-2'-fluorocytidine-3'-phosphorothioate
  modified_base 3: mod_base = OTHER; note = 2'-O-methyladenosine-3'-phosphate
  modified_base 4: mod_base = OTHER; note = 2'-O-methylguanosine-3'-phosphate
  modified_base 5: mod_base = OTHER; note = 2'-O-methyluridine-3'-phosphate
  modified_base 6: mod_base = OTHER; note = 2'-deoxy-2'-fluoroadenosine-3'-phosphate
  modified_base 7: mod_base = OTHER; note = 2'-O-methylguanosine-3'-phosphate
  modified_base 8: mod_base = OTHER; note = 2'-O-methyluridine-3'-phosphate
  modified_base 9: mod_base = OTHER; note = 2'-O-methyluridine-3'-phosphate
  modified_base 10: mod_base = OTHER; note = 2'-O-methyluridine-3'-phosphate
  modified_base 11: mod_base = OTHER; note = 2'-O-methyluridine-3'-phosphate
  modified_base 12: mod_base = OTHER; note = 2'-O-methylcytidine-3'-phosphate
  modified_base 13: mod_base = OTHER; note = 2'-O-methyladenosine-3'-phosphate
  modified_base 14: mod_base = OTHER; note = 2'-deoxy-2'-fluorouridine-3'-phosphate
  modified_base 15: mod_base = OTHER; note = 2'-O-methylcytidine-3'-phosphate
  modified_base 16: mod_base = OTHER; note = 2'-deoxy-2'-fluorocytidine-3'-phosphate
  modified_base 17: mod_base = OTHER; note = 2'-O-methyladenosine-3'-phosphate
  modified_base 18: mod_base = OTHER; note = 2'-O-methyladenosine-3'-phosphate
  modified_base 19: mod_base = OTHER; note = 2'-O-methyladenosine-3'-phosphate
  modified_base 20: mod_base = OTHER; note = 2'-O-methyluridine-3'-phosphate
  modified_base 21: mod_base = OTHER; note = 2'-O-methyluridine-3'-phosphorothioate
  modified_base 22: mod_base = OTHER; note = 2'-O-methyluridine-3'-phosphorothioate
  modified_base 23: mod_base = OTHER; note = 2'-O-methyluridine
tcagtagttttcatccaaatttt

SEQ ID NO: 1032 - RNA, 23 nt, synthetic construct
  source 1..23: mol_type = other RNA
  modified_base 1: mod_base = OTHER; note = 2'-O-methyluridine-3'-phosphorothioate 5'-(E)-Vinylphosphonate
  modified_base 2: mod_base = OTHER; note = 2'-deoxy-2'-fluoroadenosine-3'-phosphorothioate
  modified_base 3: mod_base = OTHER; note = 2'-O-methyluridine-3'-phosphate
  modified_base 4: mod_base = OTHER; note = 2'-O-methylcytidine-3'-phosphate
  modified_base 5: mod_base = OTHER; note = 2'-O-methyluridine-3'-phosphate
  modified_base 6: mod_base = OTHER; note = 2'-deoxy-2'-fluorouridine-3'-phosphate
  modified_base 7: mod_base = OTHER; note = 2'-O-methyladenosine-3'-phosphate
  modified_base 8: mod_base = OTHER; note = 2'-O-methylcytidine-3'-phosphate
  modified_base 9: mod_base = OTHER; note = 2'-O-methyladenosine-3'-phosphate
  modified_base 10: mod_base = OTHER; note = 2'-O-methylguanosine-3'-phosphate
  modified_base 11: mod_base = OTHER; note = 2'-O-methyluridine-3'-phosphate
  modified_base 12: mod_base = OTHER; note = 2'-O-methyladenosine-3'-phosphate
  modified_base 13: mod_base = OTHER; note = 2'-O-methylcytidine-3'-phosphate
  modified_base 14: mod_base = OTHER; note = 2'-deoxy-2'-fluorouridine-3'-phosphate
  modified_base 15: mod_base = OTHER; note = 2'-O-methylcytidine-3'-phosphate
  modified_base 16: mod_base = OTHER; note = 2'-deoxy-2'-fluorocytidine-3'-phosphate
  modified_base 17: mod_base = OTHER; note = 2'-O-methylcytidine-3'-phosphate
  modified_base 18: mod_base = OTHER; note = 2'-O-methyladenosine-3'-phosphate
  modified_base 19: mod_base = OTHER; note = 2'-O-methylcytidine-3'-phosphate
  modified_base 20: mod_base = OTHER; note = 2'-O-methylcytidine-3'-phosphate
  modified_base 21: mod_base = OTHER; note = 2'-O-methylguanosine-3'-phosphorothioate
  modified_base 22: mod_base = OTHER; note = 2'-O-methylcytidine-3'-phosphorothioate
  modified_base 23: mod_base = OTHER; note = 2'-O-methyladenosine
tatcttacagtactcccaccgca

SEQ ID NO: 1033 - RNA, 23 nt, synthetic construct
  source 1..23: mol_type = other RNA
  modified_base 1: mod_base = OTHER; note = 2'-O-methyluridine-3'-phosphorothioate 5'-(E)-Vinylphosphonate
  modified_base 2: mod_base = OTHER; note = 2'-deoxy-2'-fluoroguanosine-3'-phosphorothioate
  modified_base 3: mod_base = OTHER; note = 2'-O-methyluridine-3'-phosphate
  modified_base 4: mod_base = OTHER; note = 2'-O-methyladenosine-3'-phosphate
  modified_base 5: mod_base = OTHER; note = 2'-O-methyluridine-3'-phosphate
  modified_base 6: mod_base = OTHER; note = 2'-deoxy-2'-fluorocytidine-3'-phosphate
  modified_base 7: mod_base = OTHER; note = 2'-O-methyluridine-3'-phosphate
  modified_base 8: mod_base = OTHER; note = 2'-O-methyluridine-3'-phosphate
  modified_base 9: mod_base = OTHER; note = 2'-O-methyladenosine-3'-phosphate
  modified_base 10: mod_base = OTHER; note = 2'-O-methylcytidine-3'-phosphate
  modified_base 11: mod_base = OTHER; note = 2'-O-methyladenosine-3'-phosphate
  modified_base 12: mod_base = OTHER; note = 2'-O-methylguanosine-3'-phosphate
  modified_base 13: mod_base = OTHER; note = 2'-O-methyluridine-3'-phosphate
  modified_base 14: mod_base = OTHER; note = 2'-deoxy-2'-fluoroadenosine-3'-phosphate
  modified_base 15: mod_base = OTHER; note = 2'-O-methylcytidine-3'-phosphate
  modified_base 16: mod_base = OTHER; note = 2'-deoxy-2'-fluorouridine-3'-phosphate
  modified_base 17: mod_base = OTHER; note = 2'-O-methylcytidine-3'-phosphate
  modified_base 18: mod_base = OTHER; note = 2'-O-methylcytidine-3'-phosphate
  modified_base 19: mod_base = OTHER; note = 2'-O-methylcytidine-3'-phosphate
  modified_base 20: mod_base = OTHER; note = 2'-O-methyladenosine-3'-phosphate
  modified_base 21: mod_base = OTHER; note = 2'-O-methylcytidine-3'-phosphorothioate
  modified_base 22: mod_base = OTHER; note = 2'-O-methylcytidine-3'-phosphorothioate
  modified_base 23: mod_base = OTHER; note = 2'-O-methylguanosine
tgtatcttacagtactcccaccg

SEQ ID NO: 1034 - RNA, 23 nt, synthetic construct
  source 1..23: mol_type = other RNA
  modified_base 1: mod_base = OTHER; note = 2'-O-methyluridine-3'-phosphorothioate 5'-(E)-Vinylphosphonate
  modified_base 2: mod_base = OTHER; note = 2'-deoxy-2'-fluoroguanosine-3'-phosphorothioate
  modified_base 3: mod_base = OTHER; note = 2'-O-methyluridine-3'-phosphate
  modified_base 4: mod_base = OTHER; note = 2'-O-methyladenosine-3'-phosphate
  modified_base 5: mod_base = OTHER; note = 2'-O-methyluridine-3'-phosphate
  modified_base 6: mod_base = OTHER; note = 2'-deoxy-2'-fluorocytidine-3'-phosphate
  modified_base 7: mod_base = OTHER; note = 2'-O-methyladenosine-3'-phosphate
  modified_base 8: mod_base = OTHER; note = 2'-O-methyluridine-3'-phosphate
  modified_base 9: mod_base = OTHER; note = 2'-O-methyladenosine-3'-phosphate
  modified_base 10: mod_base = OTHER; note = 2'-O-methylcytidine-3'-phosphate
  modified_base 11: mod_base = OTHER; note = 2'-O-methyladenosine-3'-phosphate
  modified_base 12: mod_base = OTHER; note = 2'-O-methylguanosine-3'-phosphate
  modified_base 13: mod_base = OTHER; note = 2'-O-methyluridine-3'-phosphate
  modified_base 14: mod_base = OTHER; note = 2'-deoxy-2'-fluoroadenosine-3'-phosphate
  modified_base 15: mod_base = OTHER; note = 2'-O-methylcytidine-3'-phosphate
  modified_base 16: mod_base = OTHER; note = 2'-deoxy-2'-fluorouridine-3'-phosphate
  modified_base 17: mod_base = OTHER; note = 2'-O-methylcytidine-3'-phosphate
  modified_base 18: mod_base = OTHER; note = 2'-O-methylcytidine-3'-phosphate
  modified_base 19: mod_base = OTHER; note = 2'-O-methylcytidine-3'-phosphate
  modified_base 20: mod_base = OTHER; note = 2'-O-methyladenosine-3'-phosphate
  modified_base 21: mod_base = OTHER; note = 2'-O-methylcytidine-3'-phosphorothioate
  modified_base 22: mod_base = OTHER; note = 2'-O-methylcytidine-3'-phosphorothioate
  modified_base 23: mod_base = OTHER; note = 2'-O-methylguanosine
tgtatcatacagtactcccaccg

SEQ ID NO: 1035 - RNA, 23 nt, synthetic construct
  source 1..23: mol_type = other RNA
  modified_base 1: mod_base = OTHER; note = 2'-O-methyluridine-3'-phosphorothioate 5'-(E)-Vinylphosphonate
  modified_base 2: mod_base = OTHER; note = 2'-deoxy-2'-fluoroguanosine-3'-phosphorothioate
  modified_base 3: mod_base = OTHER; note = 2'-O-methylguanosine-3'-phosphate
  modified_base 4: mod_base = OTHER; note = 2'-O-methyluridine-3'-phosphate
  modified_base 5: mod_base = OTHER; note = 2'-O-methyladenosine-3'-phosphate
  modified_base 6: mod_base = OTHER; note = 2'-deoxy-2'-fluorouridine-3'-phosphate
  modified_base 7: mod_base = OTHER; note = 2'-O-methylcytidine-3'-phosphate
  modified_base 8: mod_base = OTHER; note = 2'-O-methyluridine-3'-phosphate
  modified_base 9: mod_base = OTHER; note = 2'-O-methyluridine-3'-phosphate
  modified_base 10: mod_base = OTHER; note = 2'-O-methyladenosine-3'-phosphate
  modified_base 11: mod_base = OTHER; note = 2'-O-methylcytidine-3'-phosphate
  modified_base 12: mod_base = OTHER; note = 2'-O-methyladenosine-3'-phosphate
  modified_base 13: mod_base = OTHER; note = 2'-O-methylguanosine-3'-phosphate
  modified_base 14: mod_base = OTHER; note = 2'-deoxy-2'-fluorouridine-3'-phosphate
  modified_base 15: mod_base = OTHER; note = 2'-O-methyladenosine-3'-phosphate
  modified_base 16: mod_base = OTHER; note = 2'-deoxy-2'-fluorocytidine-3'-phosphate
  modified_base 17: mod_base = OTHER; note = 2'-O-methyluridine-3'-phosphate
  modified_base 18: mod_base = OTHER; note = 2'-O-methylcytidine-3'-phosphate
  modified_base 19: mod_base = OTHER; note = 2'-O-methylcytidine-3'-phosphate
  modified_base 20: mod_base = OTHER; note = 2'-O-methylcytidine-3'-phosphate
  modified_base 21: mod_base = OTHER; note = 2'-O-methyladenosine-3'-phosphorothioate
  modified_base 22: mod_base = OTHER; note = 2'-O-methylcytidine-3'-phosphorothioate
  modified_base 23: mod_base = OTHER; note = 2'-O-methylcytidine
tggtatcttacagtactcccacc

SEQ ID NO: 1036 - RNA, 23 nt, synthetic construct
  source 1..23: mol_type = other RNA
  modified_base 1: mod_base = OTHER; note = 2'-O-methyluridine-3'-phosphorothioate 5'-(E)-Vinylphosphonate
  modified_base 2: mod_base = OTHER; note = 2'-deoxy-2'-fluoroguanosine-3'-phosphorothioate
  modified_base 3: mod_base = OTHER; note = 2'-O-methylguanosine-3'-phosphate
  modified_base 4: mod_base = OTHER; note = 2'-O-methyluridine-3'-phosphate
  modified_base 5: mod_base = OTHER; note = 2'-O-methyladenosine-3'-phosphate
  modified_base 6: mod_base = OTHER; note = 2'-deoxy-2'-fluorouridine-3'-phosphate
  modified_base 7: mod_base = OTHER; note = 2'-O-methyladenosine-3'-phosphate
  modified_base 8: mod_base = OTHER; note = 2'-O-methyluridine-3'-phosphate
  modified_base 9: mod_base = OTHER; note = 2'-O-methyluridine-3'-phosphate
  modified_base 10: mod_base = OTHER; note = 2'-O-methyladenosine-3'-phosphate
  modified_base 11: mod_base = OTHER; note = 2'-O-methylcytidine-3'-phosphate
  modified_base 12: mod_base = OTHER; note = 2'-O-methyladenosine-3'-phosphate
  modified_base 13: mod_base = OTHER; note = 2'-O-methylguanosine-3'-phosphate
  modified_base 14: mod_base = OTHER; note = 2'-deoxy-2'-fluorouridine-3'-phosphate
  modified_base 15: mod_base = OTHER; note = 2'-O-methyladenosine-3'-phosphate
  modified_base 16: mod_base = OTHER; note = 2'-deoxy-2'-fluorocytidine-3'-phosphate
  modified_base 17: mod_base = OTHER; note = 2'-O-methyluridine-3'-phosphate
  modified_base 18: mod_base = OTHER; note = 2'-O-methylcytidine-3'-phosphate
  modified_base 19: mod_base = OTHER; note = 2'-O-methylcytidine-3'-phosphate
  modified_base 20: mod_base = OTHER; note = 2'-O-methylcytidine-3'-phosphate
  modified_base 21: mod_base = OTHER; note = 2'-O-methyladenosine-3'-phosphorothioate
  modified_base 22: mod_base = OTHER; note = 2'-O-methylcytidine-3'-phosphorothioate
  modified_base 23: mod_base = OTHER; note = 2'-O-methylcytidine
tggtatattacagtactcccacc

SEQ ID NO: 1037 - RNA, 23 nt, synthetic construct
  source 1..23: mol_type = other RNA
  modified_base 1: mod_base = OTHER; note = 2'-O-methyluridine-3'-phosphorothioate 5'-(E)-Vinylphosphonate
  modified_base 2: mod_base = OTHER; note = 2'-deoxy-2'-fluoroadenosine-3'-phosphorothioate
  modified_base 3: mod_base = OTHER; note = 2'-O-methylcytidine-3'-phosphate
  modified_base 4: mod_base = OTHER; note = 2'-O-methylguanosine-3'-phosphate
  modified_base 5: mod_base = OTHER; note = 2'-O-methylguanosine-3'-phosphate
  modified_base 6: mod_base = OTHER; note = 2'-deoxy-2'-fluorouridine-3'-phosphate
  modified_base 7: mod_base = OTHER; note = 2'-O-methyladenosine-3'-phosphate
  modified_base 8: mod_base = OTHER; note = 2'-O-methyluridine-3'-phosphate
  modified_base 9: mod_base = OTHER; note = 2'-O-methylcytidine-3'-phosphate
  modified_base 10: mod_base = OTHER; note = 2'-O-methyluridine-3'-phosphate
  modified_base 11: mod_base = OTHER; note = 2'-O-methyluridine-3'-phosphate
  modified_base 12: mod_base = OTHER; note = 2'-O-methyladenosine-3'-phosphate
  modified_base 13: mod_base = OTHER; note = 2'-O-methylcytidine-3'-phosphate
  modified_base 14: mod_base = OTHER; note = 2'-deoxy-2'-fluoroadenosine-3'-phosphate
  modified_base 15: mod_base = OTHER; note = 2'-O-methylguanosine-3'-phosphate
  modified_base 16: mod_base = OTHER; note = 2'-deoxy-2'-fluorouridine-3'-phosphate
  modified_base 17: mod_base = OTHER; note = 2'-O-methyladenosine-3'-phosphate
  modified_base 18: mod_base = OTHER; note = 2'-O-methylcytidine-3'-phosphate
  modified_base 19: mod_base = OTHER; note = 2'-O-methyluridine-3'-phosphate
  modified_base 20: mod_base = OTHER; note = 2'-O-methylcytidine-3'-phosphate
  modified_base 21: mod_base = OTHER; note = 2'-O-methylcytidine-3'-phosphorothioate
  modified_base 22: mod_base = OTHER; note = 2'-O-methylcytidine-3'-phosphorothioate
  modified_base 23: mod_base = OTHER; note = 2'-O-methyladenosine
tacggtatcttacagtactccca

SEQ ID NO: 1038 - RNA, 23 nt, synthetic construct
  source 1..23: mol_type = other RNA
  modified_base 1: mod_base = OTHER; note = 2'-O-methyluridine-3'-phosphorothioate 5'-(E)-Vinylphosphonate
  modified_base 2: mod_base = OTHER; note = 2'-deoxy-2'-fluorocytidine-3'-phosphorothioate
  modified_base 3: mod_base = OTHER; note = 2'-O-methyladenosine-3'-phosphate
  modified_base 4: mod_base = OTHER; note = 2'-O-methylcytidine-3'-phosphate
  modified_base 5: mod_base = OTHER; note = 2'-O-methyladenosine-3'-phosphate
  modified_base 6: mod_base = OTHER; note = 2'-deoxy-2'-fluoroguanosine-3'-phosphate
  modified_base 7: mod_base = OTHER; note = 2'-O-methylguanosine-3'-phosphate
  modified_base 8: mod_base = OTHER; note = 2'-O-methyladenosine-3'-phosphate
  modified_base 9: mod_base = OTHER; note = 2'-O-methylcytidine-3'-phosphate
  modified_base 10: mod_base = OTHER; note = 2'-O-methylguanosine-3'-phosphate
  modified_base 11: mod_base = OTHER; note = 2'-O-methylguanosine-3'-phosphate
  modified_base 12: mod_base = OTHER; note = 2'-O-methyluridine-3'-phosphate
  modified_base 13: mod_base = OTHER; note = 2'-O-methyladenosine-3'-phosphate
  modified_base 14: mod_base = OTHER; note = 2'-deoxy-2'-fluorouridine-3'-phosphate
  modified_base 15: mod_base = OTHER; note = 2'-O-methylcytidine-3'-phosphate
  modified_base 16: mod_base = OTHER; note = 2'-deoxy-2'-fluorouridine-3'-phosphate
  modified_base 17: mod_base = OTHER; note = 2'-O-methyluridine-3'-phosphate
  modified_base 18: mod_base = OTHER; note = 2'-O-methyladenosine-3'-phosphate
  modified_base 19: mod_base = OTHER; note = 2'-O-methylcytidine-3'-phosphate
  modified_base 20: mod_base = OTHER; note = 2'-O-methyladenosine-3'-phosphate
  modified_base 21: mod_base = OTHER; note = 2'-O-methylguanosine-3'-phosphorothioate
  modified_base 22: mod_base = OTHER; note = 2'-O-methyluridine-3'-phosphorothioate
  modified_base 23: mod_base = OTHER; note = 2'-O-methyladenosine
tcacaggacggtatcttacagta

SEQ ID NO: 1039 - RNA, 23 nt, synthetic construct
  source 1..23: mol_type = other RNA
  modified_base 1: mod_base = OTHER; note = 2'-O-methyluridine-3'-phosphorothioate 5'-(E)-Vinylphosphonate
  modified_base 2: mod_base = OTHER; note = 2'-deoxy-2'-fluorouridine-3'-phosphorothioate
  modified_base 3: mod_base = OTHER; note = 2'-O-methylcytidine-3'-phosphate
  modified_base 4: mod_base = OTHER; note = 2'-O-methyluridine-3'-phosphate
  modified_base 5: mod_base = OTHER; note = 2'-O-methyluridine-3'-phosphate
  modified_base 6: mod_base = OTHER; note = 2'-deoxy-2'-fluorouridine-3'-phosphate
  modified_base 7: mod_base = OTHER; note = 2'-O-methylcytidine-3'-phosphate
  modified_base 8: mod_base = OTHER; note = 2'-O-methylcytidine-3'-phosphate
  modified_base 9: mod_base = OTHER; note = 2'-O-methyluridine-3'-phosphate
  modified_base 10: mod_base = OTHER; note = 2'-O-methylguanosine-3'-phosphate
  modified_base 11: mod_base = OTHER; note = 2'-O-methyluridine-3'-phosphate
  modified_base 12: mod_base = OTHER; note = 2'-O-methylguanosine-3'-phosphate
  modified_base 13: mod_base = OTHER; note = 2'-O-methylguanosine-3'-phosphate
  modified_base 14: mod_base = OTHER; note = 2'-deoxy-2'-fluorouridine-3'-phosphate
  modified_base 15: mod_base = OTHER; note = 2'-O-methylguanosine-3'-phosphate
  modified_base 16: mod_base = OTHER; note = 2'-deoxy-2'-fluoroguanosine-3'-phosphate
  modified_base 17: mod_base = OTHER; note = 2'-O-methyluridine-3'-phosphate
  modified_base 18: mod_base = OTHER; note = 2'-O-methylguanosine-3'-phosphate
  modified_base 19: mod_base = OTHER; note = 2'-O-methylguanosine-3'-phosphate
  modified_base 20: mod_base = OTHER; note = 2'-O-methyluridine-3'-phosphate
  modified_base 21: mod_base = OTHER; note = 2'-O-methylguanosine-3'-phosphorothioate
  modified_base 22: mod_base = OTHER; note = 2'-O-methylguanosine-3'-phosphorothioate
  modified_base 23: mod_base = OTHER; note = 2'-O-methyladenosine
ttctttcctgtggtggtggtgga

SEQ ID NO: 1040 - RNA, 23 nt, synthetic construct
  source 1..23: mol_type = other RNA
  modified_base 1: mod_base = OTHER; note = 2'-O-methyluridine-3'-phosphorothioate 5'-(E)-Vinylphosphonate
  modified_base 2: mod_base = OTHER; note = 2'-deoxy-2'-fluorouridine-3'-phosphorothioate
  modified_base 3: mod_base = OTHER; note = 2'-O-methylcytidine-3'-phosphate
  modified_base 4: mod_base = OTHER; note = 2'-O-methyluridine-3'-phosphate
  modified_base 5: mod_base = OTHER; note = 2'-O-methyluridine-3'-phosphate
  modified_base 6: mod_base = OTHER; note = 2'-deoxy-2'-fluorouridine-3'-phosphate
  modified_base 7: mod_base = OTHER; note = 2'-O-methyladenosine-3'-phosphate
  modified_base 8: mod_base = OTHER; note = 2'-O-methylcytidine-3'-phosphate
  modified_base 9: mod_base = OTHER; note = 2'-O-methyluridine-3'-phosphate
  modified_base 10: mod_base = OTHER; note = 2'-O-methylguanosine-3'-phosphate
  modified_base 11: mod_base = OTHER; note = 2'-O-methyluridine-3'-phosphate
  modified_base 12: mod_base = OTHER; note = 2'-O-methylguanosine-3'-phosphate
  modified_base 13: mod_base = OTHER; note = 2'-O-methylguanosine-3'-phosphate
  modified_base 14: mod_base = OTHER; note = 2'-deoxy-2'-fluorouridine-3'-phosphate
  modified_base 15: mod_base = OTHER; note = 2'-O-methylguanosine-3'-phosphate
  modified_base 16: mod_base = OTHER; note = 2'-deoxy-2'-fluoroguanosine-3'-phosphate
  modified_base 17: mod_base = OTHER; note = 2'-O-methyluridine-3'-phosphate
  modified_base 18: mod_base = OTHER; note = 2'-O-methylguanosine-3'-phosphate
  modified_base 19: mod_base = OTHER; note = 2'-O-methylguanosine-3'-phosphate
  modified_base 20: mod_base = OTHER; note = 2'-O-methyluridine-3'-phosphate
  modified_base 21: mod_base = OTHER; note = 2'-O-methylguanosine-3'-phosphorothioate
  modified_base 22: mod_base = OTHER; note = 2'-O-methylguanosine-3'-phosphorothioate
  modified_base 23: mod_base = OTHER; note = 2'-O-methyladenosine
ttctttactgtggtggtggtgga

SEQ ID NO: 1041 - RNA, 23 nt, synthetic construct
  source 1..23: mol_type = other RNA
  modified_base 1: mod_base = OTHER; note = 2'-O-methyluridine-3'-phosphorothioate 5'-(E)-Vinylphosphonate
  modified_base 2: mod_base = OTHER; note = 2'-deoxy-2'-fluoroguanosine-3'-phosphorothioate
  modified_base 3: mod_base = OTHER; note = 2'-O-methyladenosine-3'-phosphate
  modified_base 4: mod_base = OTHER; note = 2'-O-methylcytidine-3'-phosphate
  modified_base 5: mod_base = OTHER; note = 2'-O-methyladenosine-3'-phosphate
  modified_base 6: mod_base = OTHER; note = 2'-deoxy-2'-fluorocytidine-3'-phosphate
  modified_base 7: mod_base = OTHER; note = 2'-O-methyluridine-3'-phosphate
  modified_base 8: mod_base = OTHER; note = 2'-O-methyluridine-3'-phosphate
  modified_base 9: mod_base = OTHER; note = 2'-O-methylcytidine-3'-phosphate
  modified_base 10: mod_base = OTHER; note = 2'-O-methyluridine-3'-phosphate
  modified_base 11: mod_base = OTHER; note = 2'-O-methyluridine-3'-phosphate
  modified_base 12: mod_base = OTHER; note = 2'-O-methyluridine-3'-phosphate
  modified_base 13: mod_base = OTHER; note = 2'-O-methylcytidine-3'-phosphate
  modified_base 14: mod_base = OTHER; note = 2'-deoxy-2'-fluorocytidine-3'-phosphate
  modified_base 15: mod_base = OTHER; note = 2'-O-methyluridine-3'-phosphate
  modified_base 16: mod_base = OTHER; note = 2'-deoxy-2'-fluoroguanosine-3'-phosphate
  modified_base 17: mod_base = OTHER; note = 2'-O-methyluridine-3'-phosphate
  modified_base 18: mod_base = OTHER; note = 2'-O-methylguanosine-3'-phosphate
  modified_base 19: mod_base = OTHER; note = 2'-O-methylguanosine-3'-phosphate
  modified_base 20: mod_base = OTHER; note = 2'-O-methyluridine-3'-phosphate
  modified_base 21: mod_base = OTHER; note = 2'-O-methylguanosine-3'-phosphorothioate
  modified_base 22: mod_base = OTHER; note = 2'-O-methylguanosine-3'-phosphorothioate
  modified_base 23: mod_base = OTHER; note = 2'-O-methyluridine
tgacacttctttcctgtggtggt

SEQ ID NO: 1042 - RNA, 23 nt, synthetic construct
  source 1..23: mol_type = other RNA
  modified_base 1: mod_base = OTHER; note = 2'-O-methyluridine-3'-phosphorothioate 5'-(E)-Vinylphosphonate
  modified_base 2: mod_base = OTHER; note = 2'-deoxy-2'-fluoroguanosine-3'-phosphorothioate
  modified_base 3: mod_base = OTHER; note = 2'-O-methyladenosine-3'-phosphate
  modified_base 4: mod_base = OTHER; note = 2'-O-methylcytidine-3'-phosphate
  modified_base 5: mod_base = OTHER; note = 2'-O-methyladenosine-3'-phosphate
  modified_base 6: mod_base = OTHER; note = 2'-deoxy-2'-fluorocytidine-3'-phosphate
  modified_base 7: mod_base = OTHER; note = 2'-O-methyladenosine-3'-phosphate
  modified_base 8: mod_base = OTHER; note = 2'-O-methyluridine-3'-phosphate
  modified_base 9: mod_base = OTHER; note = 2'-O-methylcytidine-3'-phosphate
  modified_base 10: mod_base = OTHER; note = 2'-O-methyluridine-3'-phosphate
  modified_base 11: mod_base = OTHER; note = 2'-O-methyluridine-3'-phosphate
  modified_base 12: mod_base = OTHER; note = 2'-O-methyluridine-3'-phosphate
  modified_base 13: mod_base = OTHER; note = 2'-O-methylcytidine-3'-phosphate
  modified_base 14: mod_base = OTHER; note = 2'-deoxy-2'-fluorocytidine-3'-phosphate
  modified_base 15: mod_base = OTHER; note = 2'-O-methyluridine-3'-phosphate
  modified_base 16: mod_base = OTHER; note = 2'-deoxy-2'-fluoroguanosine-3'-phosphate
  modified_base 17: mod_base = OTHER; note = 2'-O-methyluridine-3'-phosphate
  modified_base 18: mod_base = OTHER; note = 2'-O-methylguanosine-3'-phosphate
  modified_base 19: mod_base = OTHER; note = 2'-O-methylguanosine-3'-phosphate
  modified_base 20: mod_base = OTHER; note = 2'-O-methyluridine-3'-phosphate
  modified_base 21: mod_base = OTHER; note = 2'-O-methylguanosine-3'-phosphorothioate
  modified_base 22: mod_base = OTHER; note = 2'-O-methylguanosine-3'-phosphorothioate
  modified_base 23: mod_base = OTHER; note = 2'-O-methyluridine
tgacacatctttcctgtggtggt

SEQ ID NO: 1043 - RNA, 23 nt, synthetic construct
  source 1..23: mol_type = other RNA
  modified_base 1: mod_base = OTHER; note = 2'-O-methyluridine-3'-phosphorothioate 5'-(E)-Vinylphosphonate
  modified_base 2: mod_base = OTHER; note = 2'-deoxy-2'-fluorocytidine-3'-phosphorothioate
  modified_base 3: mod_base = OTHER; note = 2'-O-methyluridine-3'-phosphate
  modified_base 4: mod_base = OTHER; note = 2'-O-methylguanosine-3'-phosphate
  modified_base 5: mod_base = OTHER; note = 2'-O-methyladenosine-3'-phosphate
  modified_base 6: mod_base = OTHER; note = 2'-deoxy-2'-fluorocytidine-3'-phosphate
  modified_base 7: mod_base = OTHER; note = 2'-O-methyladenosine-3'-phosphate
  modified_base 8: mod_base = OTHER; note = 2'-O-methylcytidine-3'-phosphate
  modified_base 9: mod_base = OTHER; note = 2'-O-methyluridine-3'-phosphate
  modified_base 10: mod_base = OTHER; note = 2'-O-methyluridine-3'-phosphate
  modified_base 11: mod_base = OTHER; note = 2'-O-methylcytidine-3'-phosphate
  modified_base 12: mod_base = OTHER; note = 2'-O-methyluridine-3'-phosphate
  modified_base 13: mod_base = OTHER; note = 2'-O-methyluridine-3'-phosphate
  modified_base 14: mod_base = OTHER; note = 2'-deoxy-2'-fluorouridine-3'-phosphate
  modified_base 15: mod_base = OTHER; note = 2'-O-methylcytidine-3'-phosphate
  modified_base 16: mod_base = OTHER; note = 2'-deoxy-2'-fluorocytidine-3'-phosphate
  modified_base 17: mod_base = OTHER; note = 2'-O-methyluridine-3'-phosphate
  modified_base 18: mod_base = OTHER; note = 2'-O-methylguanosine-3'-phosphate
  modified_base 19: mod_base = OTHER; note = 2'-O-methyluridine-3'-phosphate
  modified_base 20: mod_base = OTHER; note = 2'-O-methylguanosine-3'-phosphate
  modified_base 21: mod_base = OTHER; note = 2'-O-methylguanosine-3'-phosphorothioate
  modified_base 22: mod_base = OTHER; note = 2'-O-methyluridine-3'-phosphorothioate
  modified_base 23: mod_base = OTHER; note = 2'-O-methylguanosine
tctgacacttctttcctgtggtg

SEQ ID NO: 1044 - RNA, 23 nt, synthetic construct
  source 1..23: mol_type = other RNA
  modified_base 1: mod_base = OTHER; note = 2'-O-methyluridine-3'-phosphorothioate 5'-(E)-Vinylphosphonate
  modified_base 2: mod_base = OTHER; note = 2'-deoxy-2'-fluoroadenosine-3'-phosphorothioate
  modified_base 3: mod_base = OTHER; note = 2'-O-methylcytidine-3'-phosphate
  modified_base 4: mod_base = OTHER; note = 2'-O-methyluridine-3'-phosphate
  modified_base 5: mod_base = OTHER; note = 2'-O-methylguanosine-3'-phosphate
  modified_base 6: mod_base = OTHER; note = 2'-deoxy-2'-fluoroadenosine-3'-phosphate
  modified_base 7: mod_base = OTHER; note = 2'-O-methylcytidine-3'-phosphate
  modified_base 8: mod_base = OTHER; note = 2'-O-methyladenosine-3'-phosphate
  modified_base 9: mod_base = OTHER; note = 2'-O-methylcytidine-3'-phosphate
  modified_base 10: mod_base = OTHER; note = 2'-O-methyluridine-3'-phosphate
  modified_base 11: mod_base = OTHER; note = 2'-O-methyluridine-3'-phosphate
  modified_base 12: mod_base = OTHER; note = 2'-O-methylcytidine-3'-phosphate
  modified_base 13: mod_base = OTHER; note = 2'-O-methyluridine-3'-phosphate
  modified_base 14: mod_base = OTHER; note = 2'-deoxy-2'-fluorouridine-3'-phosphate
  modified_base 15: mod_base = OTHER; note = 2'-O-methyluridine-3'-phosphate
  modified_base 16: mod_base = OTHER; note = 2'-deoxy-2'-fluorocytidine-3'-phosphate
  modified_base 17: mod_base = OTHER; note = 2'-O-methylcytidine-3'-phosphate
  modified_base 18: mod_base = OTHER; note = 2'-O-methyluridine-3'-phosphate
  modified_base 19: mod_base = OTHER; note = 2'-O-methylguanosine-3'-phosphate
  modified_base 20: mod_base = OTHER; note = 2'-O-methyluridine-3'-phosphate
  modified_base 21: mod_base = OTHER; note = 2'-O-methylguanosine-3'-phosphorothioate
  modified_base 22: mod_base = OTHER; note = 2'-O-methylguanosine-3'-phosphorothioate
  modified_base 23: mod_base = OTHER; note = 2'-O-methyluridine
tactgacacttctttcctgtggt

SEQ ID NO: 1045 - RNA, 23 nt, synthetic construct
  source 1..23: mol_type = other RNA
  modified_base 1: mod_base = OTHER; note = 2'-O-methyluridine-3'-phosphorothioate 5'-(E)-Vinylphosphonate
  modified_base 2: mod_base = OTHER; note = 2'-deoxy-2'-fluoroadenosine-3'-phosphorothioate
  modified_base 3: mod_base = OTHER; note = 2'-O-methylcytidine-3'-phosphate
  modified_base 4: mod_base = OTHER; note = 2'-O-methyluridine-3'-phosphate
  modified_base 5: mod_base = OTHER; note = 2'-O-methylguanosine-3'-phosphate
  modified_base 6: mod_base = OTHER; note = 2'-deoxy-2'-fluoroadenosine-3'-phosphate
  modified_base 7: mod_base = OTHER; note = 2'-O-methyladenosine-3'-phosphate
  modified_base 8: mod_base = OTHER; note = 2'-O-methyladenosine-3'-phosphate
  modified_base 9: mod_base = OTHER; note = 2'-O-methylcytidine-3'-phosphate
  modified_base 10: mod_base = OTHER; note = 2'-O-methyluridine-3'-phosphate
  modified_base 11: mod_base = OTHER; note = 2'-O-methyluridine-3'-phosphate
  modified_base 12: mod_base = OTHER; note = 2'-O-methylcytidine-3'-phosphate
  modified_base 13: mod_base = OTHER; note = 2'-O-methyluridine-3'-phosphate
  modified_base 14: mod_base = OTHER; note = 2'-deoxy-2'-fluorouridine-3'-phosphate
  modified_base 15: mod_base = OTHER; note = 2'-O-methyluridine-3'-phosphate
  modified_base 16: mod_base = OTHER; note = 2'-deoxy-2'-fluorocytidine-3'-phosphate
  modified_base 17: mod_base = OTHER; note = 2'-O-methylcytidine-3'-phosphate
  modified_base 18: mod_base = OTHER; note = 2'-O-methyluridine-3'-phosphate
  modified_base 19: mod_base = OTHER; note = 2'-O-methylguanosine-3'-phosphate
  modified_base 20: mod_base = OTHER; note = 2'-O-methyluridine-3'-phosphate
  modified_base 21: mod_base = OTHER; note = 2'-O-methylguanosine-3'-phosphorothioate
  modified_base 22: mod_base = OTHER; note = 2'-O-methylguanosine-3'-phosphorothioate
  modified_base 23: mod_base = OTHER; note = 2'-O-methyluridine
tactgaaacttctttcctgtggt

SEQ ID NO: 1046 - RNA, 23 nt, synthetic construct
  source 1..23: mol_type = other RNA
  modified_base 1: mod_base = OTHER; note = 2'-O-methyluridine-3'-phosphorothioate 5'-(E)-Vinylphosphonate
  modified_base 2: mod_base = OTHER; note = 2'-deoxy-2'-fluoroadenosine-3'-phosphorothioate
  modified_base 3: mod_base = OTHER; note = 2'-O-methyladenosine-3'-phosphate
  modified_base 4: mod_base = OTHER; note = 2'-O-methylguanosine-3'-phosphate
  modified_base 5: mod_base = OTHER; note = 2'-O-methyladenosine-3'-phosphate
  modified_base 6: mod_base = OTHER; note = 2'-deoxy-2'-fluorocytidine-3'-phosphate
  modified_base 7: mod_base = OTHER; note = 2'-O-methyluridine-3'-phosphate
  modified_base 8: mod_base = OTHER; note = 2'-O-methylguanosine-3'-phosphate
  modified_base 9: mod_base = OTHER; note = 2'-O-methyladenosine-3'-phosphate
  modified_base 10: mod_base = OTHER; note = 2'-O-methylcytidine-3'-phosphate
  modified_base 11: mod_base = OTHER; note = 2'-O-methyladenosine-3'-phosphate
  modified_base 12: mod_base = OTHER; note = 2'-O-methylcytidine-3'-phosphate
  modified_base 13: mod_base = OTHER; note = 2'-O-methyluridine-3'-phosphate
  modified_base 14: mod_base = OTHER; note = 2'-deoxy-2'-fluorouridine-3'-phosphate
  modified_base 15: mod_base = OTHER; note = 2'-O-methylcytidine-3'-phosphate
  modified_base 16: mod_base = OTHER; note = 2'-deoxy-2'-fluorouridine-3'-phosphate
  modified_base 17: mod_base = OTHER; note = 2'-O-methyluridine-3'-phosphate
  modified_base 18: mod_base = OTHER; note = 2'-O-methyluridine-3'-phosphate
  modified_base 19: mod_base = OTHER; note = 2'-O-methylcytidine-3'-phosphate
  modified_base 20: mod_base = OTHER; note = 2'-O-methylcytidine-3'-phosphate
  modified_base 21: mod_base = OTHER; note = 2'-O-methyluridine-3'-phosphorothioate
  modified_base 22: mod_base = OTHER; note = 2'-O-methylguanosine-3'-phosphorothioate
  modified_base 23: mod_base = OTHER; note = 2'-O-methyluridine
taagactgacacttctttcctgt

SEQ ID NO: 1047 - RNA, 23 nt, synthetic construct
  source 1..23: mol_type = other RNA
  modified_base 1: mod_base = OTHER; note = 2'-O-methyluridine-3'-phosphorothioate 5'-(E)-Vinylphosphonate
  modified_base 2: mod_base = OTHER; note = 2'-deoxy-2'-fluoroadenosine-3'-phosphorothioate
  modified_base 3: mod_base = OTHER; note = 2'-O-methyladenosine-3'-phosphate
  modified_base 4: mod_base = OTHER; note = 2'-O-methylguanosine-3'-phosphate
  modified_base 5: mod_base = OTHER; note = 2'-O-methyladenosine-3'-phosphate
  modified_base 6: mod_base = OTHER; note = 2'-deoxy-2'-fluorocytidine-3'-phosphate
  modified_base 7: mod_base = OTHER; note = 2'-O-methyladenosine-3'-phosphate
  modified_base 8: mod_base = OTHER; note = 2'-O-methylguanosine-3'-phosphate
  modified_base 9: mod_base = OTHER; note = 2'-O-methyladenosine-3'-phosphate
  modified_base 10: mod_base = OTHER; note = 2'-O-methylcytidine-3'-phosphate
  modified_base 11: mod_base = OTHER; note = 2'-O-methyladenosine-3'-phosphate
  modified_base 12: mod_base = OTHER; note = 2'-O-methylcytidine-3'-phosphate
  modified_base 13: mod_base = OTHER; note = 2'-O-methyluridine-3'-phosphate
  modified_base 14: mod_base = OTHER; note = 2'-deoxy-2'-fluorouridine-3'-phosphate
  modified_base 15: mod_base = OTHER; note = 2'-O-methylcytidine-3'-phosphate
  modified_base 16: mod_base = OTHER; note = 2'-deoxy-2'-fluorouridine-3'-phosphate
  modified_base 17: mod_base = OTHER; note = 2'-O-methyluridine-3'-phosphate
  modified_base 18: mod_base = OTHER; note = 2'-O-methyluridine-3'-phosphate
  modified_base 19: mod_base = OTHER; note = 2'-O-methylcytidine-3'-phosphate
  modified_base 20: mod_base = OTHER; note = 2'-O-methylcytidine-3'-phosphate
  modified_base 21: mod_base = OTHER; note = 2'-O-methyluridine-3'-phosphorothioate
  modified_base 22: mod_base = OTHER; note = 2'-O-methylguanosine-3'-phosphorothioate
  modified_base 23: mod_base = OTHER; note = 2'-O-methyluridine
taagacagacacttctttcctgt

SEQ ID NO: 1048 - RNA, 23 nt, synthetic construct
  source 1..23: mol_type = other RNA
  modified_base 1: mod_base = OTHER; note = 2'-O-methyluridine-3'-phosphorothioate 5'-(E)-Vinylphosphonate
  modified_base 2: mod_base = OTHER; note = 2'-deoxy-2'-fluorocytidine-3'-phosphorothioate
  modified_base 3: mod_base = OTHER; note = 2'-O-methyladenosine-3'-phosphate
  modified_base 4: mod_base = OTHER; note = 2'-O-methyladenosine-3'-phosphate
  modified_base 5: mod_base = OTHER; note = 2'-O-methylguanosine-3'-phosphate
  modified_base 6: mod_base = OTHER; note = 2'-deoxy-2'-fluoroadenosine-3'-phosphate
  modified_base 7: mod_base = OTHER; note = 2'-O-methylcytidine-3'-phosphate
  modified_base 8: mod_base = OTHER; note = 2'-O-methyluridine-3'-phosphate
  modified_base 9: mod_base = OTHER; note = 2'-O-methylguanosine-3'-phosphate
  modified_base 10: mod_base = OTHER; note = 2'-O-methyladenosine-3'-phosphate
  modified_base 11: mod_base = OTHER; note = 2'-O-methylcytidine-3'-phosphate
  modified_base 12: mod_base = OTHER; note = 2'-O-methyladenosine-3'-phosphate
  modified_base 13: mod_base = OTHER; note = 2'-O-methylcytidine-3'-phosphate
  modified_base 14: mod_base = OTHER; note = 2'-deoxy-2'-fluorouridine-3'-phosphate
  modified_base 15: mod_base = OTHER; note = 2'-O-methyluridine-3'-phosphate
  modified_base 16: mod_base = OTHER; note = 2'-deoxy-2'-fluorocytidine-3'-phosphate
  modified_base 17: mod_base = OTHER; note = 2'-O-methyluridine-3'-phosphate
  modified_base 18: mod_base = OTHER; note = 2'-O-methyluridine-3'-phosphate
  modified_base 19: mod_base = OTHER; note = 2'-O-methyluridine-3'-phosphate
  modified_base 20: mod_base = OTHER; note = 2'-O-methylcytidine-3'-phosphate
  modified_base 21: mod_base = OTHER; note = 2'-O-methylcytidine-3'-phosphorothioate
  modified_base 22: mod_base = OTHER; note = 2'-O-methyluridine-3'-phosphorothioate
  modified_base 23: mod_base = OTHER; note = 2'-O-methylguanosine
tcaagactgacacttctttcctg

SEQ ID NO: 1049 - RNA, 23 nt, synthetic construct
  source 1..23: mol_type = other RNA
  modified_base 1: mod_base = OTHER; note = 2'-O-methyluridine-3'-phosphorothioate 5'-(E)-Vinylphosphonate
  modified_base 2: mod_base = OTHER; note = 2'-deoxy-2'-fluorocytidine-3'-phosphorothioate
  modified_base 3: mod_base = OTHER; note = 2'-O-methylcytidine-3'-phosphate
  modified_base 4: mod_base = OTHER; note = 2'-O-methyladenosine-3'-phosphate
  modified_base 5: mod_base = OTHER; note = 2'-O-methyladenosine-3'-phosphate
  modified_base 6: mod_base = OTHER; note = 2'-deoxy-2'-fluoroguanosine-3'-phosphate
  modified_base 7: mod_base = OTHER; note = 2'-O-methyladenosine-3'-phosphate
  modified_base 8: mod_base = OTHER; note = 2'-O-methylcytidine-3'-phosphate
  modified_base 9: mod_base = OTHER; note = 2'-O-methyluridine-3'-phosphate
  modified_base 10: mod_base = OTHER; note = 2'-O-methylguanosine-3'-phosphate
  modified_base 11: mod_base = OTHER; note = 2'-O-methyladenosine-3'-phosphate
  modified_base 12: mod_base = OTHER; note = 2'-O-methylcytidine-3'-phosphate
  modified_base 13: mod_base = OTHER; note = 2'-O-methyladenosine-3'-phosphate
  modified_base 14: mod_base = OTHER; note = 2'-deoxy-2'-fluorocytidine-3'-phosphate
  modified_base 15: mod_base = OTHER; note = 2'-O-methyluridine-3'-phosphate
  modified_base 16: mod_base = OTHER; note = 2'-deoxy-2'-fluorouridine-3'-phosphate
  modified_base 17: mod_base = OTHER; note = 2'-O-methylcytidine-3'-phosphate
  modified_base 18: mod_base = OTHER; note = 2'-O-methyluridine-3'-phosphate
  modified_base 19: mod_base = OTHER; note = 2'-O-methyluridine-3'-phosphate
  modified_base 20: mod_base = OTHER; note = 2'-O-methyluridine-3'-phosphate
  modified_base 21: mod_base = OTHER; note = 2'-O-methylcytidine-3'-phosphorothioate
  modified_base 22: mod_base = OTHER; note = 2'-O-methylcytidine-3'-phosphorothioate
  modified_base 23: mod_base = OTHER; note = 2'-O-methyluridine
tccaagactgacacttctttcct

SEQ ID NO: 1050 - RNA, 23 nt, synthetic construct
  source 1..23: mol_type = other RNA
  modified_base 1: mod_base = OTHER; note = 2'-O-methyluridine-3'-phosphorothioate 5'-(E)-Vinylphosphonate
  modified_base 2: mod_base = OTHER; note = 2'-deoxy-2'-fluoroadenosine-3'-phosphorothioate
  modified_base 3: mod_base = OTHER; note = 2'-O-methylcytidine-3'-phosphate
  modified_base 4: mod_base = OTHER; note = 2'-O-methylcytidine-3'-phosphate
  modified_base 5: mod_base = OTHER; note = 2'-O-methyladenosine-3'-phosphate
  modified_base 6: mod_base = OTHER; note = 2'-deoxy-2'-fluoroadenosine-3'-phosphate
  modified_base 7: mod_base = OTHER; note = 2'-O-methylguanosine-3'-phosphate
  modified_base 8: mod_base = OTHER; note = 2'-O-methyladenosine-3'-phosphate
  modified_base 9: mod_base = OTHER; note = 2'-O-methylcytidine-3'-phosphate
  modified_base 10: mod_base = OTHER; note = 2'-O-methyluridine-3'-phosphate
  modified_base 11: mod_base = OTHER; note = 2'-O-methylguanosine-3'-phosphate
  modified_base 12: mod_base = OTHER; note = 2'-O-methyladenosine-3'-phosphate
  modified_base 13: mod_base = OTHER; note = 2'-O-methylcytidine-3'-phosphate
  modified_base 14: mod_base = OTHER; note = 2'-deoxy-2'-fluoroadenosine-3'-phosphate
  modified_base 15: mod_base = OTHER; note = 2'-O-methylcytidine-3'-phosphate
  modified_base 16: mod_base = OTHER; note = 2'-deoxy-2'-fluorouridine-3'-phosphate
  modified_base 17: mod_base = OTHER; note = 2'-O-methyluridine-3'-phosphate
  modified_base 18: mod_base = OTHER; note = 2'-O-methylcytidine-3'-phosphate
  modified_base 19: mod_base = OTHER; note = 2'-O-methyluridine-3'-phosphate
  modified_base 20: mod_base = OTHER; note = 2'-O-methyluridine-3'-phosphate
  modified_base 21: mod_base = OTHER; note = 2'-O-methyluridine-3'-phosphorothioate
  modified_base 22: mod_base = OTHER; note = 2'-O-methylcytidine-3'-phosphorothioate
  modified_base 23: mod_base = OTHER; note = 2'-O-methylcytidine
taccaagactgacacttctttcc

SEQ ID NO: 1051 - RNA, 23 nt, synthetic construct
  source 1..23: mol_type = other RNA
  modified_base 1: mod_base = OTHER; note = 2'-O-methyluridine-3'-phosphorothioate 5'-(E)-Vinylphosphonate
  modified_base 2: mod_base = OTHER; note = 2'-deoxy-2'-fluorouridine-3'-phosphorothioate
  modified_base 3: mod_base = OTHER; note = 2'-O-methylguanosine-3'-phosphate
  modified_base 4: mod_base = OTHER; note = 2'-O-methyladenosine-3'-phosphate
  modified_base 5: mod_base = OTHER; note = 2'-O-methylcytidine-3'-phosphate
  modified_base 6: mod_base = OTHER; note = 2'-deoxy-2'-fluorocytidine-3'-phosphate
  modified_base 7: mod_base = OTHER; note = 2'-O-methyladenosine-3'-phosphate
  modified_base 8: mod_base = OTHER; note = 2'-O-methyladenosine-3'-phosphate
  modified_base 9: mod_base = OTHER; note = 2'-O-methylguanosine-3'-phosphate
  modified_base 10: mod_base = OTHER; note = 2'-O-methyladenosine-3'-phosphate
  modified_base 11: mod_base = OTHER; note = 2'-O-methylcytidine-3'-phosphate
  modified_base 12: mod_base = OTHER; note = 2'-O-methyluridine-3'-phosphate
  modified_base 13: mod_base = OTHER; note = 2'-O-methylguanosine-3'-phosphate
  modified_base 14: mod_base = OTHER; note = 2'-deoxy-2'-fluoroadenosine-3'-phosphate
  modified_base 15: mod_base = OTHER; note = 2'-O-methylcytidine-3'-phosphate
  modified_base 16: mod_base = OTHER; note = 2'-deoxy-2'-fluoroadenosine-3'-phosphate
  modified_base 17: mod_base = OTHER; note = 2'-O-methylcytidine-3'-phosphate
  modified_base 18: mod_base = OTHER; note = 2'-O-methyluridine-3'-phosphate
  modified_base 19: mod_base = OTHER; note = 2'-O-methyluridine-3'-phosphate
  modified_base 20: mod_base = OTHER; note = 2'-O-methylcytidine-3'-phosphate
  modified_base 21: mod_base = OTHER; note = 2'-O-methyluridine-3'-phosphorothioate
  modified_base 22: mod_base = OTHER; note = 2'-O-methyluridine-3'-phosphorothioate
  modified_base 23: mod_base = OTHER; note = 2'-O-methyluridine
ttgaccaagactgacacttcttt

SEQ ID NO: 1052 - RNA, 23 nt, synthetic construct
  source 1..23: mol_type = other RNA
  modified_base 1: mod_base = OTHER; note = 2'-O-methyluridine-3'-phosphorothioate 5'-(E)-Vinylphosphonate
  modified_base 2: mod_base = OTHER; note = 2'-deoxy-2'-fluoroguanosine-3'-phosphorothioate
  modified_base 3: mod_base = OTHER; note = 2'-O-methyladenosine-3'-phosphate
  modified_base 4: mod_base = OTHER; note = 2'-O-methyluridine-3'-phosphate
  modified_base 5: mod_base = OTHER; note = 2'-O-methylguanosine-3'-phosphate
  modified_base 6: mod_base = OTHER; note = 2'-deoxy-2'-fluoroadenosine-3'-phosphate
  modified_base 7: mod_base = OTHER; note = 2'-O-methylcytidine-3'-phosphate
  modified_base 8: mod_base = OTHER; note = 2'-O-methylcytidine-3'-phosphate
  modified_base 9: mod_base = OTHER; note = 2'-O-methyladenosine-3'-phosphate
  modified_base 10: mod_base = OTHER; note = 2'-O-methyladenosine-3'-phosphate
  modified_base 11: mod_base = OTHER; note = 2'-O-methylguanosine-3'-phosphate
  modified_base 12: mod_base = OTHER; note = 2'-O-methyladenosine-3'-phosphate
  modified_base 13: mod_base = OTHER; note = 2'-O-methylcytidine-3'-phosphate
  modified_base 14: mod_base = OTHER; note = 2'-deoxy-2'-fluorouridine-3'-phosphate
  modified_base 15: mod_base = OTHER; note = 2'-O-methylguanosine-3'-phosphate
  modified_base 16: mod_base = OTHER; note = 2'-deoxy-2'-fluoroadenosine-3'-phosphate
  modified_base 17: mod_base = OTHER; note = 2'-O-methylcytidine-3'-phosphate
  modified_base 18: mod_base = OTHER; note = 2'-O-methyladenosine-3'-phosphate
  modified_base 19: mod_base = OTHER; note = 2'-O-methylcytidine-3'-phosphate
  modified_base 20: mod_base = OTHER; note = 2'-O-methyluridine-3'-phosphate
  modified_base 21: mod_base = OTHER; note = 2'-O-methyluridine-3'-phosphorothioate
  modified_base 22: mod_base = OTHER; note = 2'-O-methylcytidine-3'-phosphorothioate
  modified_base 23: mod_base = OTHER; note = 2'-O-methyluridine
tgatgaccaagactgacacttct

SEQ ID NO: 1053 - RNA, 23 nt, synthetic construct
  source 1..23: mol_type = other RNA
  modified_base 1: mod_base = OTHER; note = 2'-O-methyluridine-3'-phosphorothioate 5'-(E)-Vinylphosphonate
  modified_base 2: mod_base = OTHER; note = 2'-deoxy-2'-fluoroguanosine-3'-phosphorothioate
  modified_base 3: mod_base = OTHER; note = 2'-O-methyladenosine-3'-phosphate
  modified_base 4: mod_base = OTHER; note = 2'-O-methyluridine-3'-phosphate
  modified_base 5: mod_base = OTHER; note = 2'-O-methylguanosine-3'-phosphate
  modified_base 6: mod_base = OTHER; note = 2'-deoxy-2'-fluoroadenosine-3'-phosphate
  modified_base 7: mod_base = OTHER; note = 2'-O-methyladenosine-3'-phosphate
  modified_base 8: mod_base = OTHER; note = 2'-O-methylcytidine-3'-phosphate
  modified_base 9: mod_base = OTHER; note = 2'-O-methyladenosine-3'-phosphate
  modified_base 10: mod_base = OTHER; note = 2'-O-methyladenosine-3'-phosphate
  modified_base 11: mod_base = OTHER; note = 2'-O-methylguanosine-3'-phosphate
  modified_base 12: mod_base = OTHER; note = 2'-O-methyladenosine-3'-phosphate
  modified_base 13: mod_base = OTHER; note = 2'-O-methylcytidine-3'-phosphate
  modified_base 14: mod_base = OTHER; note = 2'-deoxy-2'-fluorouridine-3'-phosphate
  modified_base 15: mod_base = OTHER; note = 2'-O-methylguanosine-3'-phosphate
  modified_base 16: mod_base = OTHER; note = 2'-deoxy-2'-fluoroadenosine-3'-phosphate
  modified_base 17: mod_base = OTHER; note = 2'-O-methylcytidine-3'-phosphate
  modified_base 18: mod_base = OTHER; note = 2'-O-methyladenosine-3'-phosphate
  modified_base 19: mod_base = OTHER; note = 2'-O-methylcytidine-3'-phosphate
  modified_base 20: mod_base = OTHER; note = 2'-O-methyluridine-3'-phosphate
  modified_base 21: mod_base = OTHER; note = 2'-O-methyluridine-3'-phosphorothioate
  modified_base 22: mod_base = OTHER; note = 2'-O-methylcytidine-3'-phosphorothioate
  modified_base 23: mod_base = OTHER; note = 2'-O-methyluridine
tgatgaacaagactgacacttct

SEQ ID NO: 1054 - RNA, 23 nt, synthetic construct
  source 1..23: mol_type = other RNA
  modified_base 1: mod_base = OTHER; note = 2'-O-methyluridine-3'-phosphorothioate 5'-(E)-Vinylphosphonate
  modified_base 2: mod_base = OTHER; note = 2'-deoxy-2'-fluoroadenosine-3'-phosphorothioate
  modified_base 3: mod_base = OTHER; note = 2'-O-methylguanosine-3'-phosphate
  modified_base 4: mod_base = OTHER; note = 2'-O-methyladenosine-3'-phosphate
  modified_base 5: mod_base = OTHER; note = 2'-O-methyluridine-3'-phosphate
  modified_base 6: mod_base = OTHER; note = 2'-deoxy-2'-fluoroguanosine-3'-phosphate
  modified_base 7: mod_base = OTHER; note = 2'-O-methyladenosine-3'-phosphate
  modified_base 8: mod_base = OTHER; note = 2'-O-methylcytidine-3'-phosphate
  modified_base 9: mod_base = OTHER; note = 2'-O-methylcytidine-3'-phosphate
  modified_base 10: mod_base = OTHER; note = 2'-O-methyladenosine-3'-phosphate
  modified_base 11: mod_base = OTHER; note = 2'-O-methyladenosine-3'-phosphate
  modified_base 12: mod_base = OTHER; note = 2'-O-methylguanosine-3'-phosphate
  modified_base 13: mod_base = OTHER; note = 2'-O-methyladenosine-3'-phosphate
  modified_base 14: mod_base = OTHER; note = 2'-deoxy-2'-fluorocytidine-3'-phosphate
  modified_base 15: mod_base = OTHER; note = 2'-O-methyluridine-3'-phosphate
  modified_base 16: mod_base = OTHER; note = 2'-deoxy-2'-fluoroguanosine-3'-phosphate
  modified_base 17: mod_base = OTHER; note = 2'-O-methyladenosine-3'-phosphate
  modified_base 18: mod_base = OTHER; note = 2'-O-methylcytidine-3'-phosphate
  modified_base 19: mod_base = OTHER; note = 2'-O-methyladenosine-3'-phosphate
  modified_base 20: mod_base = OTHER; note = 2'-O-methylcytidine-3'-phosphate
  modified_base 21: mod_base = OTHER; note = 2'-O-methyluridine-3'-phosphorothioate
  modified_base 22: mod_base = OTHER; note = 2'-O-methyluridine-3'-phosphorothioate
  modified_base 23: mod_base = OTHER; note = 2'-O-methylcytidine
tagatgaccaagactgacacttc

SEQ ID NO: 1055 - RNA, 23 nt, synthetic construct
  source 1..23: mol_type = other RNA
  modified_base 1: mod_base = OTHER; note = 2'-O-methyluridine-3'-phosphorothioate 5'-(E)-Vinylphosphonate
  modified_base 2: mod_base = OTHER; note = 2'-deoxy-2'-fluoroadenosine-3'-phosphorothioate
  modified_base 3: mod_base = OTHER; note = 2'-O-methylguanosine-3'-phosphate
  modified_base 4: mod_base = OTHER; note = 2'-O-methyladenosine-3'-phosphate
  modified_base 5: mod_base = OTHER; note = 2'-O-methyluridine-3'-phosphate
  modified_base 6: mod_base = OTHER; note = 2'-deoxy-2'-fluoroadenosine-3'-phosphate
  modified_base 7: mod_base = OTHER; note = 2'-O-methyladenosine-3'-phosphate
  modified_base 8: mod_base = OTHER; note = 2'-O-methylcytidine-3'-phosphate
  modified_base 9: mod_base = OTHER; note = 2'-O-methylcytidine-3'-phosphate
  modified_base 10: mod_base = OTHER; note = 2'-O-methyladenosine-3'-phosphate
  modified_base 11: mod_base = OTHER; note = 2'-O-methyladenosine-3'-phosphate
  modified_base 12: mod_base = OTHER; note = 2'-O-methylguanosine-3'-phosphate
  modified_base 13: mod_base = OTHER; note = 2'-O-methyladenosine-3'-phosphate
  modified_base 14: mod_base = OTHER; note = 2'-deoxy-2'-fluorocytidine-3'-phosphate
  modified_base 15: mod_base = OTHER; note = 2'-O-methyluridine-3'-phosphate
  modified_base 16: mod_base = OTHER; note = 2'-deoxy-2'-fluoroguanosine-3'-phosphate
  modified_base 17: mod_base = OTHER; note = 2'-O-methyladenosine-3'-phosphate
  modified_base 18: mod_base = OTHER; note = 2'-O-methylcytidine-3'-phosphate
  modified_base 19: mod_base = OTHER; note = 2'-O-methyladenosine-3'-phosphate
  modified_base 20: mod_base = OTHER; note = 2'-O-methylcytidine-3'-phosphate
  modified_base 21: mod_base = OTHER; note = 2'-O-methyluridine-3'-phosphorothioate
  modified_base 22: mod_base = OTHER; note = 2'-O-methyluridine-3'-phosphorothioate
  modified_base 23: mod_base = OTHER; note = 2'-O-methylcytidine
tagataaccaagactgacacttc

SEQ ID NO: 1056 - RNA, 23 nt, synthetic construct
  source 1..23: mol_type = other RNA
  modified_base 1: mod_base = OTHER; note = 2'-O-methyluridine-3'-phosphorothioate 5'-(E)-Vinylphosphonate
  modified_base 2: mod_base = OTHER; note = 2'-deoxy-2'-fluorocytidine-3'-phosphorothioate
  modified_base 3: mod_base = OTHER; note = 2'-O-methyladenosine-3'-phosphate
  modified_base 4: mod_base = OTHER; note = 2'-O-methyluridine-3'-phosphate
  modified_base 5: mod_base = OTHER; note = 2'-O-methyladenosine-3'-phosphate
  modified_base 6: mod_base = OTHER; note = 2'-deoxy-2'-fluoroguanosine-3'-phosphate
  modified_base 7: mod_base = OTHER; note = 2'-O-methyladenosine-3'-phosphate
  modified_base 8: mod_base = OTHER; note = 2'-O-methyluridine-3'-phosphate
  modified_base 9: mod_base = OTHER; note = 2'-O-methylguanosine-3'-phosphate
  modified_base 10: mod_base = OTHER; note = 2'-O-methyladenosine-3'-phosphate
  modified_base 11: mod_base = OTHER; note = 2'-O-methylcytidine-3'-phosphate
  modified_base 12: mod_base = OTHER; note = 2'-O-methylcytidine-3'-phosphate
  modified_base 13: mod_base = OTHER; note = 2'-O-methyladenosine-3'-phosphate
  modified_base 14: mod_base = OTHER; note = 2'-deoxy-2'-fluoroadenosine-3'-phosphate
  modified_base 15: mod_base = OTHER; note = 2'-O-methylguanosine-3'-phosphate
  modified_base 16: mod_base = OTHER; note = 2'-deoxy-2'-fluoroadenosine-3'-phosphate
  modified_base 17: mod_base = OTHER; note = 2'-O-methylcytidine-3'-phosphate
  modified_base 18: mod_base = OTHER; note = 2'-O-methyluridine-3'-phosphate
  modified_base 19: mod_base = OTHER; note = 2'-O-methylguanosine-3'-phosphate
  modified_base 20: mod_base = OTHER; note = 2'-O-methyladenosine-3'-phosphate
  modified_base 21: mod_base = OTHER; note = 2'-O-methylcytidine-3'-phosphorothioate
  modified_base 22: mod_base = OTHER; note = 2'-O-methyladenosine-3'-phosphorothioate
  modified_base 23: mod_base = OTHER; note = 2'-O-methylcytidine
tcatagatgaccaagactgacac

SEQ ID NO: 1057 - RNA, 23 nt, synthetic construct
  source 1..23: mol_type = other RNA
  modified_base 1: mod_base = OTHER; note = 2'-O-methyluridine-3'-phosphorothioate 5'-(E)-Vinylphosphonate
  modified_base 2: mod_base = OTHER; note = 2'-deoxy-2'-fluorocytidine-3'-phosphorothioate
  modified_base 3: mod_base = OTHER; note = 2'-O-methyladenosine-3'-phosphate
  modified_base 4: mod_base = OTHER; note = 2'-O-methylguanosine-3'-phosphate
  modified_base 5: mod_base = OTHER; note = 2'-O-methylguanosine-3'-phosphate
  modified_base 6: mod_base = OTHER; note = 2'-deoxy-2'-fluorouridine-3'-phosphate
  modified_base 7: mod_base = OTHER; note = 2'-O-methyluridine-3'-phosphate
  modified_base 8: mod_base = OTHER; note = 2'-O-methylguanosine-3'-phosphate
  modified_base 9: mod_base = OTHER; note = 2'-O-methylcytidine-3'-phosphate
  modified_base 10: mod_base = OTHER; note = 2'-O-methyladenosine-3'-phosphate
  modified_base 11: mod_base = OTHER; note = 2'-O-methylguanosine-3'-phosphate
  modified_base 12: mod_base = OTHER; note = 2'-O-methyluridine-3'-phosphate
  modified_base 13: mod_base = OTHER; note = 2'-O-methyladenosine-3'-phosphate
  modified_base 14: mod_base = OTHER; note = 2'-deoxy-2'-fluorocytidine-3'-phosphate
  modified_base 15: mod_base = OTHER; note = 2'-O-methyluridine-3'-phosphate
  modified_base 16: mod_base = OTHER; note = 2'-deoxy-2'-fluorocytidine-3'-phosphate
  modified_base 17: mod_base = OTHER; note = 2'-O-methylcytidine-3'-phosphate
  modified_base 18: mod_base = OTHER; note = 2'-O-methylcytidine-3'-phosphate
  modified_base 19: mod_base = OTHER; note = 2'-O-methyladenosine-3'-phosphate
  modified_base 20: mod_base = OTHER; note = 2'-O-methylcytidine-3'-phosphate
  modified_base 21: mod_base = OTHER; note = 2'-O-methylcytidine-3'-phosphorothioate
  modified_base 22: mod_base = OTHER; note = 2'-O-methyluridine-3'-phosphorothioate
  modified_base 23: mod_base = OTHER; note = 2'-O-methylguanosine
tcaggttgcagtactcccacctg

SEQ ID NO: 1058 - RNA, 23 nt, synthetic construct
  source 1..23: mol_type = other RNA
  modified_base 1: mod_base = OTHER; note = 2'-O-methyluridine-3'-phosphorothioate 5'-(E)-Vinylphosphonate
  modified_base 2: mod_base = OTHER; note = 2'-deoxy-2'-fluorouridine-3'-phosphorothioate
  modified_base 3: mod_base = OTHER; note = 2'-O-methyluridine-3'-phosphate
  modified_base 4: mod_base = OTHER; note = 2'-O-methylcytidine-3'-phosphate
  modified_base 5: mod_base = OTHER; note = 2'-O-methyladenosine-3'-phosphate
  modified_base 6: mod_base = OTHER; note = 2'-deoxy-2'-fluoroguanosine-3'-phosphate
  modified_base 7: mod_base = OTHER; note = 2'-O-methylguanosine-3'-phosphate
  modified_base 8: mod_base = OTHER; note = 2'-O-methyluridine-3'-phosphate
  modified_base 9: mod_base = OTHER; note = 2'-O-methyluridine-3'-phosphate
  modified_base 10: mod_base = OTHER; note = 2'-O-methylguanosine-3'-phosphate
  modified_base 11: mod_base = OTHER; note = 2'-O-methylcytidine-3'-phosphate
  modified_base 12: mod_base = OTHER; note = 2'-O-methyladenosine-3'-phosphate
  modified_base 13: mod_base = OTHER; note = 2'-O-methylguanosine-3'-phosphate
  modified_base 14: mod_base = OTHER; note = 2'-deoxy-2'-fluorouridine-3'-phosphate
  modified_base 15: mod_base = OTHER; note = 2'-O-methyladenosine-3'-phosphate
  modified_base 16: mod_base = OTHER; note = 2'-deoxy-2'-fluorocytidine-3'-phosphate
  modified_base 17: mod_base = OTHER; note = 2'-O-methyluridine-3'-phosphate
  modified_base 18: mod_base = OTHER; note = 2'-O-methylcytidine-3'-phosphate
  modified_base 19: mod_base = OTHER; note = 2'-O-methylcytidine-3'-phosphate
  modified_base 20: mod_base = OTHER; note = 2'-O-methylcytidine-3'-phosphate
  modified_base 21: mod_base = OTHER; note = 2'-O-methyladenosine-3'-phosphorothioate
  modified_base 22: mod_base = OTHER; note = 2'-O-methylcytidine-3'-phosphorothioate
  modified_base 23: mod_base = OTHER; note = 2'-O-methylcytidine
tttcaggttgcagtactcccacc

SEQ ID NO: 1059 - RNA, 23 nt, synthetic construct
  source 1..23: mol_type = other RNA
  modified_base 1: mod_base = OTHER; note = 2'-O-methyluridine-3'-phosphorothioate 5'-(E)-Vinylphosphonate
  modified_base 2: mod_base = OTHER; note = 2'-deoxy-2'-fluorouridine-3'-phosphorothioate
  modified_base 3: mod_base = OTHER; note = 2'-O-methyluridine-3'-phosphate
  modified_base 4: mod_base = OTHER; note = 2'-O-methylcytidine-3'-phosphate
  modified_base 5: mod_base = OTHER; note = 2'-O-methyladenosine-3'-phosphate
  modified_base 6: mod_base = OTHER; note = 2'-deoxy-2'-fluoroguanosine-3'-phosphate
  modified_base 7: mod_base = OTHER; note = 2'-O-methyladenosine-3'-phosphate
  modified_base 8: mod_base = OTHER; note = 2'-O-methyluridine-3'-phosphate
  modified_base 9: mod_base = OTHER; note = 2'-O-methyluridine-3'-phosphate
  modified_base 10: mod_base = OTHER; note = 2'-O-methylguanosine-3'-phosphate
  modified_base 11: mod_base = OTHER; note = 2'-O-methylcytidine-3'-phosphate
  modified_base 12: mod_base = OTHER; note = 2'-O-methyladenosine-3'-phosphate
  modified_base 13: mod_base = OTHER; note = 2'-O-methylguanosine-3'-phosphate
  modified_base 14: mod_base = OTHER; note = 2'-deoxy-2'-fluorouridine-3'-phosphate
  modified_base 15: mod_base = OTHER; note = 2'-O-methyladenosine-3'-phosphate
  modified_base 16: mod_base = OTHER; note = 2'-deoxy-2'-fluorocytidine-3'-phosphate
  modified_base 17: mod_base = OTHER; note = 2'-O-methyluridine-3'-phosphate
  modified_base 18: mod_base = OTHER; note = 2'-O-methylcytidine-3'-phosphate
  modified_base 19: mod_base = OTHER; note = 2'-O-methylcytidine-3'-phosphate
  modified_base 20: mod_base = OTHER; note = 2'-O-methylcytidine-3'-phosphate
  modified_base 21: mod_base = OTHER; note = 2'-O-methyladenosine-3'-phosphorothioate
  modified_base 22: mod_base = OTHER; note = 2'-O-methylcytidine-3'-phosphorothioate
  modified_base 23: mod_base = OTHER; note = 2'-O-methylcytidine
tttcagattgcagtactcccacc

SEQ ID NO: 1060 - RNA, 23 nt, synthetic construct
  source 1..23: mol_type = other RNA
  modified_base 1: mod_base = OTHER; note = 2'-O-methyluridine-3'-phosphorothioate 5'-(E)-Vinylphosphonate
  modified_base 2: mod_base = OTHER; note = 2'-deoxy-2'-fluorouridine-3'-phosphorothioate
  modified_base 3: mod_base = OTHER; note = 2'-O-methyluridine-3'-phosphate
  modified_base 4: mod_base = OTHER; note = 2'-O-methyluridine-3'-phosphate
  modified_base 5: mod_base = OTHER; note = 2'-O-methyluridine-3'-phosphate
  modified_base 6: mod_base = OTHER; note = 2'-deoxy-2'-fluorocytidine-3'-phosphate
  modified_base 7: mod_base = OTHER; note = 2'-O-methyladenosine-3'-phosphate
  modified_base 8: mod_base = OTHER; note = 2'-O-methylguanosine-3'-phosphate
  modified_base 9: mod_base = OTHER; note = 2'-O-methylguanosine-3'-phosphate
  modified_base 10: mod_base = OTHER; note = 2'-O-methyluridine-3'-phosphate
  modified_base 11: mod_base = OTHER; note = 2'-O-methyluridine-3'-phosphate
  modified_base 12: mod_base = OTHER; note = 2'-O-methylguanosine-3'-phosphate
  modified_base 13: mod_base = OTHER; note = 2'-O-methylcytidine-3'-phosphate
  modified_base 14: mod_base = OTHER; note = 2'-deoxy-2'-fluoroadenosine-3'-phosphate
  modified_base 15: mod_base = OTHER; note = 2'-O-methylguanosine-3'-phosphate
  modified_base 16: mod_base = OTHER; note = 2'-deoxy-2'-fluorouridine-3'-phosphate
  modified_base 17: mod_base = OTHER; note = 2'-O-methyladenosine-3'-phosphate
  modified_base 18: mod_base = OTHER; note = 2'-O-methylcytidine-3'-phosphate
  modified_base 19: mod_base = OTHER; note = 2'-O-methyluridine-3'-phosphate
  modified_base 20: mod_base = OTHER; note = 2'-O-methylcytidine-3'-phosphate
  modified_base 21: mod_base = OTHER; note = 2'-O-methylcytidine-3'-phosphorothioate
  modified_base 22: mod_base = OTHER; note = 2'-O-methylcytidine-3'-phosphorothioate
  modified_base 23: mod_base = OTHER; note = 2'-O-methyladenosine
tttttcaggttgcagtactccca

SEQ ID NO: 1061 - RNA, 23 nt, synthetic construct
  source 1..23: mol_type = other RNA
  modified_base 1: mod_base = OTHER; note = 2'-O-methyluridine-3'-phosphorothioate 5'-(E)-Vinylphosphonate
  modified_base 2: mod_base = OTHER; note = 2'-deoxy-2'-fluorouridine-3'-phosphorothioate
  modified_base 3: mod_base = OTHER; note = 2'-O-methyluridine-3'-phosphate
  modified_base 4: mod_base = OTHER; note = 2'-O-methyluridine-3'-phosphate
  modified_base 5: mod_base = OTHER; note = 2'-O-methyluridine-3'-phosphate
  modified_base 6: mod_base = OTHER; note = 2'-deoxy-2'-fluoroadenosine-3'-phosphate
  modified_base 7: mod_base = OTHER; note = 2'-O-methyladenosine-3'-phosphate
  modified_base 8: mod_base = OTHER; note = 2'-O-methylguanosine-3'-phosphate
  modified_base 9: mod_base = OTHER; note = 2'-O-methylguanosine-3'-phosphate
  modified_base 10: mod_base = OTHER; note = 2'-O-methyluridine-3'-phosphate
  modified_base 11: mod_base = OTHER; note = 2'-O-methyluridine-3'-phosphate
  modified_base 12: mod_base = OTHER; note = 2'-O-methylguanosine-3'-phosphate
  modified_base 13: mod_base = OTHER; note = 2'-O-methylcytidine-3'-phosphate
  modified_base 14: mod_base = OTHER; note = 2'-deoxy-2'-fluoroadenosine-3'-phosphate
  modified_base 15: mod_base = OTHER; note = 2'-O-methylguanosine-3'-phosphate
  modified_base 16: mod_base = OTHER; note = 2'-deoxy-2'-fluorouridine-3'-phosphate
  modified_base 17: mod_base = OTHER; note = 2'-O-methyladenosine-3'-phosphate
  modified_base 18: mod_base = OTHER; note = 2'-O-methylcytidine-3'-phosphate
  modified_base 19: mod_base = OTHER; note = 2'-O-methyluridine-3'-phosphate
  modified_base 20: mod_base = OTHER; note = 2'-O-methylcytidine-3'-phosphate
  modified_base 21: mod_base = OTHER; note = 2'-O-methylcytidine-3'-phosphorothioate
  modified_base 22: mod_base = OTHER; note = 2'-O-methylcytidine-3'-phosphorothioate
  modified_base 23: mod_base = OTHER; note = 2'-O-methyladenosine
tttttaaggttgcagtactccca

SEQ ID NO: 1062 - RNA, 23 nt, synthetic construct
  source 1..23: mol_type = other RNA
  modified_base 1: mod_base = OTHER; note = 2'-O-methyluridine-3'-phosphorothioate 5'-(E)-Vinylphosphonate
  modified_base 2: mod_base = OTHER; note = 2'-deoxy-2'-fluoroadenosine-3'-phosphorothioate
  modified_base 3: mod_base = OTHER; note = 2'-O-methyluridine-3'-phosphate
  modified_base 4: mod_base = OTHER; note = 2'-O-methyluridine-3'-phosphate
  modified_base 5: mod_base = OTHER; note = 2'-O-methyluridine-3'-phosphate
  modified_base 6: mod_base = OTHER; note = 2'-deoxy-2'-fluorouridine-3'-phosphate
  modified_base 7: mod_base = OTHER; note = 2'-O-methyluridine-3'-phosphate
  modified_base 8: mod_base = OTHER; note = 2'-O-methyluridine-3'-phosphate
  modified_base 9: mod_base = OTHER; note = 2'-O-methylcytidine-3'-phosphate
  modified_base 10: mod_base = OTHER; note = 2'-O-methyladenosine-3'-phosphate
  modified_base 11: mod_base = OTHER; note = 2'-O-methylguanosine-3'-phosphate
  modified_base 12: mod_base = OTHER; note = 2'-O-methylguanosine-3'-phosphate
  modified_base 13: mod_base = OTHER; note = 2'-O-methyluridine-3'-phosphate
  modified_base 14: mod_base = OTHER; note = 2'-deoxy-2'-fluorouridine-3'-phosphate
  modified_base 15: mod_base = OTHER; note = 2'-O-methylguanosine-3'-phosphate
  modified_base 16: mod_base = OTHER; note = 2'-deoxy-2'-fluorocytidine-3'-phosphate
  modified_base 17: mod_base = OTHER; note = 2'-O-methyladenosine-3'-phosphate
  modified_base 18: mod_base = OTHER; note = 2'-O-methylguanosine-3'-phosphate
  modified_base 19: mod_base = OTHER; note = 2'-O-methyluridine-3'-phosphate
  modified_base 20: mod_base = OTHER; note = 2'-O-methyladenosine-3'-phosphate
  modified_base 21: mod_base = OTHER; note = 2'-O-methylcytidine-3'-phosphorothioate
  modified_base 22: mod_base = OTHER; note = 2'-O-methyluridine-3'-phosphorothioate
  modified_base 23: mod_base = OTHER; note = 2'-O-methylcytidine
tattttttcaggttgcagtactc

SEQ ID NO: 1063 - RNA, 23 nt, synthetic construct
  source 1..23: mol_type = other RNA
  modified_base 1: mod_base = OTHER; note = 2'-O-methyluridine-3'-phosphorothioate 5'-(E)-Vinylphosphonate
  modified_base 2: mod_base = OTHER; note = 2'-deoxy-2'-fluorocytidine-3'-phosphorothioate
  modified_base 3: mod_base = OTHER; note = 2'-O-methyladenosine-3'-phosphate
  modified_base 4: mod_base = OTHER; note = 2'-O-methyluridine-3'-phosphate
  modified_base 5: mod_base = OTHER; note = 2'-O-methyluridine-3'-phosphate
  modified_base 6: mod_base = OTHER; note = 2'-deoxy-2'-fluorouridine-3'-phosphate
  modified_base 7: mod_base = OTHER; note = 2'-O-methyluridine-3'-phosphate
  modified_base 8: mod_base = OTHER; note = 2'-O-methyluridine-3'-phosphate
  modified_base 9: mod_base = OTHER; note = 2'-O-methyluridine-3'-phosphate
  modified_base 10: mod_base = OTHER; note = 2'-O-methylcytidine-3'-phosphate
  modified_base 11: mod_base = OTHER; note = 2'-O-methyladenosine-3'-phosphate
  modified_base 12: mod_base = OTHER; note = 2'-O-methylguanosine-3'-phosphate
  modified_base 13: mod_base = OTHER; note = 2'-O-methylguanosine-3'-phosphate
  modified_base 14: mod_base = OTHER; note = 2'-deoxy-2'-fluorouridine-3'-phosphate
  modified_base 15: mod_base = OTHER; note = 2'-O-methyluridine-3'-phosphate
  modified_base 16: mod_base = OTHER; note = 2'-deoxy-2'-fluoroguanosine-3'-phosphate
  modified_base 17: mod_base = OTHER; note = 2'-O-methylcytidine-3'-phosphate
  modified_base 18: mod_base = OTHER; note = 2'-O-methyladenosine-3'-phosphate
  modified_base 19: mod_base = OTHER; note = 2'-O-methylguanosine-3'-phosphate
  modified_base 20: mod_base = OTHER; note = 2'-O-methyluridine-3'-phosphate
  modified_base 21: mod_base = OTHER; note = 2'-O-methyladenosine-3'-phosphorothioate
  modified_base 22: mod_base = OTHER; note = 2'-O-methylcytidine-3'-phosphorothioate
  modified_base 23: mod_base = OTHER; note = 2'-O-methyluridine
tcattttttcaggttgcagtact

SEQ ID NO: 1064 - RNA, 23 nt, synthetic construct
  source 1..23: mol_type = other RNA
  modified_base 1: mod_base = OTHER; note = 2'-O-methyluridine-3'-phosphorothioate 5'-(E)-Vinylphosphonate
  modified_base 2: mod_base = OTHER; note = 2'-deoxy-2'-fluorouridine-3'-phosphorothioate
  modified_base 3: mod_base = OTHER; note = 2'-O-methylcytidine-3'-phosphate
  modified_base 4: mod_base = OTHER; note = 2'-O-methylcytidine-3'-phosphate
  modified_base 5: mod_base = OTHER; note = 2'-O-methyluridine-3'-phosphate
  modified_base 6: mod_base = OTHER; note = 2'-deoxy-2'-fluoroguanosine-3'-phosphate
  modified_base 7: mod_base = OTHER; note = 2'-O-methyladenosine-3'-phosphate
  modified_base 8: mod_base = OTHER; note = 2'-O-methylguanosine-3'-phosphate
  modified_base 9: mod_base = OTHER; note = 2'-O-methylcytidine-3'-phosphate
  modified_base 10: mod_base = OTHER; note = 2'-O-methyladenosine-3'-phosphate
  modified_base 11: mod_base = OTHER; note = 2'-O-methyluridine-3'-phosphate
  modified_base 12: mod_base = OTHER; note = 2'-O-methyluridine-3'-phosphate
  modified_base 13: mod_base = OTHER; note = 2'-O-methyluridine-3'-phosphate
  modified_base 14: mod_base = OTHER; note = 2'-deoxy-2'-fluorouridine-3'-phosphate
  modified_base 15: mod_base = OTHER; note = 2'-O-methyluridine-3'-phosphate
  modified_base 16: mod_base = OTHER; note = 2'-deoxy-2'-fluorouridine-3'-phosphate
  modified_base 17: mod_base = OTHER; note = 2'-O-methylcytidine-3'-phosphate
  modified_base 18: mod_base = OTHER; note = 2'-O-methyladenosine-3'-phosphate
  modified_base 19: mod_base = OTHER; note = 2'-O-methylguanosine-3'-phosphate
  modified_base 20: mod_base = OTHER; note = 2'-O-methylguanosine-3'-phosphate
  modified_base 21: mod_base = OTHER; note = 2'-O-methyluridine-3'-phosphorothioate
  modified_base 22: mod_base = OTHER; note = 2'-O-methyluridine-3'-phosphorothioate
  modified_base 23: mod_base = OTHER; note = 2'-O-methylguanosine
ttcctgagcattttttcaggttg

SEQ ID NO: 1065 - RNA, 23 nt, synthetic construct
  source 1..23: mol_type = other RNA
  modified_base 1: mod_base = OTHER; note = 2'-O-methyluridine-3'-phosphorothioate 5'-(E)-Vinylphosphonate
  modified_base 2: mod_base = OTHER; note = 2'-deoxy-2'-fluorouridine-3'-phosphorothioate
  modified_base 3: mod_base = OTHER; note = 2'-O-methylcytidine-3'-phosphate
  modified_base 4: mod_base = OTHER; note = 2'-O-methylcytidine-3'-phosphate
  modified_base 5: mod_base = OTHER; note = 2'-O-methyluridine-3'-phosphate
  modified_base 6: mod_base = OTHER; note = 2'-deoxy-2'-fluoroadenosine-3'-phosphate
  modified_base 7: mod_base = OTHER; note = 2'-O-methyladenosine-3'-phosphate
  modified_base 8: mod_base = OTHER; note = 2'-O-methylguanosine-3'-phosphate
  modified_base 9: mod_base = OTHER; note = 2'-O-methylcytidine-3'-phosphate
  modified_base 10: mod_base = OTHER; note = 2'-O-methyladenosine-3'-phosphate
  modified_base 11: mod_base = OTHER; note = 2'-O-methyluridine-3'-phosphate
  modified_base 12: mod_base = OTHER; note = 2'-O-methyluridine-3'-phosphate
  modified_base 13: mod_base = OTHER; note = 2'-O-methyluridine-3'-phosphate
  modified_base 14: mod_base = OTHER; note = 2'-deoxy-2'-fluorouridine-3'-phosphate
  modified_base 15: mod_base = OTHER; note = 2'-O-methyluridine-3'-phosphate
  modified_base 16: mod_base = OTHER; note = 2'-deoxy-2'-fluorouridine-3'-phosphate
  modified_base 17: mod_base = OTHER; note = 2'-O-methylcytidine-3'-phosphate
  modified_base 18: mod_base = OTHER; note = 2'-O-methyladenosine-3'-phosphate
  modified_base 19: mod_base = OTHER; note = 2'-O-methylguanosine-3'-phosphate
  modified_base 20: mod_base = OTHER; note = 2'-O-methylguanosine-3'-phosphate
  modified_base 21: mod_base = OTHER; note = 2'-O-methyluridine-3'-phosphorothioate
  modified_base 22: mod_base = OTHER; note = 2'-O-methyluridine-3'-phosphorothioate
  modified_base 23: mod_base = OTHER; note = 2'-O-methylguanosine
ttcctaagcattttttcaggttg

SEQ ID NO: 1066 - RNA, 23 nt, synthetic construct
  source 1..23: mol_type = other RNA
  modified_base 1: mod_base = OTHER; note = 2'-O-methyluridine-3'-phosphorothioate 5'-(E)-Vinylphosphonate
  modified_base 2: mod_base = OTHER; note = 2'-deoxy-2'-fluorocytidine-3'-phosphorothioate
  modified_base 3: mod_base = OTHER; note = 2'-O-methyluridine-3'-phosphate
  modified_base 4: mod_base = OTHER; note = 2'-O-methylguanosine-3'-phosphate
  modified_base 5: mod_base = OTHER; note = 2'-O-methyluridine-3'-phosphate
  modified_base 6: mod_base = OTHER; note = 2'-deoxy-2'-fluorouridine-3'-phosphate
  modified_base 7: mod_base = OTHER; note = 2'-O-methylcytidine-3'-phosphate
  modified_base 8: mod_base = OTHER; note = 2'-O-methylcytidine-3'-phosphate
  modified_base 9: mod_base = OTHER; note = 2'-O-methyluridine-3'-phosphate
  modified_base 10: mod_base = OTHER; note = 2'-O-methylguanosine-3'-phosphate
  modified_base 11: mod_base = OTHER; note = 2'-O-methyladenosine-3'-phosphate
  modified_base 12: mod_base = OTHER; note = 2'-O-methylguanosine-3'-phosphate
  modified_base 13: mod_base = OTHER; note = 2'-O-methylcytidine-3'-phosphate
  modified_base 14: mod_base = OTHER; note = 2'-deoxy-2'-fluoroadenosine-3'-phosphate
  modified_base 15: mod_base = OTHER; note = 2'-O-methyluridine-3'-phosphate
  modified_base 16: mod_base = OTHER; note = 2'-deoxy-2'-fluorouridine-3'-phosphate
  modified_base 17: mod_base = OTHER; note = 2'-O-methyluridine-3'-phosphate
  modified_base 18: mod_base = OTHER; note = 2'-O-methyluridine-3'-phosphate
  modified_base 19: mod_base = OTHER; note = 2'-O-methyluridine-3'-phosphate
  modified_base 20: mod_base = OTHER; note = 2'-O-methyluridine-3'-phosphate
  modified_base 21: mod_base = OTHER; note = 2'-O-methylcytidine-3'-phosphorothioate
  modified_base 22: mod_base = OTHER; note = 2'-O-methyladenosine-3'-phosphorothioate
  modified_base 23: mod_base = OTHER; note = 2'-O-methylguanosine
tctgttcctgagcattttttcag

SEQ ID NO: 1067 - RNA, 23 nt, synthetic construct
  source 1..23: mol_type = other RNA
  modified_base 1: mod_base = OTHER; note = 2'-O-methyluridine-3'-phosphorothioate 5'-(E)-Vinylphosphonate
  modified_base 2: mod_base = OTHER; note = 2'-deoxy-2'-fluorocytidine-3'-phosphorothioate
  modified_base 3: mod_base = OTHER; note = 2'-O-methylcytidine-3'-phosphate
  modified_base 4: mod_base = OTHER; note = 2'-O-methylcytidine-3'-phosphate
  modified_base 5: mod_base = OTHER; note = 2'-O-methyladenosine-3'-phosphate
  modified_base 6: mod_base = OTHER; note = 2'-deoxy-2'-fluoroadenosine-3'-phosphate
  modified_base 7: mod_base = OTHER; note = 2'-O-methyladenosine-3'-phosphate
  modified_base 8: mod_base = OTHER; note = 2'-O-methylcytidine-3'-phosphate
  modified_base 9: mod_base = OTHER; note = 2'-O-methyladenosine-3'-phosphate
  modified_base 10: mod_base = OTHER; note = 2'-O-methyluridine-3'-phosphate
  modified_base 11: mod_base = OTHER; note = 2'-O-methyladenosine-3'-phosphate
  modified_base 12: mod_base = OTHER; note = 2'-O-methylcytidine-3'-phosphate
  modified_base 13: mod_base = OTHER; note = 2'-O-methyladenosine-3'-phosphate
  modified_base 14: mod_base = OTHER; note = 2'-deoxy-2'-fluoroguanosine-3'-phosphate
  modified_base 15: mod_base = OTHER; note = 2'-O-methyluridine-3'-phosphate
  modified_base 16: mod_base = OTHER; note = 2'-deoxy-2'-fluorocytidine-3'-phosphate
  modified_base 17: mod_base = OTHER; note = 2'-O-methyluridine-3'-phosphate
  modified_base 18: mod_base = OTHER; note = 2'-O-methyluridine-3'-phosphate
  modified_base 19: mod_base = OTHER; note = 2'-O-methylcytidine-3'-phosphate
  modified_base 20: mod_base = OTHER; note = 2'-O-methyluridine-3'-phosphate
  modified_base 21: mod_base = OTHER; note = 2'-O-methyluridine-3'-phosphorothioate
  modified_base 22: mod_base = OTHER; note = 2'-O-methylcytidine-3'-phosphorothioate
  modified_base 23: mod_base = OTHER; note = 2'-O-methylguanosine
tcccaaacatacagtcttcttcg

SEQ ID NO: 1068 - RNA, 23 nt, synthetic construct
  source 1..23: mol_type = other RNA
  modified_base 1: mod_base = OTHER; note = 2'-O-methyluridine-3'-phosphorothioate 5'-(E)-Vinylphosphonate
  modified_base 2: mod_base = OTHER; note = 2'-deoxy-2'-fluorouridine-3'-phosphorothioate
  modified_base 3: mod_base = OTHER; note = 2'-O-methylcytidine-3'-phosphate
  modified_base 4: mod_base = OTHER; note = 2'-O-methyluridine-3'-phosphate
  modified_base 5: mod_base = OTHER; note = 2'-O-methylcytidine-3'-phosphate
  modified_base 6: mod_base = OTHER; note = 2'-deoxy-2'-fluorouridine-3'-phosphate
  modified_base 7: mod_base = OTHER; note = 2'-O-methylguanosine-3'-phosphate
  modified_base 8: mod_base = OTHER; note = 2'-O-methylguanosine-3'-phosphate
  modified_base 9: mod_base = OTHER; note = 2'-O-methyladenosine-3'-phosphate
  modified_base 10: mod_base = OTHER; note = 2'-O-methylguanosine-3'-phosphate
  modified_base 11: mod_base = OTHER; note = 2'-O-methyluridine-3'-phosphate
  modified_base 12: mod_base = OTHER; note = 2'-O-methylguanosine-3'-phosphate
  modified_base 13: mod_base = OTHER; note = 2'-O-methyladenosine-3'-phosphate
  modified_base 14: mod_base = OTHER; note = 2'-deoxy-2'-fluoroadenosine-3'-phosphate
  modified_base 15: mod_base = OTHER; note = 2'-O-methyladenosine-3'-phosphate
  modified_base 16: mod_base = OTHER; note = 2'-deoxy-2'-fluoroadenosine-3'-phosphate
  modified_base 17: mod_base = OTHER; note = 2'-O-methyluridine-3'-phosphate
  modified_base 18: mod_base = OTHER; note = 2'-O-methylguanosine-3'-phosphate
  modified_base 19: mod_base = OTHER; note = 2'-O-methylcytidine-3'-phosphate
  modified_base 20: mod_base = OTHER; note = 2'-O-methyluridine-3'-phosphate
  modified_base 21: mod_base = OTHER; note = 2'-O-methylguanosine-3'-phosphorothioate
  modified_base 22: mod_base = OTHER; note = 2'-O-methyluridine-3'-phosphorothioate
  modified_base 23: mod_base = OTHER; note = 2'-O-methylguanosine
ttctctggagtgaaaatgctgtg

SEQ ID NO: 1069 - RNA, 23 nt, synthetic construct
  source 1..23: mol_type = other RNA
  modified_base 1: mod_base = OTHER; note = 2'-O-methyluridine-3'-phosphorothioate 5'-(E)-Vinylphosphonate
  modified_base 2: mod_base = OTHER; note = 2'-deoxy-2'-fluorouridine-3'-phosphorothioate
  modified_base 3: mod_base = OTHER; note = 2'-O-methylcytidine-3'-phosphate
  modified_base 4: mod_base = OTHER; note = 2'-O-methyluridine-3'-phosphate
  modified_base 5: mod_base = OTHER; note = 2'-O-methylcytidine-3'-phosphate
  modified_base 6: mod_base = OTHER; note = 2'-deoxy-2'-fluorouridine-3'-phosphate
  modified_base 7: mod_base = OTHER; note = 2'-O-methyladenosine-3'-phosphate
  modified_base 8: mod_base = OTHER; note = 2'-O-methylguanosine-3'-phosphate
  modified_base 9: mod_base = OTHER; note = 2'-O-methyladenosine-3'-phosphate
  modified_base 10: mod_base = OTHER; note = 2'-O-methylguanosine-3'-phosphate
  modified_base 11: mod_base = OTHER; note = 2'-O-methyluridine-3'-phosphate
  modified_base 12: mod_base = OTHER; note = 2'-O-methylguanosine-3'-phosphate
  modified_base 13: mod_base = OTHER; note = 2'-O-methyladenosine-3'-phosphate
  modified_base 14: mod_base = OTHER; note = 2'-deoxy-2'-fluoroadenosine-3'-phosphate
  modified_base 15: mod_base = OTHER; note = 2'-O-methyladenosine-3'-phosphate
  modified_base 16: mod_base = OTHER; note = 2'-deoxy-2'-fluoroadenosine-3'-phosphate
  modified_base 17: mod_base = OTHER; note = 2'-O-methyluridine-3'-phosphate
  modified_base 18: mod_base = OTHER; note = 2'-O-methylguanosine-3'-phosphate
  modified_base 19: mod_base = OTHER; note = 2'-O-methylcytidine-3'-phosphate
  modified_base 20: mod_base = OTHER; note = 2'-O-methyluridine-3'-phosphate
  modified_base 21: mod_base = OTHER; note = 2'-O-methylguanosine-3'-phosphorothioate
  modified_base 22: mod_base = OTHER; note = 2'-O-methyluridine-3'-phosphorothioate
  modified_base 23: mod_base = OTHER; note = 2'-O-methylguanosine
ttctctagagtgaaaatgctgtg

SEQ ID NO: 1070 - RNA, 23 nt, synthetic construct
  source 1..23: mol_type = other RNA
  modified_base 1: mod_base = OTHER; note = 2'-O-methyluridine-3'-phosphorothioate 5'-(E)-Vinylphosphonate
  modified_base 2: mod_base = OTHER; note = 2'-deoxy-2'-fluoroguanosine-3'-phosphorothioate
  modified_base 3: mod_base = OTHER; note = 2'-O-methyluridine-3'-phosphate
  modified_base 4: mod_base = OTHER; note = 2'-O-methylcytidine-3'-phosphate
  modified_base 5: mod_base = OTHER; note = 2'-O-methyluridine-3'-phosphate
  modified_base 6: mod_base = OTHER; note = 2'-deoxy-2'-fluorocytidine-3'-phosphate
  modified_base 7: mod_base = OTHER; note = 2'-O-methyluridine-3'-phosphate
  modified_base 8: mod_base = OTHER; note = 2'-O-methylguanosine-3'-phosphate
  modified_base 9: mod_base = OTHER; note = 2'-O-methylguanosine-3'-phosphate
  modified_base 10: mod_base = OTHER; note = 2'-O-methyladenosine-3'-phosphate
  modified_base 11: mod_base = OTHER; note = 2'-O-methylguanosine-3'-phosphate
  modified_base 12: mod_base = OTHER; note = 2'-O-methyluridine-3'-phosphate
  modified_base 13: mod_base = OTHER; note = 2'-O-methylguanosine-3'-phosphate
  modified_base 14: mod_base = OTHER; note = 2'-deoxy-2'-fluoroadenosine-3'-phosphate
  modified_base 15: mod_base = OTHER; note = 2'-O-methyladenosine-3'-phosphate
  modified_base 16: mod_base = OTHER; note = 2'-deoxy-2'-fluoroadenosine-3'-phosphate
  modified_base 17: mod_base = OTHER; note = 2'-O-methyladenosine-3'-phosphate
  modified_base 18: mod_base = OTHER; note = 2'-O-methyluridine-3'-phosphate
  modified_base 19: mod_base = OTHER; note = 2'-O-methylguanosine-3'-phosphate
  modified_base 20: mod_base = OTHER; note = 2'-O-methylcytidine-3'-phosphate
  modified_base 21: mod_base = OTHER; note = 2'-O-methyluridine-3'-phosphorothioate
  modified_base 22: mod_base = OTHER; note = 2'-O-methylguanosine-3'-phosphorothioate
  modified_base 23: mod_base = OTHER; note = 2'-O-methyluridine
tgtctctggagtgaaaatgctgt

SEQ ID NO: 1071 - RNA, 23 nt, synthetic construct
  source 1..23: mol_type = other RNA
  modified_base 1: mod_base = OTHER; note = 2'-O-methyluridine-3'-phosphorothioate 5'-(E)-Vinylphosphonate
  modified_base 2: mod_base = OTHER; note = 2'-deoxy-2'-fluoroguanosine-3'-phosphorothioate
  modified_base 3: mod_base = OTHER; note = 2'-O-methyluridine-3'-phosphate
  modified_base 4: mod_base = OTHER; note = 2'-O-methylcytidine-3'-phosphate
  modified_base 5: mod_base = OTHER; note = 2'-O-methyluridine-3'-phosphate
  modified_base 6: mod_base = OTHER; note = 2'-deoxy-2'-fluorocytidine-3'-phosphate
  modified_base 7: mod_base = OTHER; note = 2'-O-methyladenosine-3'-phosphate
  modified_base 8: mod_base = OTHER; note = 2'-O-methylguanosine-3'-phosphate
  modified_base 9: mod_base = OTHER; note = 2'-O-methylguanosine-3'-phosphate
  modified_base 10: mod_base = OTHER; note = 2'-O-methyladenosine-3'-phosphate
  modified_base 11: mod_base = OTHER; note = 2'-O-methylguanosine-3'-phosphate
  modified_base 12: mod_base = OTHER; note = 2'-O-methyluridine-3'-phosphate
  modified_base 13: mod_base = OTHER; note = 2'-O-methylguanosine-3'-phosphate
  modified_base 14: mod_base = OTHER; note = 2'-deoxy-2'-fluoroadenosine-3'-phosphate
  modified_base 15: mod_base = OTHER; note = 2'-O-methyladenosine-3'-phosphate
  modified_base 16: mod_base = OTHER; note = 2'-deoxy-2'-fluoroadenosine-3'-phosphate
  modified_base 17: mod_base = OTHER; note = 2'-O-methyladenosine-3'-phosphate
  modified_base 18: mod_base = OTHER; note = 2'-O-methyluridine-3'-phosphate
  modified_base 19: mod_base = OTHER; note = 2'-O-methylguanosine-3'-phosphate
  modified_base 20: mod_base = OTHER; note = 2'-O-methylcytidine-3'-phosphate
  modified_base 21: mod_base = OTHER; note = 2'-O-methyluridine-3'-phosphorothioate
  modified_base 22: mod_base = OTHER; note = 2'-O-methylguanosine-3'-phosphorothioate
  modified_base 23: mod_base = OTHER; note = 2'-O-methyluridine
tgtctcaggagtgaaaatgctgt

SEQ ID NO: 1072 - RNA, 23 nt, synthetic construct
  source 1..23: mol_type = other RNA
  modified_base 1: mod_base = OTHER; note = 2'-O-methyluridine-3'-phosphorothioate 5'-(E)-Vinylphosphonate
  modified_base 2: mod_base = OTHER; note = 2'-deoxy-2'-fluorouridine-3'-phosphorothioate
  modified_base 3: mod_base = OTHER; note = 2'-O-methylguanosine-3'-phosphate
  modified_base 4: mod_base = OTHER; note = 2'-O-methyluridine-3'-phosphate
  modified_base 5: mod_base = OTHER; note = 2'-O-methylcytidine-3'-phosphate
  modified_base 6: mod_base = OTHER; note = 2'-deoxy-2'-fluorouridine-3'-phosphate
  modified_base 7: mod_base = OTHER; note = 2'-O-methylcytidine-3'-phosphate
  modified_base 8: mod_base = OTHER; note = 2'-O-methyluridine-3'-phosphate
  modified_base 9: mod_base = OTHER; note = 2'-O-methylguanosine-3'-phosphate
  modified_base 10: mod_base = OTHER; note = 2'-O-methylguanosine-3'-phosphate
  modified_base 11: mod_base = OTHER; note = 2'-O-methyladenosine-3'-phosphate
  modified_base 12: mod_base = OTHER; note = 2'-O-methylguanosine-3'-phosphate
  modified_base 13: mod_base = OTHER; note = 2'-O-methyluridine-3'-phosphate
  modified_base 14: mod_base = OTHER; note = 2'-deoxy-2'-fluoroguanosine-3'-phosphate
  modified_base 15: mod_base = OTHER; note = 2'-O-methyladenosine-3'-phosphate
  modified_base 16: mod_base = OTHER; note = 2'-deoxy-2'-fluoroadenosine-3'-phosphate
  modified_base 17: mod_base = OTHER; note = 2'-O-methyladenosine-3'-phosphate
  modified_base 18: mod_base = OTHER; note = 2'-O-methyladenosine-3'-phosphate
  modified_base 19: mod_base = OTHER; note = 2'-O-methyluridine-3'-phosphate
  modified_base 20: mod_base = OTHER; note = 2'-O-methylguanosine-3'-phosphate
  modified_base 21: mod_base = OTHER; note = 2'-O-methylcytidine-3'-phosphorothioate
  modified_base 22: mod_base = OTHER; note = 2'-O-methyluridine-3'-phosphorothioate
  modified_base 23: mod_base = OTHER; note = 2'-O-methylguanosine
ttgtctctggagtgaaaatgctg

SEQ ID NO: 1073 - RNA, 23 nt, synthetic construct
  source 1..23: mol_type = other RNA
  modified_base 1: mod_base = OTHER; note = 2'-O-methyluridine-3'-phosphorothioate 5'-(E)-Vinylphosphonate
  modified_base 2: mod_base = OTHER; note = 2'-deoxy-2'-fluorouridine-3'-phosphorothioate
  modified_base 3: mod_base = OTHER; note = 2'-O-methylguanosine-3'-phosphate
  modified_base 4: mod_base = OTHER; note = 2'-O-methyluridine-3'-phosphate
  modified_base 5: mod_base = OTHER; note = 2'-O-methylcytidine-3'-phosphate
  modified_base 6: mod_base = OTHER; note = 2'-deoxy-2'-fluorouridine-3'-phosphate
  modified_base 7: mod_base = OTHER; note = 2'-O-methyladenosine-3'-phosphate
  modified_base 8: mod_base = OTHER; note = 2'-O-methyluridine-3'-phosphate
  modified_base 9: mod_base = OTHER; note = 2'-O-methylguanosine-3'-phosphate
  modified_base 10: mod_base = OTHER; note = 2'-O-methylguanosine-3'-phosphate
  modified_base 11: mod_base = OTHER; note = 2'-O-methyladenosine-3'-phosphate
  modified_base 12: mod_base = OTHER; note = 2'-O-methylguanosine-3'-phosphate
  modified_base 13: mod_base = OTHER; note = 2'-O-methyluridine-3'-phosphate
  modified_base 14: mod_base = OTHER; note = 2'-deoxy-2'-fluoroguanosine-3'-phosphate
  modified_base 15: mod_base = OTHER; note = 2'-O-methyladenosine-3'-phosphate
  modified_base 16: mod_base = OTHER; note = 2'-deoxy-2'-fluoroadenosine-3'-phosphate
  modified_base 17: mod_base = OTHER; note = 2'-O-methyladenosine-3'-phosphate
  modified_base 18: mod_base = OTHER; note = 2'-O-methyladenosine-3'-phosphate
  modified_base 19: mod_base = OTHER; note = 2'-O-methyluridine-3'-phosphate
  modified_base 20: mod_base = OTHER; note = 2'-O-methylguanosine-3'-phosphate
  modified_base 21: mod_base = OTHER; note = 2'-O-methylcytidine-3'-phosphorothioate
  modified_base 22: mod_base = OTHER; note = 2'-O-methyluridine-3'-phosphorothioate
  modified_base 23: mod_base = OTHER; note = 2'-O-methylguanosine
ttgtctatggagtgaaaatgctg

SEQ ID NO: 1074 - RNA, 23 nt, synthetic construct
  source 1..23: mol_type = other RNA
  modified_base 1: mod_base = OTHER; note = 2'-O-methyluridine-3'-phosphorothioate 5'-(E)-Vinylphosphonate
  modified_base 2: mod_base = OTHER; note = 2'-deoxy-2'-fluorouridine-3'-phosphorothioate
  modified_base 3: mod_base = OTHER; note = 2'-O-methylguanosine-3'-phosphate
  modified_base 4: mod_base = OTHER; note = 2'-O-methylguanosine-3'-phosphate
  modified_base 5: mod_base = OTHER; note = 2'-O-methyladenosine-3'-phosphate
  modified_base 6: mod_base = OTHER; note = 2'-deoxy-2'-fluorouridine-3'-phosphate
  modified_base 7: mod_base = OTHER; note = 2'-O-methyluridine-3'-phosphate
  modified_base 8: mod_base = OTHER; note = 2'-O-methyluridine-3'-phosphate
  modified_base 9: mod_base = OTHER; note = 2'-O-methylguanosine-3'-phosphate
  modified_base 10: mod_base = OTHER; note = 2'-O-methyluridine-3'-phosphate
  modified_base 11: mod_base = OTHER; note = 2'-O-methylcytidine-3'-phosphate
  modified_base 12: mod_base = OTHER; note = 2'-O-methyluridine-3'-phosphate
  modified_base 13: mod_base = OTHER; note = 2'-O-methylcytidine-3'-phosphate
  modified_base 14: mod_base = OTHER; note = 2'-deoxy-2'-fluorouridine-3'-phosphate
  modified_base 15: mod_base = OTHER; note = 2'-O-methylguanosine-3'-phosphate
  modified_base 16: mod_base = OTHER; note = 2'-deoxy-2'-fluoroguanosine-3'-phosphate
  modified_base 17: mod_base = OTHER; note = 2'-O-methyladenosine-3'-phosphate
  modified_base 18: mod_base = OTHER; note = 2'-O-methylguanosine-3'-phosphate
  modified_base 19: mod_base = OTHER; note = 2'-O-methyluridine-3'-phosphate
  modified_base 20: mod_base = OTHER; note = 2'-O-methylguanosine-3'-phosphate
  modified_base 21: mod_base = OTHER; note = 2'-O-methyladenosine-3'-phosphorothioate
  modified_base 22: mod_base = OTHER; note = 2'-O-methyladenosine-3'-phosphorothioate
  modified_base 23: mod_base = OTHER; note = 2'-O-methyladenosine
ttggatttgtctctggagtgaaa

SEQ ID NO: 1075 - RNA, 23 nt, synthetic construct
  source 1..23: mol_type = other RNA
  modified_base 1: mod_base = OTHER; note = 2'-O-methyluridine-3'-phosphorothioate 5'-(E)-Vinylphosphonate
  modified_base 2: mod_base = OTHER; note = 2'-deoxy-2'-fluoroguanosine-3'-phosphorothioate
  modified_base 3: mod_base = OTHER; note = 2'-O-methyluridine-3'-phosphate
  modified_base 4: mod_base = OTHER; note = 2'-O-methyladenosine-3'-phosphate
  modified_base 5: mod_base = OTHER; note = 2'-O-methylguanosine-3'-phosphate
  modified_base 6: mod_base = OTHER; note = 2'-deoxy-2'-fluorocytidine-3'-phosphate
  modified_base 7: mod_base = OTHER; note = 2'-O-methyladenosine-3'-phosphate
  modified_base 8: mod_base = OTHER; note = 2'-O-methylcytidine-3'-phosphate
  modified_base 9: mod_base = OTHER; note = 2'-O-methylcytidine-3'-phosphate
  modified_base 10: mod_base = OTHER; note = 2'-O-methyladenosine-3'-phosphate
  modified_base 11: mod_base = OTHER; note = 2'-O-methylguanosine-3'-phosphate
  modified_base 12: mod_base = OTHER; note = 2'-O-methylguanosine-3'-phosphate
  modified_base 13: mod_base = OTHER; note = 2'-O-methylguanosine-3'-phosphate
  modified_base 14: mod_base = OTHER; note = 2'-deoxy-2'-fluoroadenosine-3'-phosphate
  modified_base 15: mod_base = OTHER; note = 2'-O-methylcytidine-3'-phosphate
  modified_base 16: mod_base = OTHER; note = 2'-deoxy-2'-fluorocytidine-3'-phosphate
  modified_base 17: mod_base = OTHER; note = 2'-O-methyladenosine-3'-phosphate
  modified_base 18: mod_base = OTHER; note = 2'-O-methylcytidine-3'-phosphate
  modified_base 19: mod_base = OTHER; note = 2'-O-methylcytidine-3'-phosphate
  modified_base 20: mod_base = OTHER; note = 2'-O-methyluridine-3'-phosphate
  modified_base 21: mod_base = OTHER; note = 2'-O-methyladenosine-3'-phosphorothioate
  modified_base 22: mod_base = OTHER; note = 2'-O-methylcytidine-3'-phosphorothioate
  modified_base 23: mod_base = OTHER; note = 2'-O-methyladenosine
tgtagcaccagggaccacctaca

SEQ ID NO: 1076 - RNA, 23 nt, synthetic construct
  source 1..23: mol_type = other RNA
  modified_base 1: mod_base = OTHER; note = 2'-O-methyluridine-3'-phosphorothioate 5'-(E)-Vinylphosphonate
  modified_base 2: mod_base = OTHER; note = 2'-deoxy-2'-fluoroguanosine-3'-phosphorothioate
  modified_base 3: mod_base = OTHER; note = 2'-O-methyluridine-3'-phosphate
  modified_base 4: mod_base = OTHER; note = 2'-O-methyladenosine-3'-phosphate
  modified_base 5: mod_base = OTHER; note = 2'-O-methylguanosine-3'-phosphate
  modified_base 6: mod_base = OTHER; note = 2'-deoxy-2'-fluoroadenosine-3'-phosphate
  modified_base 7: mod_base = OTHER; note = 2'-O-methyladenosine-3'-phosphate
  modified_base 8: mod_base = OTHER; note = 2'-O-methylcytidine-3'-phosphate
  modified_base 9: mod_base = OTHER; note = 2'-O-methylcytidine-3'-phosphate
  modified_base 10: mod_base = OTHER; note = 2'-O-methyladenosine-3'-phosphate
  modified_base 11: mod_base = OTHER; note = 2'-O-methylguanosine-3'-phosphate
  modified_base 12: mod_base = OTHER; note = 2'-O-methylguanosine-3'-phosphate
  modified_base 13: mod_base = OTHER; note = 2'-O-methylguanosine-3'-phosphate
  modified_base 14: mod_base = OTHER; note = 2'-deoxy-2'-fluoroadenosine-3'-phosphate
  modified_base 15: mod_base = OTHER; note = 2'-O-methylcytidine-3'-phosphate
  modified_base 16: mod_base = OTHER; note = 2'-deoxy-2'-fluorocytidine-3'-phosphate
  modified_base 17: mod_base = OTHER; note = 2'-O-methyladenosine-3'-phosphate
  modified_base 18: mod_base = OTHER; note = 2'-O-methylcytidine-3'-phosphate
  modified_base 19: mod_base = OTHER; note = 2'-O-methylcytidine-3'-phosphate
  modified_base 20: mod_base = OTHER; note = 2'-O-methyluridine-3'-phosphate
  modified_base 21: mod_base = OTHER; note = 2'-O-methyladenosine-3'-phosphorothioate
  modified_base 22: mod_base = OTHER; note = 2'-O-methylcytidine-3'-phosphorothioate
  modified_base 23: mod_base = OTHER; note = 2'-O-methyladenosine
tgtagaaccagggaccacctaca

SEQ ID NO: 1077 - RNA, 23 nt, synthetic construct
  source 1..23: mol_type = other RNA
  modified_base 1: mod_base = OTHER; note = 2'-O-methyluridine-3'-phosphorothioate 5'-(E)-Vinylphosphonate
  modified_base 2: mod_base = OTHER; note = 2'-deoxy-2'-fluoroguanosine-3'-phosphorothioate
  modified_base 3: mod_base = OTHER; note = 2'-O-methyladenosine-3'-phosphate
  modified_base 4: mod_base = OTHER; note = 2'-O-methyluridine-3'-phosphate
  modified_base 5: mod_base = OTHER; note = 2'-O-methyluridine-3'-phosphate
  modified_base 6: mod_base = OTHER; note = 2'-deoxy-2'-fluorouridine-3'-phosphate
  modified_base 7: mod_base = OTHER; note = 2'-O-methylguanosine-3'-phosphate
  modified_base 8: mod_base = OTHER; note = 2'-O-methyluridine-3'-phosphate
  modified_base 9: mod_base = OTHER; note = 2'-O-methylcytidine-3'-phosphate
  modified_base 10: mod_base = OTHER; note = 2'-O-methylguanosine-3'-phosphate
  modified_base 11: mod_base = OTHER; note = 2'-O-methyluridine-3'-phosphate
  modified_base 12: mod_base = OTHER; note = 2'-O-methylguanosine-3'-phosphate
  modified_base 13: mod_base = OTHER; note = 2'-O-methyluridine-3'-phosphate
  modified_base 14: mod_base = OTHER; note = 2'-deoxy-2'-fluoroadenosine-3'-phosphate
  modified_base 15: mod_base = OTHER; note = 2'-O-methylguanosine-3'-phosphate
  modified_base 16: mod_base = OTHER; note = 2'-deoxy-2'-fluorocytidine-3'-phosphate
  modified_base 17: mod_base = OTHER; note = 2'-O-methyladenosine-3'-phosphate
  modified_base 18: mod_base = OTHER; note = 2'-O-methylcytidine-3'-phosphate
  modified_base 19: mod_base = OTHER; note = 2'-O-methylcytidine-3'-phosphate
  modified_base 20: mod_base = OTHER; note = 2'-O-methyladenosine-3'-phosphate
  modified_base 21: mod_base = OTHER; note = 2'-O-methylguanosine-3'-phosphorothioate
  modified_base 22: mod_base = OTHER; note = 2'-O-methylguanosine-3'-phosphorothioate
  modified_base 23: mod_base = OTHER; note = 2'-O-methylguanosine
tgatttgtcgtgtagcaccaggg

SEQ ID NO: 1078 - RNA, 23 nt, synthetic construct
  source 1..23: mol_type = other RNA
  modified_base 1: mod_base = OTHER; note = 2'-O-methyluridine-3'-phosphorothioate 5'-(E)-Vinylphosphonate
  modified_base 2: mod_base = OTHER; note = 2'-deoxy-2'-fluoroguanosine-3'-phosphorothioate
  modified_base 3: mod_base = OTHER; note = 2'-O-methyladenosine-3'-phosphate
  modified_base 4: mod_base = OTHER; note = 2'-O-methyluridine-3'-phosphate
  modified_base 5: mod_base = OTHER; note = 2'-O-methyluridine-3'-phosphate
  modified_base 6: mod_base = OTHER; note = 2'-deoxy-2'-fluorouridine-3'-phosphate
  modified_base 7: mod_base = OTHER; note = 2'-O-methyladenosine-3'-phosphate
  modified_base 8: mod_base = OTHER; note = 2'-O-methyluridine-3'-phosphate
  modified_base 9: mod_base = OTHER; note = 2'-O-methylcytidine-3'-phosphate
  modified_base 10: mod_base = OTHER; note = 2'-O-methylguanosine-3'-phosphate
  modified_base 11: mod_base = OTHER; note = 2'-O-methyluridine-3'-phosphate
  modified_base 12: mod_base = OTHER; note = 2'-O-methylguanosine-3'-phosphate
  modified_base 13: mod_base = OTHER; note = 2'-O-methyluridine-3'-phosphate
  modified_base 14: mod_base = OTHER; note = 2'-deoxy-2'-fluoroadenosine-3'-phosphate
  modified_base 15: mod_base = OTHER; note = 2'-O-methylguanosine-3'-phosphate
  modified_base 16: mod_base = OTHER; note = 2'-deoxy-2'-fluorocytidine-3'-phosphate
  modified_base 17: mod_base = OTHER; note = 2'-O-methyladenosine-3'-phosphate
  modified_base 18: mod_base = OTHER; note = 2'-O-methylcytidine-3'-phosphate
  modified_base 19: mod_base = OTHER; note = 2'-O-methylcytidine-3'-phosphate
  modified_base 20: mod_base = OTHER; note = 2'-O-methyladenosine-3'-phosphate
  modified_base 21: mod_base = OTHER; note = 2'-O-methylguanosine-3'-phosphorothioate
  modified_base 22: mod_base = OTHER; note = 2'-O-methylguanosine-3'-phosphorothioate
  modified_base 23: mod_base = OTHER; note = 2'-O-methylguanosine
tgatttatcgtgtagcaccaggg

SEQ ID NO: 1079 - RNA, 23 nt, synthetic construct
  source 1..23: mol_type = other RNA
  modified_base 1: mod_base = OTHER; note = 2'-O-methyluridine-3'-phosphorothioate 5'-(E)-Vinylphosphonate
  modified_base 2: mod_base = OTHER; note = 2'-deoxy-2'-fluorouridine-3'-phosphorothioate
  modified_base 3: mod_base = OTHER; note = 2'-O-methylguanosine-3'-phosphate
  modified_base 4: mod_base = OTHER; note = 2'-O-methylguanosine-3'-phosphate
  modified_base 5: mod_base = OTHER; note = 2'-O-methyladenosine-3'-phosphate
  modified_base 6: mod_base = OTHER; note = 2'-deoxy-2'-fluorouridine-3'-phosphate
  modified_base 7: mod_base = OTHER; note = 2'-O-methyluridine-3'-phosphate
  modified_base 8: mod_base = OTHER; note = 2'-O-methyluridine-3'-phosphate
  modified_base 9: mod_base = OTHER; note = 2'-O-methylguanosine-3'-phosphate
  modified_base 10: mod_base = OTHER; note = 2'-O-methyluridine-3'-phosphate
  modified_base 11: mod_base = OTHER; note = 2'-O-methylcytidine-3'-phosphate
  modified_base 12: mod_base = OTHER; note = 2'-O-methylguanosine-3'-phosphate
  modified_base 13: mod_base = OTHER; note = 2'-O-methyluridine-3'-phosphate
  modified_base 14: mod_base = OTHER; note = 2'-deoxy-2'-fluoroguanosine-3'-phosphate
  modified_base 15: mod_base = OTHER; note = 2'-O-methyluridine-3'-phosphate
  modified_base 16: mod_base = OTHER; note = 2'-deoxy-2'-fluoroadenosine-3'-phosphate
  modified_base 17: mod_base = OTHER; note = 2'-O-methylguanosine-3'-phosphate
  modified_base 18: mod_base = OTHER; note = 2'-O-methylcytidine-3'-phosphate
  modified_base 19: mod_base = OTHER; note = 2'-O-methyladenosine-3'-phosphate
  modified_base 20: mod_base = OTHER; note = 2'-O-methylcytidine-3'-phosphate
  modified_base 21: mod_base = OTHER; note = 2'-O-methylcytidine-3'-phosphorothioate
  modified_base 22: mod_base = OTHER; note = 2'-O-methyladenosine-3'-phosphorothioate
  modified_base 23: mod_base = OTHER; note = 2'-O-methylguanosine
ttggatttgtcgtgtagcaccag

SEQ ID NO: 1080 - RNA, 23 nt, synthetic construct
  source 1..23: mol_type = other RNA
  modified_base 1: mod_base = OTHER; note = 2'-O-methyluridine-3'-phosphorothioate 5'-(E)-Vinylphosphonate
  modified_base 2: mod_base = OTHER; note = 2'-deoxy-2'-fluorouridine-3'-phosphorothioate
  modified_base 3: mod_base = OTHER; note = 2'-O-methyluridine-3'-phosphate
  modified_base 4: mod_base = OTHER; note = 2'-O-methylguanosine-3'-phosphate
  modified_base 5: mod_base = OTHER; note = 2'-O-methylguanosine-3'-phosphate
  modified_base 6: mod_base = OTHER; note = 2'-deoxy-2'-fluoroadenosine-3'-phosphate
  modified_base 7: mod_base = OTHER; note = 2'-O-methyluridine-3'-phosphate
  modified_base 8: mod_base = OTHER; note = 2'-O-methyluridine-3'-phosphate
  modified_base 9: mod_base = OTHER; note = 2'-O-methyluridine-3'-phosphate
  modified_base 10: mod_base = OTHER; note = 2'-O-methylguanosine-3'-phosphate
  modified_base 11: mod_base = OTHER; note = 2'-O-methyluridine-3'-phosphate
  modified_base 12: mod_base = OTHER; note = 2'-O-methylcytidine-3'-phosphate
  modified_base 13: mod_base = OTHER; note = 2'-O-methylguanosine-3'-phosphate
  modified_base 14: mod_base = OTHER; note = 2'-deoxy-2'-fluorouridine-3'-phosphate
  modified_base 15: mod_base = OTHER; note = 2'-O-methylguanosine-3'-phosphate
  modified_base 16: mod_base = OTHER; note = 2'-deoxy-2'-fluorouridine-3'-phosphate
  modified_base 17: mod_base = OTHER; note = 2'-O-methyladenosine-3'-phosphate
  modified_base 18: mod_base = OTHER; note = 2'-O-methylguanosine-3'-phosphate
  modified_base 19: mod_base = OTHER; note = 2'-O-methylcytidine-3'-phosphate
  modified_base 20: mod_base = OTHER; note = 2'-O-methyladenosine-3'-phosphate
  modified_base 21: mod_base = OTHER; note = 2'-O-methylcytidine-3'-phosphorothioate
  modified_base 22: mod_base = OTHER; note = 2'-O-methylcytidine-3'-phosphorothioate
  modified_base 23: mod_base = OTHER; note = 2'-O-methyladenosine
tttggatttgtcgtgtagcacca

SEQ ID NO: 1081 - RNA, 23 nt, synthetic construct
  source 1..23: mol_type = other RNA
  modified_base 1: mod_base = OTHER; note = 2'-O-methyluridine-3'-phosphorothioate 5'-(E)-Vinylphosphonate
  modified_base 2: mod_base = OTHER; note = 2'-deoxy-2'-fluorouridine-3'-phosphorothioate
  modified_base 3: mod_base = OTHER; note = 2'-O-methyluridine-3'-phosphate
  modified_base 4: mod_base = OTHER; note = 2'-O-methylguanosine-3'-phosphate
  modified_base 5: mod_base = OTHER; note = 2'-O-methylguanosine-3'-phosphate
  modified_base 6: mod_base = OTHER; note = 2'-deoxy-2'-fluoroadenosine-3'-phosphate
  modified_base 7: mod_base = OTHER; note = 2'-O-methyladenosine-3'-phosphate
  modified_base 8: mod_base = OTHER; note = 2'-O-methyluridine-3'-phosphate
  modified_base 9: mod_base = OTHER; note = 2'-O-methyluridine-3'-phosphate
  modified_base 10: mod_base = OTHER; note = 2'-O-methylguanosine-3'-phosphate
  modified_base 11: mod_base = OTHER; note = 2'-O-methyluridine-3'-phosphate
  modified_base 12: mod_base = OTHER; note = 2'-O-methylcytidine-3'-phosphate
  modified_base 13: mod_base = OTHER; note = 2'-O-methylguanosine-3'-phosphate
  modified_base 14: mod_base = OTHER; note = 2'-deoxy-2'-fluorouridine-3'-phosphate
  modified_base 15: mod_base = OTHER; note = 2'-O-methylguanosine-3'-phosphate
  modified_base 16: mod_base = OTHER; note = 2'-deoxy-2'-fluorouridine-3'-phosphate
  modified_base 17: mod_base = OTHER; note = 2'-O-methyladenosine-3'-phosphate
  modified_base 18: mod_base = OTHER; note = 2'-O-methylguanosine-3'-phosphate
  modified_base 19: mod_base = OTHER; note = 2'-O-methylcytidine-3'-phosphate
  modified_base 20: mod_base = OTHER; note = 2'-O-methyladenosine-3'-phosphate
  modified_base 21: mod_base = OTHER; note = 2'-O-methylcytidine-3'-phosphorothioate
  modified_base 22: mod_base = OTHER; note = 2'-O-methylcytidine-3'-phosphorothioate
  modified_base 23: mod_base = OTHER; note = 2'-O-methyladenosine
tttggaattgtcgtgtagcacca

SEQ ID NO: 1082 - RNA, 23 nt, synthetic construct
  source 1..23: mol_type = other RNA
  modified_base 1: mod_base = OTHER; note = 2'-O-methyluridine-3'-phosphorothioate 5'-(E)-Vinylphosphonate
  modified_base 2: mod_base = OTHER; note = 2'-deoxy-2'-fluorouridine-3'-phosphorothioate
  modified_base 3: mod_base = OTHER; note = 2'-O-methyluridine-3'-phosphate
  modified_base 4: mod_base = OTHER; note = 2'-O-methylcytidine-3'-phosphate
  modified_base 5: mod_base = OTHER; note = 2'-O-methyluridine-3'-phosphate
  modified_base 6: mod_base = OTHER; note = 2'-deoxy-2'-fluorouridine-3'-phosphate
  modified_base 7: mod_base = OTHER; note = 2'-O-methylguanosine-3'-phosphate
  modified_base 8: mod_base = OTHER; note = 2'-O-methylguanosine-3'-phosphate
  modified_base 9: mod_base = OTHER; note = 2'-O-methyladenosine-3'-phosphate
  modified_base 10: mod_base = OTHER; note = 2'-O-methyluridine-3'-phosphate
  modified_base 11: mod_base = OTHER; note = 2'-O-methyluridine-3'-phosphate
  modified_base 12: mod_base = OTHER; note = 2'-O-methyluridine-3'-phosphate
  modified_base 13: mod_base = OTHER; note = 2'-O-methylguanosine-3'-phosphate
  modified_base 14: mod_base = OTHER; note = 2'-deoxy-2'-fluorouridine-3'-phosphate
  modified_base 15: mod_base = OTHER; note = 2'-O-methylcytidine-3'-phosphate
  modified_base 16: mod_base = OTHER; note = 2'-deoxy-2'-fluoroguanosine-3'-phosphate
  modified_base 17: mod_base = OTHER; note = 2'-O-methyluridine-3'-phosphate
  modified_base 18: mod_base = OTHER; note = 2'-O-methylguanosine-3'-phosphate
  modified_base 19: mod_base = OTHER; note = 2'-O-methyluridine-3'-phosphate
  modified_base 20: mod_base = OTHER; note = 2'-O-methyladenosine-3'-phosphate
  modified_base 21: mod_base = OTHER; note = 2'-O-methylguanosine-3'-phosphorothioate
  modified_base 22: mod_base = OTHER; note = 2'-O-methylcytidine-3'-phosphorothioate
  modified_base 23: mod_base = OTHER; note = 2'-O-methyladenosine
tttcttggatttgtcgtgtagca

SEQ ID NO: 1083 - RNA, 23 nt, synthetic construct
  source 1..23: mol_type = other RNA
  modified_base 1: mod_base = OTHER; note = 2'-O-methyluridine-3'-phosphorothioate 5'-(E)-Vinylphosphonate
  modified_base 2: mod_base = OTHER; note = 2'-deoxy-2'-fluorouridine-3'-phosphorothioate
  modified_base 3: mod_base = OTHER; note = 2'-O-methyluridine-3'-phosphate
  modified_base 4: mod_base = OTHER; note = 2'-O-methylcytidine-3'-phosphate
  modified_base 5: mod_base = OTHER; note = 2'-O-methyluridine-3'-phosphate
  modified_base 6: mod_base = OTHER; note = 2'-deoxy-2'-fluorouridine-3'-phosphate
  modified_base 7: mod_base = OTHER; note = 2'-O-methyladenosine-3'-phosphate
  modified_base 8: mod_base = OTHER; note = 2'-O-methylguanosine-3'-phosphate
  modified_base 9: mod_base = OTHER; note = 2'-O-methyladenosine-3'-phosphate
  modified_base 10: mod_base = OTHER; note = 2'-O-methyluridine-3'-phosphate
  modified_base 11: mod_base = OTHER; note = 2'-O-methyluridine-3'-phosphate
  modified_base 12: mod_base = OTHER; note = 2'-O-methyluridine-3'-phosphate
  modified_base 13: mod_base = OTHER; note = 2'-O-methylguanosine-3'-phosphate
  modified_base 14: mod_base = OTHER; note = 2'-deoxy-2'-fluorouridine-3'-phosphate
  modified_base 15: mod_base = OTHER; note = 2'-O-methylcytidine-3'-phosphate
  modified_base 16: mod_base = OTHER; note = 2'-deoxy-2'-fluoroguanosine-3'-phosphate
  modified_base 17: mod_base = OTHER; note = 2'-O-methyluridine-3'-phosphate
  modified_base 18: mod_base = OTHER; note = 2'-O-methylguanosine-3'-phosphate
  modified_base 19: mod_base = OTHER; note = 2'-O-methyluridine-3'-phosphate
  modified_base 20: mod_base = OTHER; note = 2'-O-methyladenosine-3'-phosphate
  modified_base 21: mod_base = OTHER; note = 2'-O-methylguanosine-3'-phosphorothioate
  modified_base 22: mod_base = OTHER; note = 2'-O-methylcytidine-3'-phosphorothioate
  modified_base 23: mod_base = OTHER; note = 2'-O-methyladenosine
tttcttagatttgtcgtgtagca

SEQ ID NO: 1084 - RNA, 23 nt, synthetic construct
  source 1..23: mol_type = other RNA
  modified_base 1: mod_base = OTHER; note = 2'-O-methyluridine-3'-phosphorothioate 5'-(E)-Vinylphosphonate
  modified_base 2: mod_base = OTHER; note = 2'-deoxy-2'-fluorouridine-3'-phosphorothioate
  modified_base 3: mod_base = OTHER; note = 2'-O-methyluridine-3'-phosphate
  modified_base 4: mod_base = OTHER; note = 2'-O-methyluridine-3'-phosphate
  modified_base 5: mod_base = OTHER; note = 2'-O-methylcytidine-3'-phosphate
  modified_base 6: mod_base = OTHER; note = 2'-deoxy-2'-fluorouridine-3'-phosphate
  modified_base 7: mod_base = OTHER; note = 2'-O-methyluridine-3'-phosphate
  modified_base 8: mod_base = OTHER; note = 2'-O-methylguanosine-3'-phosphate
  modified_base 9: mod_base = OTHER; note = 2'-O-methylguanosine-3'-phosphate
  modified_base 10: mod_base = OTHER; note = 2'-O-methyladenosine-3'-phosphate
  modified_base 11: mod_base = OTHER; note = 2'-O-methyluridine-3'-phosphate
  modified_base 12: mod_base = OTHER; note = 2'-O-methyluridine-3'-phosphate
  modified_base 13: mod_base = OTHER; note = 2'-O-methyluridine-3'-phosphate
  modified_base 14: mod_base = OTHER; note = 2'-deoxy-2'-fluoroguanosine-3'-phosphate
  modified_base 15: mod_base = OTHER; note = 2'-O-methyluridine-3'-phosphate
  modified_base 16: mod_base = OTHER; note = 2'-deoxy-2'-fluorocytidine-3'-phosphate
  modified_base 17: mod_base = OTHER; note = 2'-O-methylguanosine-3'-phosphate
  modified_base 18: mod_base = OTHER; note = 2'-O-methyluridine-3'-phosphate
  modified_base 19: mod_base = OTHER; note = 2'-O-methylguanosine-3'-phosphate
  modified_base 20: mod_base = OTHER; note = 2'-O-methyluridine-3'-phosphate
  modified_base 21: mod_base = OTHER; note = 2'-O-methyladenosine-3'-phosphorothioate
  modified_base 22: mod_base = OTHER; note = 2'-O-methylguanosine-3'-phosphorothioate
  modified_base 23: mod_base = OTHER; note = 2'-O-methylcytidine
ttttcttggatttgtcgtgtagc

SEQ ID NO: 1085 - RNA, 23 nt, synthetic construct
  source 1..23: mol_type = other RNA
  modified_base 1: mod_base = OTHER; note = 2'-O-methyluridine-3'-phosphorothioate 5'-(E)-Vinylphosphonate
  modified_base 2: mod_base = OTHER; note = 2'-deoxy-2'-fluorouridine-3'-phosphorothioate
  modified_base 3: mod_base = OTHER; note = 2'-O-methyluridine-3'-phosphate
  modified_base 4: mod_base = OTHER; note = 2'-O-methyluridine-3'-phosphate
  modified_base 5: mod_base = OTHER; note = 2'-O-methylcytidine-3'-phosphate
  modified_base 6: mod_base = OTHER; note = 2'-deoxy-2'-fluorouridine-3'-phosphate
  modified_base 7: mod_base = OTHER; note = 2'-O-methyladenosine-3'-phosphate
  modified_base 8: mod_base = OTHER; note = 2'-O-methylguanosine-3'-phosphate
  modified_base 9: mod_base = OTHER; note = 2'-O-methylguanosine-3'-phosphate
  modified_base 10: mod_base = OTHER; note = 2'-O-methyladenosine-3'-phosphate
  modified_base 11: mod_base = OTHER; note = 2'-O-methyluridine-3'-phosphate
  modified_base 12: mod_base = OTHER; note = 2'-O-methyluridine-3'-phosphate
  modified_base 13: mod_base = OTHER; note = 2'-O-methyluridine-3'-phosphate
  modified_base 14: mod_base = OTHER; note = 2'-deoxy-2'-fluoroguanosine-3'-phosphate
  modified_base 15: mod_base = OTHER; note = 2'-O-methyluridine-3'-phosphate
  modified_base 16: mod_base = OTHER; note = 2'-deoxy-2'-fluorocytidine-3'-phosphate
  modified_base 17: mod_base = OTHER; note = 2'-O-methylguanosine-3'-phosphate
  modified_base 18: mod_base = OTHER; note = 2'-O-methyluridine-3'-phosphate
  modified_base 19: mod_base = OTHER; note = 2'-O-methylguanosine-3'-phosphate
  modified_base 20: mod_base = OTHER; note = 2'-O-methyluridine-3'-phosphate
  modified_base 21: mod_base = OTHER; note = 2'-O-methyladenosine-3'-phosphorothioate
  modified_base 22: mod_base = OTHER; note = 2'-O-methylguanosine-3'-phosphorothioate
  modified_base 23: mod_base = OTHER; note = 2'-O-methylcytidine
ttttctaggatttgtcgtgtagc

SEQ ID NO: 1086 - RNA, 23 nt, synthetic construct
  source 1..23: mol_type = other RNA
  modified_base 1: mod_base = OTHER; note = 2'-O-methyluridine-3'-phosphorothioate 5'-(E)-Vinylphosphonate
  modified_base 2: mod_base = OTHER; note = 2'-deoxy-2'-fluorouridine-3'-phosphorothioate
  modified_base 3: mod_base = OTHER; note = 2'-O-methyluridine-3'-phosphate
  modified_base 4: mod_base = OTHER; note = 2'-O-methyluridine-3'-phosphate
  modified_base 5: mod_base = OTHER; note = 2'-O-methyluridine-3'-phosphate
  modified_base 6: mod_base = OTHER; note = 2'-deoxy-2'-fluorocytidine-3'-phosphate
  modified_base 7: mod_base = OTHER; note = 2'-O-methyluridine-3'-phosphate
  modified_base 8: mod_base = OTHER; note = 2'-O-methyluridine-3'-phosphate
  modified_base 9: mod_base = OTHER; note = 2'-O-methylguanosine-3'-phosphate
  modified_base 10: mod_base = OTHER; note = 2'-O-methylguanosine-3'-phosphate
  modified_base 11: mod_base = OTHER; note = 2'-O-methyladenosine-3'-phosphate
  modified_base 12: mod_base = OTHER; note = 2'-O-methyluridine-3'-phosphate
  modified_base 13: mod_base = OTHER; note = 2'-O-methyluridine-3'-phosphate
  modified_base 14: mod_base = OTHER; note = 2'-deoxy-2'-fluorouridine-3'-phosphate
  modified_base 15: mod_base = OTHER; note = 2'-O-methylguanosine-3'-phosphate
  modified_base 16: mod_base = OTHER; note = 2'-deoxy-2'-fluorouridine-3'-phosphate
  modified_base 17: mod_base = OTHER; note = 2'-O-methylcytidine-3'-phosphate
  modified_base 18: mod_base = OTHER; note = 2'-O-methylguanosine-3'-phosphate
  modified_base 19: mod_base = OTHER; note = 2'-O-methyluridine-3'-phosphate
  modified_base 20: mod_base = OTHER; note = 2'-O-methylguanosine-3'-phosphate
  modified_base 21: mod_base = OTHER; note = 2'-O-methyluridine-3'-phosphorothioate
  modified_base 22: mod_base = OTHER; note = 2'-O-methyladenosine-3'-phosphorothioate
  modified_base 23: mod_base = OTHER; note = 2'-O-methylguanosine
tttttcttggatttgtcgtgtag

SEQ ID NO: 1087 - RNA, 23 nt, synthetic construct
  source 1..23: mol_type = other RNA
  modified_base 1: mod_base = OTHER; note = 2'-O-methyluridine-3'-phosphorothioate 5'-(E)-Vinylphosphonate
  modified_base 2: mod_base = OTHER; note = 2'-deoxy-2'-fluorouridine-3'-phosphorothioate
  modified_base 3: mod_base = OTHER; note = 2'-O-methyluridine-3'-phosphate
  modified_base 4: mod_base = OTHER; note = 2'-O-methyluridine-3'-phosphate
  modified_base 5: mod_base = OTHER; note = 2'-O-methyluridine-3'-phosphate
  modified_base 6: mod_base = OTHER; note = 2'-deoxy-2'-fluorocytidine-3'-phosphate
  modified_base 7: mod_base = OTHER; note = 2'-O-methyladenosine-3'-phosphate
  modified_base 8: mod_base = OTHER; note = 2'-O-methyluridine-3'-phosphate
  modified_base 9: mod_base = OTHER; note = 2'-O-methylguanosine-3'-phosphate
  modified_base 10: mod_base = OTHER; note = 2'-O-methylguanosine-3'-phosphate
  modified_base 11: mod_base = OTHER; note = 2'-O-methyladenosine-3'-phosphate
  modified_base 12: mod_base = OTHER; note = 2'-O-methyluridine-3'-phosphate
  modified_base 13: mod_base = OTHER; note = 2'-O-methyluridine-3'-phosphate
  modified_base 14: mod_base = OTHER; note = 2'-deoxy-2'-fluorouridine-3'-phosphate
  modified_base 15: mod_base = OTHER; note = 2'-O-methylguanosine-3'-phosphate
  modified_base 16: mod_base = OTHER; note = 2'-deoxy-2'-fluorouridine-3'-phosphate
  modified_base 17: mod_base = OTHER; note = 2'-O-methylcytidine-3'-phosphate
  modified_base 18: mod_base = OTHER; note = 2'-O-methylguanosine-3'-phosphate
  modified_base 19: mod_base = OTHER; note = 2'-O-methyluridine-3'-phosphate
  modified_base 20: mod_base = OTHER; note = 2'-O-methylguanosine-3'-phosphate
  modified_base 21: mod_base = OTHER; note = 2'-O-methyluridine-3'-phosphorothioate
  modified_base 22: mod_base = OTHER; note = 2'-O-methyladenosine-3'-phosphorothioate
  modified_base 23: mod_base = OTHER; note = 2'-O-methylguanosine
tttttcatggatttgtcgtgtag

SEQ ID NO: 1088 - RNA, 23 nt, synthetic construct
  source 1..23: mol_type = other RNA
  modified_base 1: mod_base = OTHER; note = 2'-O-methyluridine-3'-phosphorothioate 5'-(E)-Vinylphosphonate
  modified_base 2: mod_base = OTHER; note = 2'-deoxy-2'-fluoroguanosine-3'-phosphorothioate
  modified_base 3: mod_base = OTHER; note = 2'-O-methyluridine-3'-phosphate
  modified_base 4: mod_base = OTHER; note = 2'-O-methyluridine-3'-phosphate
  modified_base 5: mod_base = OTHER; note = 2'-O-methyluridine-3'-phosphate
  modified_base 6: mod_base = OTHER; note = 2'-deoxy-2'-fluorouridine-3'-phosphate
  modified_base 7: mod_base = OTHER; note = 2'-O-methylcytidine-3'-phosphate
  modified_base 8: mod_base = OTHER; note = 2'-O-methyluridine-3'-phosphate
  modified_base 9: mod_base = OTHER; note = 2'-O-methyluridine-3'-phosphate
  modified_base 10: mod_base = OTHER; note = 2'-O-methylguanosine-3'-phosphate
  modified_base 11: mod_base = OTHER; note = 2'-O-methylguanosine-3'-phosphate
  modified_base 12: mod_base = OTHER; note = 2'-O-methyladenosine-3'-phosphate
  modified_base 13: mod_base = OTHER; note = 2'-O-methyluridine-3'-phosphate
  modified_base 14: mod_base = OTHER; note = 2'-deoxy-2'-fluorouridine-3'-phosphate
  modified_base 15: mod_base = OTHER; note = 2'-O-methyluridine-3'-phosphate
  modified_base 16: mod_base = OTHER; note = 2'-deoxy-2'-fluoroguanosine-3'-phosphate
  modified_base 17: mod_base = OTHER; note = 2'-O-methyluridine-3'-phosphate
  modified_base 18: mod_base = OTHER; note = 2'-O-methylcytidine-3'-phosphate
  modified_base 19: mod_base = OTHER; note = 2'-O-methylguanosine-3'-phosphate
  modified_base 20: mod_base = OTHER; note = 2'-O-methyluridine-3'-phosphate
  modified_base 21: mod_base = OTHER; note = 2'-O-methylguanosine-3'-phosphorothioate
  modified_base 22: mod_base = OTHER; note = 2'-O-methyluridine-3'-phosphorothioate
  modified_base 23: mod_base = OTHER; note = 2'-O-methyladenosine
tgttttcttggatttgtcgtgta

SEQ ID NO: 1089 - RNA, 23 nt, synthetic construct
  source 1..23: mol_type = other RNA
  modified_base 1: mod_base = OTHER; note = 2'-O-methyluridine-3'-phosphorothioate 5'-(E)-Vinylphosphonate
  modified_base 2: mod_base = OTHER; note = 2'-deoxy-2'-fluoroguanosine-3'-phosphorothioate
  modified_base 3: mod_base = OTHER; note = 2'-O-methyluridine-3'-phosphate
  modified_base 4: mod_base = OTHER; note = 2'-O-methyluridine-3'-phosphate
  modified_base 5: mod_base = OTHER; note = 2'-O-methyluridine-3'-phosphate
  modified_base 6: mod_base = OTHER; note = 2'-deoxy-2'-fluorouridine-3'-phosphate
  modified_base 7: mod_base = OTHER; note = 2'-O-methyladenosine-3'-phosphate
  modified_base 8: mod_base = OTHER; note = 2'-O-methyluridine-3'-phosphate
  modified_base 9: mod_base = OTHER; note = 2'-O-methyluridine-3'-phosphate
  modified_base 10: mod_base = OTHER; note = 2'-O-methylguanosine-3'-phosphate
  modified_base 11: mod_base = OTHER; note = 2'-O-methylguanosine-3'-phosphate
  modified_base 12: mod_base = OTHER; note = 2'-O-methyladenosine-3'-phosphate
  modified_base 13: mod_base = OTHER; note = 2'-O-methyluridine-3'-phosphate
  modified_base 14: mod_base = OTHER; note = 2'-deoxy-2'-fluorouridine-3'-phosphate
  modified_base 15: mod_base = OTHER; note = 2'-O-methyluridine-3'-phosphate
  modified_base 16: mod_base = OTHER; note = 2'-deoxy-2'-fluoroguanosine-3'-phosphate
  modified_base 17: mod_base = OTHER; note = 2'-O-methyluridine-3'-phosphate
  modified_base 18: mod_base = OTHER; note = 2'-O-methylcytidine-3'-phosphate
  modified_base 19: mod_base = OTHER; note = 2'-O-methylguanosine-3'-phosphate
  modified_base 20: mod_base = OTHER; note = 2'-O-methyluridine-3'-phosphate
  modified_base 21: mod_base = OTHER; note = 2'-O-methylguanosine-3'-phosphorothioate
  modified_base 22: mod_base = OTHER; note = 2'-O-methyluridine-3'-phosphorothioate
  modified_base 23: mod_base = OTHER; note = 2'-O-methyladenosine
tgttttattggatttgtcgtgta

SEQ ID NO: 1090 - RNA, 23 nt, synthetic construct
  source 1..23: mol_type = other RNA
  modified_base 1: mod_base = OTHER; note = 2'-O-methyluridine-3'-phosphorothioate 5'-(E)-Vinylphosphonate
  modified_base 2: mod_base = OTHER; note = 2'-deoxy-2'-fluoroadenosine-3'-phosphorothioate
  modified_base 3: mod_base = OTHER; note = 2'-O-methyladenosine-3'-phosphate
  modified_base 4: mod_base = OTHER; note = 2'-O-methylguanosine-3'-phosphate
  modified_base 5: mod_base = OTHER; note = 2'-O-methyluridine-3'-phosphate
  modified_base 6: mod_base = OTHER; note = 2'-deoxy-2'-fluorouridine-3'-phosphate
  modified_base 7: mod_base = OTHER; note = 2'-O-methyluridine-3'-phosphate
  modified_base 8: mod_base = OTHER; note = 2'-O-methyluridine-3'-phosphate
  modified_base 9: mod_base = OTHER; note = 2'-O-methylcytidine-3'-phosphate
  modified_base 10: mod_base = OTHER; note = 2'-O-methyluridine-3'-phosphate
  modified_base 11: mod_base = OTHER; note = 2'-O-methyluridine-3'-phosphate
  modified_base 12: mod_base = OTHER; note = 2'-O-methylguanosine-3'-phosphate
  modified_base 13: mod_base = OTHER; note = 2'-O-methylguanosine-3'-phosphate
  modified_base 14: mod_base = OTHER; note = 2'-deoxy-2'-fluoroadenosine-3'-phosphate
  modified_base 15: mod_base = OTHER; note = 2'-O-methyluridine-3'-phosphate
  modified_base 16: mod_base = OTHER; note = 2'-deoxy-2'-fluorouridine-3'-phosphate
  modified_base 17: mod_base = OTHER; note = 2'-O-methyluridine-3'-phosphate
  modified_base 18: mod_base = OTHER; note = 2'-O-methylguanosine-3'-phosphate
  modified_base 19: mod_base = OTHER; note = 2'-O-methyluridine-3'-phosphate
  modified_base 20: mod_base = OTHER; note = 2'-O-methylcytidine-3'-phosphate
  modified_base 21: mod_base = OTHER; note = 2'-O-methylguanosine-3'-phosphorothioate
  modified_base 22: mod_base = OTHER; note = 2'-O-methyluridine-3'-phosphorothioate
  modified_base 23: mod_base = OTHER; note = 2'-O-methylguanosine
taagttttcttggatttgtcgtg

SEQ ID NO: 1091 - RNA, 23 nt, synthetic construct
  source 1..23: mol_type = other RNA
  modified_base 1: mod_base = OTHER; note = 2'-O-methyluridine-3'-phosphorothioate 5'-(E)-Vinylphosphonate
  modified_base 2: mod_base = OTHER; note = 2'-deoxy-2'-fluoroadenosine-3'-phosphorothioate
  modified_base 3: mod_base = OTHER; note = 2'-O-methyladenosine-3'-phosphate
  modified_base 4: mod_base = OTHER; note = 2'-O-methyladenosine-3'-phosphate
  modified_base 5: mod_base = OTHER; note = 2'-O-methylguanosine-3'-phosphate
  modified_base 6: mod_base = OTHER; note = 2'-deoxy-2'-fluorouridine-3'-phosphate
  modified_base 7: mod_base = OTHER; note = 2'-O-methyluridine-3'-phosphate
  modified_base 8: mod_base = OTHER; note = 2'-O-methyluridine-3'-phosphate
  modified_base 9: mod_base = OTHER; note = 2'-O-methyluridine-3'-phosphate
  modified_base 10: mod_base = OTHER; note = 2'-O-methylcytidine-3'-phosphate
  modified_base 11: mod_base = OTHER; note = 2'-O-methyluridine-3'-phosphate
  modified_base 12: mod_base = OTHER; note = 2'-O-methyluridine-3'-phosphate
  modified_base 13: mod_base = OTHER; note = 2'-O-methylguanosine-3'-phosphate
  modified_base 14: mod_base = OTHER; note = 2'-deoxy-2'-fluoroguanosine-3'-phosphate
  modified_base 15: mod_base = OTHER; note = 2'-O-methyladenosine-3'-phosphate
  modified_base 16: mod_base = OTHER; note = 2'-deoxy-2'-fluorouridine-3'-phosphate
  modified_base 17: mod_base = OTHER; note = 2'-O-methyluridine-3'-phosphate
  modified_base 18: mod_base = OTHER; note = 2'-O-methyluridine-3'-phosphate
  modified_base 19: mod_base = OTHER; note = 2'-O-methylguanosine-3'-phosphate
  modified_base 20: mod_base = OTHER; note = 2'-O-methyluridine-3'-phosphate
  modified_base 21: mod_base = OTHER; note = 2'-O-methylcytidine-3'-phosphorothioate
  modified_base 22: mod_base = OTHER; note = 2'-O-methylguanosine-3'-phosphorothioate
  modified_base 23: mod_base = OTHER; note = 2'-O-methyluridine
taaagttttcttggatttgtcgt

SEQ ID NO: 1092 - RNA, 23 nt, synthetic construct
  source 1..23: mol_type = other RNA
  modified_base 1: mod_base = OTHER; note = 2'-O-methyluridine-3'-phosphorothioate 5'-(E)-Vinylphosphonate
  modified_base 2: mod_base = OTHER; note = 2'-deoxy-2'-fluoroadenosine-3'-phosphorothioate
  modified_base 3: mod_base = OTHER; note = 2'-O-methyladenosine-3'-phosphate
  modified_base 4: mod_base = OTHER; note = 2'-O-methyladenosine-3'-phosphate
  modified_base 5: mod_base = OTHER; note = 2'-O-methylguanosine-3'-phosphate
  modified_base 6: mod_base = OTHER; note = 2'-deoxy-2'-fluorouridine-3'-phosphate
  modified_base 7: mod_base = OTHER; note = 2'-O-methyladenosine-3'-phosphate
  modified_base 8: mod_base = OTHER; note = 2'-O-methyluridine-3'-phosphate
  modified_base 9: mod_base = OTHER; note = 2'-O-methyluridine-3'-phosphate
  modified_base 10: mod_base = OTHER; note = 2'-O-methylcytidine-3'-phosphate
  modified_base 11: mod_base = OTHER; note = 2'-O-methyluridine-3'-phosphate
  modified_base 12: mod_base = OTHER; note = 2'-O-methyluridine-3'-phosphate
  modified_base 13: mod_base = OTHER; note = 2'-O-methylguanosine-3'-phosphate
  modified_base 14: mod_base = OTHER; note = 2'-deoxy-2'-fluoroguanosine-3'-phosphate
  modified_base 15: mod_base = OTHER; note = 2'-O-methyladenosine-3'-phosphate
  modified_base 16: mod_base = OTHER; note = 2'-deoxy-2'-fluorouridine-3'-phosphate
  modified_base 17: mod_base = OTHER; note = 2'-O-methyluridine-3'-phosphate
  modified_base 18: mod_base = OTHER; note = 2'-O-methyluridine-3'-phosphate
  modified_base 19: mod_base = OTHER; note = 2'-O-methylguanosine-3'-phosphate
  modified_base 20: mod_base = OTHER; note = 2'-O-methyluridine-3'-phosphate
  modified_base 21: mod_base = OTHER; note = 2'-O-methylcytidine-3'-phosphorothioate
  modified_base 22: mod_base = OTHER; note = 2'-O-methylguanosine-3'-phosphorothioate
  modified_base 23: mod_base = OTHER; note = 2'-O-methyluridine
taaagtattcttggatttgtcgt

SEQ ID NO: 1093 - RNA, 23 nt, synthetic construct
  source 1..23: mol_type = other RNA
  modified_base 1: mod_base = OTHER; note = 2'-O-methyluridine-3'-phosphorothioate 5'-(E)-Vinylphosphonate
  modified_base 2: mod_base = OTHER; note = 2'-deoxy-2'-fluorouridine-3'-phosphorothioate
  modified_base 3: mod_base = OTHER; note = 2'-O-methylguanosine-3'-phosphate
  modified_base 4: mod_base = OTHER; note = 2'-O-methyladenosine-3'-phosphate
  modified_base 5: mod_base = OTHER; note = 2'-O-methylguanosine-3'-phosphate
  modified_base 6: mod_base = OTHER; note = 2'-deoxy-2'-fluoroguanosine-3'-phosphate
  modified_base 7: mod_base = OTHER; note = 2'-O-methylguanosine-3'-phosphate
  modified_base 8: mod_base = OTHER; note = 2'-O-methyladenosine-3'-phosphate
  modified_base 9: mod_base = OTHER; note = 2'-O-methylcytidine-3'-phosphate
  modified_base 10: mod_base = OTHER; note = 2'-O-methyladenosine-3'-phosphate
  modified_base 11: mod_base = OTHER; note = 2'-O-methyluridine-3'-phosphate
  modified_base 12: mod_base = OTHER; note = 2'-O-methylcytidine-3'-phosphate
  modified_base 13: mod_base = OTHER; note = 2'-O-methyladenosine-3'-phosphate
  modified_base 14: mod_base = OTHER; note = 2'-deoxy-2'-fluorocytidine-3'-phosphate
  modified_base 15: mod_base = OTHER; note = 2'-O-methyladenosine-3'-phosphate
  modified_base 16: mod_base = OTHER; note = 2'-deoxy-2'-fluoroguanosine-3'-phosphate
  modified_base 17: mod_base = OTHER; note = 2'-O-methyluridine-3'-phosphate
  modified_base 18: mod_base = OTHER; note = 2'-O-methyladenosine-3'-phosphate
  modified_base 19: mod_base = OTHER; note = 2'-O-methylguanosine-3'-phosphate
  modified_base 20: mod_base = OTHER; note = 2'-O-methyluridine-3'-phosphate
  modified_base 21: mod_base = OTHER; note = 2'-O-methylcytidine-3'-phosphorothioate
  modified_base 22: mod_base = OTHER; note = 2'-O-methylguanosine-3'-phosphorothioate
  modified_base 23: mod_base = OTHER; note = 2'-O-methyluridine
ttgagggacatcacagtagtcgt

SEQ ID NO: 1094 - RNA, 23 nt, synthetic construct
  source 1..23: mol_type = other RNA
  modified_base 1: mod_base = OTHER; note = 2'-O-methyluridine-3'-phosphorothioate 5'-(E)-Vinylphosphonate
  modified_base 2: mod_base = OTHER; note = 2'-deoxy-2'-fluorouridine-3'-phosphorothioate
  modified_base 3: mod_base = OTHER; note = 2'-O-methylguanosine-3'-phosphate
  modified_base 4: mod_base = OTHER; note = 2'-O-methyladenosine-3'-phosphate
  modified_base 5: mod_base = OTHER; note = 2'-O-methylguanosine-3'-phosphate
  modified_base 6: mod_base = OTHER; note = 2'-deoxy-2'-fluoroguanosine-3'-phosphate
  modified_base 7: mod_base = OTHER; note = 2'-O-methyladenosine-3'-phosphate
  modified_base 8: mod_base = OTHER; note = 2'-O-methyladenosine-3'-phosphate
  modified_base 9: mod_base = OTHER; note = 2'-O-methylcytidine-3'-phosphate
  modified_base 10: mod_base = OTHER; note = 2'-O-methyladenosine-3'-phosphate
  modified_base 11: mod_base = OTHER; note = 2'-O-methyluridine-3'-phosphate
  modified_base 12: mod_base = OTHER; note = 2'-O-methylcytidine-3'-phosphate
  modified_base 13: mod_base = OTHER; note = 2'-O-methyladenosine-3'-phosphate
  modified_base 14: mod_base = OTHER; note = 2'-deoxy-2'-fluorocytidine-3'-phosphate
  modified_base 15: mod_base = OTHER; note = 2'-O-methyladenosine-3'-phosphate
  modified_base 16: mod_base = OTHER; note = 2'-deoxy-2'-fluoroguanosine-3'-phosphate
  modified_base 17: mod_base = OTHER; note = 2'-O-methyluridine-3'-phosphate
  modified_base 18: mod_base = OTHER; note = 2'-O-methyladenosine-3'-phosphate
  modified_base 19: mod_base = OTHER; note = 2'-O-methylguanosine-3'-phosphate
  modified_base 20: mod_base = OTHER; note = 2'-O-methyluridine-3'-phosphate
  modified_base 21: mod_base = OTHER; note = 2'-O-methylcytidine-3'-phosphorothioate
  modified_base 22: mod_base = OTHER; note = 2'-O-methylguanosine-3'-phosphorothioate
  modified_base 23: mod_base = OTHER; note = 2'-O-methyluridine
ttgaggaacatcacagtagtcgt

SEQ ID NO: 1095 - RNA, 23 nt, synthetic construct
  source 1..23: mol_type = other RNA
  modified_base 1: mod_base = OTHER; note = 2'-O-methyluridine-3'-phosphorothioate 5'-(E)-Vinylphosphonate
  modified_base 2: mod_base = OTHER; note = 2'-deoxy-2'-fluorocytidine-3'-phosphorothioate
  modified_base 3: mod_base = OTHER; note = 2'-O-methyladenosine-3'-phosphate
  modified_base 4: mod_base = OTHER; note = 2'-O-methylcytidine-3'-phosphate
  modified_base 5: mod_base = OTHER; note = 2'-O-methyladenosine-3'-phosphate
  modified_base 6: mod_base = OTHER; note = 2'-deoxy-2'-fluorocytidine-3'-phosphate
  modified_base 7: mod_base = OTHER; note = 2'-O-methyluridine-3'-phosphate
  modified_base 8: mod_base = OTHER; note = 2'-O-methylguanosine-3'-phosphate
  modified_base 9: mod_base = OTHER; note = 2'-O-methyladenosine-3'-phosphate
  modified_base 10: mod_base = OTHER; note = 2'-O-methylguanosine-3'-phosphate
  modified_base 11: mod_base = OTHER; note = 2'-O-methylguanosine-3'-phosphate
  modified_base 12: mod_base = OTHER; note = 2'-O-methylguanosine-3'-phosphate
  modified_base 13: mod_base = OTHER; note = 2'-O-methyladenosine-3'-phosphate
  modified_base 14: mod_base = OTHER; note = 2'-deoxy-2'-fluorocytidine-3'-phosphate
  modified_base 15: mod_base = OTHER; note = 2'-O-methyladenosine-3'-phosphate
  modified_base 16: mod_base = OTHER; note = 2'-deoxy-2'-fluorouridine-3'-phosphate
  modified_base 17: mod_base = OTHER; note = 2'-O-methylcytidine-3'-phosphate
  modified_base 18: mod_base = OTHER; note = 2'-O-methyladenosine-3'-phosphate
  modified_base 19: mod_base = OTHER; note = 2'-O-methylcytidine-3'-phosphate
  modified_base 20: mod_base = OTHER; note = 2'-O-methyladenosine-3'-phosphate
  modified_base 21: mod_base = OTHER; note = 2'-O-methylguanosine-3'-phosphorothioate
  modified_base 22: mod_base = OTHER; note = 2'-O-methyluridine-3'-phosphorothioate
  modified_base 23: mod_base = OTHER; note = 2'-O-methyladenosine
tcacactgagggacatcacagta

SEQ ID NO: 1096 - RNA, 23 nt, synthetic construct
  source 1..23: mol_type = other RNA
  modified_base 1: mod_base = OTHER; note = 2'-O-methyluridine-3'-phosphorothioate 5'-(E)-Vinylphosphonate
  modified_base 2: mod_base = OTHER; note = 2'-deoxy-2'-fluorouridine-3'-phosphorothioate
  modified_base 3: mod_base = OTHER; note = 2'-O-methylcytidine-3'-phosphate
  modified_base 4: mod_base = OTHER; note = 2'-O-methylcytidine-3'-phosphate
  modified_base 5: mod_base = OTHER; note = 2'-O-methyladenosine-3'-phosphate
  modified_base 6: mod_base = OTHER; note = 2'-deoxy-2'-fluorocytidine-3'-phosphate
  modified_base 7: mod_base = OTHER; note = 2'-O-methyladenosine-3'-phosphate
  modified_base 8: mod_base = OTHER; note = 2'-O-methylguanosine-3'-phosphate
  modified_base 9: mod_base = OTHER; note = 2'-O-methyladenosine-3'-phosphate
  modified_base 10: mod_base = OTHER; note = 2'-O-methyladenosine-3'-phosphate
  modified_base 11: mod_base = OTHER; note = 2'-O-methylguanosine-3'-phosphate
  modified_base 12: mod_base = OTHER; note = 2'-O-methyluridine-3'-phosphate
  modified_base 13: mod_base = OTHER; note = 2'-O-methylguanosine-3'-phosphate
  modified_base 14: mod_base = OTHER; note = 2'-deoxy-2'-fluorocytidine-3'-phosphate
  modified_base 15: mod_base = OTHER; note = 2'-O-methyladenosine-3'-phosphate
  modified_base 16: mod_base = OTHER; note = 2'-deoxy-2'-fluorouridine-3'-phosphate
  modified_base 17: mod_base = OTHER; note = 2'-O-methyluridine-3'-phosphate
  modified_base 18: mod_base = OTHER; note = 2'-O-methylcytidine-3'-phosphate
  modified_base 19: mod_base = OTHER; note = 2'-O-methylcytidine-3'-phosphate
  modified_base 20: mod_base = OTHER; note = 2'-O-methyladenosine-3'-phosphate
  modified_base 21: mod_base = OTHER; note = 2'-O-methyladenosine-3'-phosphorothioate
  modified_base 22: mod_base = OTHER; note = 2'-O-methyladenosine-3'-phosphorothioate
  modified_base 23: mod_base = OTHER; note = 2'-O-methylcytidine
ttccacagaagtgcattccaaac

SEQ ID NO: 1097 - RNA, 23 nt, synthetic construct
  source 1..23: mol_type = other RNA
  modified_base 1: mod_base = OTHER; note = 2'-O-methyluridine-3'-phosphorothioate 5'-(E)-Vinylphosphonate
  modified_base 2: mod_base = OTHER; note = 2'-deoxy-2'-fluorouridine-3'-phosphorothioate
  modified_base 3: mod_base = OTHER; note = 2'-O-methylcytidine-3'-phosphate
  modified_base 4: mod_base = OTHER; note = 2'-O-methylcytidine-3'-phosphate
  modified_base 5: mod_base = OTHER; note = 2'-O-methyladenosine-3'-phosphate
  modified_base 6: mod_base = OTHER; note = 2'-deoxy-2'-fluoroadenosine-3'-phosphate
  modified_base 7: mod_base = OTHER; note = 2'-O-methyladenosine-3'-phosphate
  modified_base 8: mod_base = OTHER; note = 2'-O-methylguanosine-3'-phosphate
  modified_base 9: mod_base = OTHER; note = 2'-O-methyladenosine-3'-phosphate
  modified_base 10: mod_base = OTHER; note = 2'-O-methyladenosine-3'-phosphate
  modified_base 11: mod_base = OTHER; note = 2'-O-methylguanosine-3'-phosphate
  modified_base 12: mod_base = OTHER; note = 2'-O-methyluridine-3'-phosphate
  modified_base 13: mod_base = OTHER; note = 2'-O-methylguanosine-3'-phosphate
  modified_base 14: mod_base = OTHER; note = 2'-deoxy-2'-fluorocytidine-3'-phosphate
  modified_base 15: mod_base = OTHER; note = 2'-O-methyladenosine-3'-phosphate
  modified_base 16: mod_base = OTHER; note = 2'-deoxy-2'-fluorouridine-3'-phosphate
  modified_base 17: mod_base = OTHER; note = 2'-O-methyluridine-3'-phosphate
  modified_base 18: mod_base = OTHER; note = 2'-O-methylcytidine-3'-phosphate
  modified_base 19: mod_base = OTHER; note = 2'-O-methylcytidine-3'-phosphate
  modified_base 20: mod_base = OTHER; note = 2'-O-methyladenosine-3'-phosphate
  modified_base 21: mod_base = OTHER; note = 2'-O-methyladenosine-3'-phosphorothioate
  modified_base 22: mod_base = OTHER; note = 2'-O-methyladenosine-3'-phosphorothioate
  modified_base 23: mod_base = OTHER; note = 2'-O-methylcytidine
ttccaaagaagtgcattccaaac

SEQ ID NO: 1098 - RNA, 23 nt, synthetic construct
  source 1..23: mol_type = other RNA
  modified_base 1: mod_base = OTHER; note = 2'-O-methyluridine-3'-phosphorothioate 5'-(E)-Vinylphosphonate
  modified_base 2: mod_base = OTHER; note = 2'-deoxy-2'-fluoroadenosine-3'-phosphorothioate
  modified_base 3: mod_base = OTHER; note = 2'-O-methylcytidine-3'-phosphate
  modified_base 4: mod_base = OTHER; note = 2'-O-methyluridine-3'-phosphate
  modified_base 5: mod_base = OTHER; note = 2'-O-methyluridine-3'-phosphate
  modified_base 6: mod_base = OTHER; note = 2'-deoxy-2'-fluorocytidine-3'-phosphate
  modified_base 7: mod_base = OTHER; note = 2'-O-methyluridine-3'-phosphate
  modified_base 8: mod_base = OTHER; note = 2'-O-methylcytidine-3'-phosphate
  modified_base 9: mod_base = OTHER; note = 2'-O-methylcytidine-3'-phosphate
  modified_base 10: mod_base = OTHER; note = 2'-O-methyladenosine-3'-phosphate
  modified_base 11: mod_base = OTHER; note = 2'-O-methyladenosine-3'-phosphate
  modified_base 12: mod_base = OTHER; note = 2'-O-methylguanosine-3'-phosphate
  modified_base 13: mod_base = OTHER; note = 2'-O-methylcytidine-3'-phosphate
  modified_base 14: mod_base = OTHER; note = 2'-deoxy-2'-fluoroadenosine-3'-phosphate
  modified_base 15: mod_base = OTHER; note = 2'-O-methylguanosine-3'-phosphate
  modified_base 16: mod_base = OTHER; note = 2'-deoxy-2'-fluorouridine-3'-phosphate
  modified_base 17: mod_base = OTHER; note = 2'-O-methylguanosine-3'-phosphate
  modified_base 18: mod_base = OTHER; note = 2'-O-methylguanosine-3'-phosphate
  modified_base 19: mod_base = OTHER; note = 2'-O-methylguanosine-3'-phosphate
  modified_base 20: mod_base = OTHER; note = 2'-O-methylcytidine-3'-phosphate
  modified_base 21: mod_base = OTHER; note = 2'-O-methyladenosine-3'-phosphorothioate
  modified_base 22: mod_base = OTHER; note = 2'-O-methylguanosine-3'-phosphorothioate
  modified_base 23: mod_base = OTHER; note = 2'-O-methylcytidine
tacttctccaagcagtgggcagc

SEQ ID NO: 1099 - RNA, 23 nt, synthetic construct
  source 1..23: mol_type = other RNA
  modified_base 1: mod_base = OTHER; note = 2'-O-methyluridine-3'-phosphorothioate 5'-(E)-Vinylphosphonate
  modified_base 2: mod_base = OTHER; note = 2'-deoxy-2'-fluoroadenosine-3'-phosphorothioate
  modified_base 3: mod_base = OTHER; note = 2'-O-methylcytidine-3'-phosphate
  modified_base 4: mod_base = OTHER; note = 2'-O-methyluridine-3'-phosphate
  modified_base 5: mod_base = OTHER; note = 2'-O-methyluridine-3'-phosphate
  modified_base 6: mod_base = OTHER; note = 2'-deoxy-2'-fluorocytidine-3'-phosphate
  modified_base 7: mod_base = OTHER; note = 2'-O-methyladenosine-3'-phosphate
  modified_base 8: mod_base = OTHER; note = 2'-O-methylcytidine-3'-phosphate
  modified_base 9: mod_base = OTHER; note = 2'-O-methylcytidine-3'-phosphate
  modified_base 10: mod_base = OTHER; note = 2'-O-methyladenosine-3'-phosphate
  modified_base 11: mod_base = OTHER; note = 2'-O-methyladenosine-3'-phosphate
  modified_base 12: mod_base = OTHER; note = 2'-O-methylguanosine-3'-phosphate
  modified_base 13: mod_base = OTHER; note = 2'-O-methylcytidine-3'-phosphate
  modified_base 14: mod_base = OTHER; note = 2'-deoxy-2'-fluoroadenosine-3'-phosphate
  modified_base 15: mod_base = OTHER; note = 2'-O-methylguanosine-3'-phosphate
  modified_base 16: mod_base = OTHER; note = 2'-deoxy-2'-fluorouridine-3'-phosphate
  modified_base 17: mod_base = OTHER; note = 2'-O-methylguanosine-3'-phosphate
  modified_base 18: mod_base = OTHER; note = 2'-O-methylguanosine-3'-phosphate
  modified_base 19: mod_base = OTHER; note = 2'-O-methylguanosine-3'-phosphate
  modified_base 20: mod_base = OTHER; note = 2'-O-methylcytidine-3'-phosphate
  modified_base 21: mod_base = OTHER; note = 2'-O-methyladenosine-3'-phosphorothioate
  modified_base 22: mod_base = OTHER; note = 2'-O-methylguanosine-3'-phosphorothioate
  modified_base 23: mod_base = OTHER; note = 2'-O-methylcytidine
tacttcaccaagcagtgggcagc

SEQ ID NO: 1100 - RNA, 23 nt, synthetic construct
  source 1..23: mol_type = other RNA
  modified_base 1: mod_base = OTHER; note = 2'-O-methyluridine-3'-phosphorothioate 5'-(E)-Vinylphosphonate
  modified_base 2: mod_base = OTHER; note = 2'-deoxy-2'-fluorouridine-3'-phosphorothioate
  modified_base 3: mod_base = OTHER; note = 2'-O-methyluridine-3'-phosphate
  modified_base 4: mod_base = OTHER; note = 2'-O-methyluridine-3'-phosphate
  modified_base 5: mod_base = OTHER; note = 2'-O-methyladenosine-3'-phosphate
  modified_base 6: mod_base = OTHER; note = 2'-deoxy-2'-fluoroguanosine-3'-phosphate
  modified_base 7: mod_base = OTHER; note = 2'-O-methylcytidine-3'-phosphate
  modified_base 8: mod_base = OTHER; note = 2'-O-methyladenosine-3'-phosphate
  modified_base 9: mod_base = OTHER; note = 2'-O-methyladenosine-3'-phosphate
  modified_base 10: mod_base = OTHER; note = 2'-O-methylguanosine-3'-phosphate
  modified_base 11: mod_base = OTHER; note = 2'-O-methylguanosine-3'-phosphate
  modified_base 12: mod_base = OTHER; note = 2'-O-methylcytidine-3'-phosphate
  modified_base 13: mod_base = OTHER; note = 2'-O-methyladenosine-3'-phosphate
  modified_base 14: mod_base = OTHER; note = 2'-deoxy-2'-fluoroadenosine-3'-phosphate
  modified_base 15: mod_base = OTHER; note = 2'-O-methyluridine-3'-phosphate
  modified_base 16: mod_base = OTHER; note = 2'-deoxy-2'-fluoroadenosine-3'-phosphate
  modified_base 17: mod_base = OTHER; note = 2'-O-methyluridine-3'-phosphate
  modified_base 18: mod_base = OTHER; note = 2'-O-methylcytidine-3'-phosphate
  modified_base 19: mod_base = OTHER; note = 2'-O-methyluridine-3'-phosphate
  modified_base 20: mod_base = OTHER; note = 2'-O-methyluridine-3'-phosphate
  modified_base 21: mod_base = OTHER; note = 2'-O-methyluridine-3'-phosphorothioate
  modified_base 22: mod_base = OTHER; note = 2'-O-methyluridine-3'-phosphorothioate
  modified_base 23: mod_base = OTHER; note = 2'-O-methylcytidine
ttttagcaaggcaatatcttttc

SEQ ID NO: 1101 - RNA, 23 nt, synthetic construct
  source 1..23: mol_type = other RNA
  modified_base 1: mod_base = OTHER; note = 2'-O-methyluridine-3'-phosphorothioate 5'-(E)-Vinylphosphonate
  modified_base 2: mod_base = OTHER; note = 2'-deoxy-2'-fluorouridine-3'-phosphorothioate
  modified_base 3: mod_base = OTHER; note = 2'-O-methyluridine-3'-phosphate
  modified_base 4: mod_base = OTHER; note = 2'-O-methyluridine-3'-phosphate
  modified_base 5: mod_base = OTHER; note = 2'-O-methyladenosine-3'-phosphate
  modified_base 6: mod_base = OTHER; note = 2'-deoxy-2'-fluoroguanosine-3'-phosphate
  modified_base 7: mod_base = OTHER; note = 2'-O-methyladenosine-3'-phosphate
  modified_base 8: mod_base = OTHER; note = 2'-O-methyladenosine-3'-phosphate
  modified_base 9: mod_base = OTHER; note = 2'-O-methyladenosine-3'-phosphate
  modified_base 10: mod_base = OTHER; note = 2'-O-methylguanosine-3'-phosphate
  modified_base 11: mod_base = OTHER; note = 2'-O-methylguanosine-3'-phosphate
  modified_base 12: mod_base = OTHER; note = 2'-O-methylcytidine-3'-phosphate
  modified_base 13: mod_base = OTHER; note = 2'-O-methyladenosine-3'-phosphate
  modified_base 14: mod_base = OTHER; note = 2'-deoxy-2'-fluoroadenosine-3'-phosphate
  modified_base 15: mod_base = OTHER; note = 2'-O-methyluridine-3'-phosphate
  modified_base 16: mod_base = OTHER; note = 2'-deoxy-2'-fluoroadenosine-3'-phosphate
  modified_base 17: mod_base = OTHER; note = 2'-O-methyluridine-3'-phosphate
  modified_base 18: mod_base = OTHER; note = 2'-O-methylcytidine-3'-phosphate
  modified_base 19: mod_base = OTHER; note = 2'-O-methyluridine-3'-phosphate
  modified_base 20: mod_base = OTHER; note = 2'-O-methyluridine-3'-phosphate
  modified_base 21: mod_base = OTHER; note = 2'-O-methyluridine-3'-phosphorothioate
  modified_base 22: mod_base = OTHER; note = 2'-O-methyluridine-3'-phosphorothioate
  modified_base 23: mod_base = OTHER; note = 2'-O-methylcytidine
ttttagaaaggcaatatcttttc

SEQ ID NO: 1102 - RNA, 23 nt, synthetic construct
  source 1..23: mol_type = other RNA
  modified_base 1: mod_base = OTHER; note = 2'-O-methyluridine-3'-phosphorothioate 5'-(E)-Vinylphosphonate
  modified_base 2: mod_base = OTHER; note = 2'-deoxy-2'-fluorocytidine-3'-phosphorothioate
  modified_base 3: mod_base = OTHER; note = 2'-O-methyluridine-3'-phosphate
  modified_base 4: mod_base = OTHER; note = 2'-O-methyluridine-3'-phosphate
  modified_base 5: mod_base = OTHER; note = 2'-O-methyluridine-3'-phosphate
  modified_base 6: mod_base = OTHER; note = 2'-deoxy-2'-fluoroadenosine-3'-phosphate
  modified_base 7: mod_base = OTHER; note = 2'-O-methylguanosine-3'-phosphate
  modified_base 8: mod_base = OTHER; note = 2'-O-methylcytidine-3'-phosphate
  modified_base 9: mod_base = OTHER; note = 2'-O-methyladenosine-3'-phosphate
  modified_base 10: mod_base = OTHER; note = 2'-O-methyladenosine-3'-phosphate
  modified_base 11: mod_base = OTHER; note = 2'-O-methylguanosine-3'-phosphate
  modified_base 12: mod_base = OTHER; note = 2'-O-methylguanosine-3'-phosphate
  modified_base 13: mod_base = OTHER; note = 2'-O-methylcytidine-3'-phosphate
  modified_base 14: mod_base = OTHER; note = 2'-deoxy-2'-fluoroadenosine-3'-phosphate
  modified_base 15: mod_base = OTHER; note = 2'-O-methyladenosine-3'-phosphate
  modified_base 16: mod_base = OTHER; note = 2'-deoxy-2'-fluorouridine-3'-phosphate
  modified_base 17: mod_base = OTHER; note = 2'-O-methyladenosine-3'-phosphate
  modified_base 18: mod_base = OTHER; note = 2'-O-methyluridine-3'-phosphate
  modified_base 19: mod_base = OTHER; note = 2'-O-methylcytidine-3'-phosphate
  modified_base 20: mod_base = OTHER; note = 2'-O-methyluridine-3'-phosphate
  modified_base 21: mod_base = OTHER; note = 2'-O-methyluridine-3'-phosphorothioate
  modified_base 22: mod_base = OTHER; note = 2'-O-methyluridine-3'-phosphorothioate
  modified_base 23: mod_base = OTHER; note = 2'-O-methyluridine
tctttagcaaggcaatatctttt

SEQ ID NO: 1103 - RNA, 23 nt, synthetic construct
  source 1..23: mol_type = other RNA
  modified_base 1: mod_base = OTHER; note = 2'-O-methyluridine-3'-phosphorothioate 5'-(E)-Vinylphosphonate
  modified_base 2: mod_base = OTHER; note = 2'-deoxy-2'-fluoroguanosine-3'-phosphorothioate
  modified_base 3: mod_base = OTHER; note = 2'-O-methylcytidine-3'-phosphate
  modified_base 4: mod_base = OTHER; note = 2'-O-methyluridine-3'-phosphate
  modified_base 5: mod_base = OTHER; note = 2'-O-methyluridine-3'-phosphate
  modified_base 6: mod_base = OTHER; note = 2'-deoxy-2'-fluorouridine-3'-phosphate
  modified_base 7: mod_base = OTHER; note = 2'-O-methyladenosine-3'-phosphate
  modified_base 8: mod_base = OTHER; note = 2'-O-methylguanosine-3'-phosphate
  modified_base 9: mod_base = OTHER; note = 2'-O-methylcytidine-3'-phosphate
  modified_base 10: mod_base = OTHER; note = 2'-O-methyladenosine-3'-phosphate
  modified_base 11: mod_base = OTHER; note = 2'-O-methyladenosine-3'-phosphate
  modified_base 12: mod_base = OTHER; note = 2'-O-methylguanosine-3'-phosphate
  modified_base 13: mod_base = OTHER; note = 2'-O-methylguanosine-3'-phosphate
  modified_base 14: mod_base = OTHER; note = 2'-deoxy-2'-fluorocytidine-3'-phosphate
  modified_base 15: mod_base = OTHER; note = 2'-O-methyladenosine-3'-phosphate
  modified_base 16: mod_base = OTHER; note = 2'-deoxy-2'-fluoroadenosine-3'-phosphate
  modified_base 17: mod_base = OTHER; note = 2'-O-methyluridine-3'-phosphate
  modified_base 18: mod_base = OTHER; note = 2'-O-methyladenosine-3'-phosphate
  modified_base 19: mod_base = OTHER; note = 2'-O-methyluridine-3'-phosphate
  modified_base 20: mod_base = OTHER; note = 2'-O-methylcytidine-3'-phosphate
  modified_base 21: mod_base = OTHER; note = 2'-O-methyluridine-3'-phosphorothioate
  modified_base 22: mod_base = OTHER; note = 2'-O-methyluridine-3'-phosphorothioate
  modified_base 23: mod_base = OTHER; note = 2'-O-methyluridine
tgctttagcaaggcaatatcttt

SEQ ID NO: 1104 - RNA, 23 nt, synthetic construct
  source 1..23: mol_type = other RNA
  modified_base 1: mod_base = OTHER; note = 2'-O-methyluridine-3'-phosphorothioate 5'-(E)-Vinylphosphonate
  modified_base 2: mod_base = OTHER; note = 2'-deoxy-2'-fluorouridine-3'-phosphorothioate
  modified_base 3: mod_base = OTHER; note = 2'-O-methyluridine-3'-phosphate
  modified_base 4: mod_base = OTHER; note = 2'-O-methyladenosine-3'-phosphate
  modified_base 5: mod_base = OTHER; note = 2'-O-methylguanosine-3'-phosphate
  modified_base 6: mod_base = OTHER; note = 2'-deoxy-2'-fluorocytidine-3'-phosphate
  modified_base 7: mod_base = OTHER; note = 2'-O-methyluridine-3'-phosphate
  modified_base 8: mod_base = OTHER; note = 2'-O-methyluridine-3'-phosphate
  modified_base 9: mod_base = OTHER; note = 2'-O-methyluridine-3'-phosphate
  modified_base 10: mod_base = OTHER; note = 2'-O-methyladenosine-3'-phosphate
  modified_base 11: mod_base = OTHER; note = 2'-O-methylguanosine-3'-phosphate
  modified_base 12: mod_base = OTHER; note = 2'-O-methylcytidine-3'-phosphate
  modified_base 13: mod_base = OTHER; note = 2'-O-methyladenosine-3'-phosphate
  modified_base 14: mod_base = OTHER; note = 2'-deoxy-2'-fluoroadenosine-3'-phosphate
  modified_base 15: mod_base = OTHER; note = 2'-O-methylguanosine-3'-phosphate
  modified_base 16: mod_base = OTHER; note = 2'-deoxy-2'-fluoroguanosine-3'-phosphate
  modified_base 17: mod_base = OTHER; note = 2'-O-methylcytidine-3'-phosphate
  modified_base 18: mod_base = OTHER; note = 2'-O-methyladenosine-3'-phosphate
  modified_base 19: mod_base = OTHER; note = 2'-O-methyladenosine-3'-phosphate
  modified_base 20: mod_base = OTHER; note = 2'-O-methyluridine-3'-phosphate
  modified_base 21: mod_base = OTHER; note = 2'-O-methyladenosine-3'-phosphorothioate
  modified_base 22: mod_base = OTHER; note = 2'-O-methyluridine-3'-phosphorothioate
  modified_base 23: mod_base = OTHER; note = 2'-O-methylcytidine
tttagctttagcaaggcaatatc

SEQ ID NO: 1105 - RNA, 23 nt, synthetic construct
  source 1..23: mol_type = other RNA
  modified_base 1: mod_base = OTHER; note = 2'-O-methyluridine-3'-phosphorothioate 5'-(E)-Vinylphosphonate
  modified_base 2: mod_base = OTHER; note = 2'-deoxy-2'-fluoroadenosine-3'-phosphorothioate
  modified_base 3: mod_base = OTHER; note = 2'-O-methylcytidine-3'-phosphate
  modified_base 4: mod_base = OTHER; note = 2'-O-methyluridine-3'-phosphate
  modified_base 5: mod_base = OTHER; note = 2'-O-methylguanosine-3'-phosphate
  modified_base 6: mod_base = OTHER; note = 2'-deoxy-2'-fluorocytidine-3'-phosphate
  modified_base 7: mod_base = OTHER; note = 2'-O-methyluridine-3'-phosphate
  modified_base 8: mod_base = OTHER; note = 2'-O-methyluridine-3'-phosphate
  modified_base 9: mod_base = OTHER; note = 2'-O-methyladenosine-3'-phosphate
  modified_base 10: mod_base = OTHER; note = 2'-O-methylguanosine-3'-phosphate
  modified_base 11: mod_base = OTHER; note = 2'-O-methylcytidine-3'-phosphate
  modified_base 12: mod_base = OTHER; note = 2'-O-methyluridine-3'-phosphate
  modified_base 13: mod_base = OTHER; note = 2'-O-methyluridine-3'-phosphate
  modified_base 14: mod_base = OTHER; note = 2'-deoxy-2'-fluorouridine-3'-phosphate
  modified_base 15: mod_base = OTHER; note = 2'-O-methyladenosine-3'-phosphate
  modified_base 16: mod_base = OTHER; note = 2'-deoxy-2'-fluoroguanosine-3'-phosphate
  modified_base 17: mod_base = OTHER; note = 2'-O-methylcytidine-3'-phosphate
  modified_base 18: mod_base = OTHER; note = 2'-O-methyladenosine-3'-phosphate
  modified_base 19: mod_base = OTHER; note = 2'-O-methyladenosine-3'-phosphate
  modified_base 20: mod_base = OTHER; note = 2'-O-methylguanosine-3'-phosphate
  modified_base 21: mod_base = OTHER; note = 2'-O-methylguanosine-3'-phosphorothioate
  modified_base 22: mod_base = OTHER; note = 2'-O-methylcytidine-3'-phosphorothioate
  modified_base 23: mod_base = OTHER; note = 2'-O-methyladenosine
tactgcttagctttagcaaggca

SEQ ID NO: 1106 - RNA, 23 nt, synthetic construct
  source 1..23: mol_type = other RNA
  modified_base 1: mod_base = OTHER; note = 2'-O-methyluridine-3'-phosphorothioate 5'-(E)-Vinylphosphonate
  modified_base 2: mod_base = OTHER; note = 2'-deoxy-2'-fluoroadenosine-3'-phosphorothioate
  modified_base 3: mod_base = OTHER; note = 2'-O-methylcytidine-3'-phosphate
  modified_base 4: mod_base = OTHER; note = 2'-O-methyluridine-3'-phosphate
  modified_base 5: mod_base = OTHER; note = 2'-O-methylguanosine-3'-phosphate
  modified_base 6: mod_base = OTHER; note = 2'-deoxy-2'-fluorocytidine-3'-phosphate
  modified_base 7: mod_base = OTHER; note = 2'-O-methyladenosine-3'-phosphate
  modified_base 8: mod_base = OTHER; note = 2'-O-methyluridine-3'-phosphate
  modified_base 9: mod_base = OTHER; note = 2'-O-methyladenosine-3'-phosphate
  modified_base 10: mod_base = OTHER; note = 2'-O-methylguanosine-3'-phosphate
  modified_base 11: mod_base = OTHER; note = 2'-O-methylcytidine-3'-phosphate
  modified_base 12: mod_base = OTHER; note = 2'-O-methyluridine-3'-phosphate
  modified_base 13: mod_base = OTHER; note = 2'-O-methyluridine-3'-phosphate
  modified_base 14: mod_base = OTHER; note = 2'-deoxy-2'-fluorouridine-3'-phosphate
  modified_base 15: mod_base = OTHER; note = 2'-O-methyladenosine-3'-phosphate
  modified_base 16: mod_base = OTHER; note = 2'-deoxy-2'-fluoroguanosine-3'-phosphate
  modified_base 17: mod_base = OTHER; note = 2'-O-methylcytidine-3'-phosphate
  modified_base 18: mod_base = OTHER; note = 2'-O-methyladenosine-3'-phosphate
  modified_base 19: mod_base = OTHER; note = 2'-O-methyladenosine-3'-phosphate
  modified_base 20: mod_base = OTHER; note = 2'-O-methylguanosine-3'-phosphate
  modified_base 21: mod_base = OTHER; note = 2'-O-methylguanosine-3'-phosphorothioate
  modified_base 22: mod_base = OTHER; note = 2'-O-methylcytidine-3'-phosphorothioate
  modified_base 23: mod_base = OTHER; note = 2'-O-methyladenosine
tactgcatagctttagcaaggca

SEQ ID NO: 1107 - RNA, 23 nt, synthetic construct
  source 1..23: mol_type = other RNA
  modified_base 1: mod_base = OTHER; note = 2'-O-methyluridine-3'-phosphorothioate 5'-(E)-Vinylphosphonate
  modified_base 2: mod_base = OTHER; note = 2'-deoxy-2'-fluoroadenosine-3'-phosphorothioate
  modified_base 3: mod_base = OTHER; note = 2'-O-methylguanosine-3'-phosphate
  modified_base 4: mod_base = OTHER; note = 2'-O-methylguanosine-3'-phosphate
  modified_base 5: mod_base = OTHER; note = 2'-O-methyladenosine-3'-phosphate
  modified_base 6: mod_base = OTHER; note = 2'-deoxy-2'-fluorocytidine-3'-phosphate
  modified_base 7: mod_base = OTHER; note = 2'-O-methyluridine-3'-phosphate
  modified_base 8: mod_base = OTHER; note = 2'-O-methylguanosine-3'-phosphate
  modified_base 9: mod_base = OTHER; note = 2'-O-methylcytidine-3'-phosphate
  modified_base 10: mod_base = OTHER; note = 2'-O-methyluridine-3'-phosphate
  modified_base 11: mod_base = OTHER; note = 2'-O-methyluridine-3'-phosphate
  modified_base 12: mod_base = OTHER; note = 2'-O-methyladenosine-3'-phosphate
  modified_base 13: mod_base = OTHER; note = 2'-O-methylguanosine-3'-phosphate
  modified_base 14: mod_base = OTHER; note = 2'-deoxy-2'-fluorocytidine-3'-phosphate
  modified_base 15: mod_base = OTHER; note = 2'-O-methyluridine-3'-phosphate
  modified_base 16: mod_base = OTHER; note = 2'-deoxy-2'-fluorouridine-3'-phosphate
  modified_base 17: mod_base = OTHER; note = 2'-O-methyluridine-3'-phosphate
  modified_base 18: mod_base = OTHER; note = 2'-O-methyladenosine-3'-phosphate
  modified_base 19: mod_base = OTHER; note = 2'-O-methylguanosine-3'-phosphate
  modified_base 20: mod_base = OTHER; note = 2'-O-methylcytidine-3'-phosphate
  modified_base 21: mod_base = OTHER; note = 2'-O-methyladenosine-3'-phosphorothioate
  modified_base 22: mod_base = OTHER; note = 2'-O-methyladenosine-3'-phosphorothioate
  modified_base 23: mod_base = OTHER; note = 2'-O-methylguanosine
taggactgcttagctttagcaag

SEQ ID NO: 1108 - RNA, 23 nt, synthetic construct
  source 1..23: mol_type = other RNA
  modified_base 1: mod_base = OTHER; note = 2'-O-methyluridine-3'-phosphorothioate 5'-(E)-Vinylphosphonate
  modified_base 2: mod_base = OTHER; note = 2'-deoxy-2'-fluoroadenosine-3'-phosphorothioate
  modified_base 3: mod_base = OTHER; note = 2'-O-methylguanosine-3'-phosphate
  modified_base 4: mod_base = OTHER; note = 2'-O-methylguanosine-3'-phosphate
  modified_base 5: mod_base = OTHER; note = 2'-O-methyladenosine-3'-phosphate
  modified_base 6: mod_base = OTHER; note = 2'-deoxy-2'-fluorocytidine-3'-phosphate
  modified_base 7: mod_base = OTHER; note = 2'-O-methyladenosine-3'-phosphate
  modified_base 8: mod_base = OTHER; note = 2'-O-methylguanosine-3'-phosphate
  modified_base 9: mod_base = OTHER; note = 2'-O-methylcytidine-3'-phosphate
  modified_base 10: mod_base = OTHER; note = 2'-O-methyluridine-3'-phosphate
  modified_base 11: mod_base = OTHER; note = 2'-O-methyluridine-3'-phosphate
  modified_base 12: mod_base = OTHER; note = 2'-O-methyladenosine-3'-phosphate
  modified_base 13: mod_base = OTHER; note = 2'-O-methylguanosine-3'-phosphate
  modified_base 14: mod_base = OTHER; note = 2'-deoxy-2'-fluorocytidine-3'-phosphate
  modified_base 15: mod_base = OTHER; note = 2'-O-methyluridine-3'-phosphate
  modified_base 16: mod_base = OTHER; note = 2'-deoxy-2'-fluorouridine-3'-phosphate
  modified_base 17: mod_base = OTHER; note = 2'-O-methyluridine-3'-phosphate
  modified_base 18: mod_base = OTHER; note = 2'-O-methyladenosine-3'-phosphate
  modified_base 19: mod_base = OTHER; note = 2'-O-methylguanosine-3'-phosphate
  modified_base 20: mod_base = OTHER; note = 2'-O-methylcytidine-3'-phosphate
  modified_base 21: mod_base = OTHER; note = 2'-O-methyladenosine-3'-phosphorothioate
  modified_base 22: mod_base = OTHER; note = 2'-O-methyladenosine-3'-phosphorothioate
  modified_base 23: mod_base = OTHER; note = 2'-O-methylguanosine
taggacagcttagctttagcaag

SEQ ID NO: 1109 - RNA, 23 nt, synthetic construct
  source 1..23: mol_type = other RNA
  modified_base 1: mod_base = OTHER; note = 2'-O-methyluridine-3'-phosphorothioate 5'-(E)-Vinylphosphonate
  modified_base 2: mod_base = OTHER; note = 2'-deoxy-2'-fluoroguanosine-3'-phosphorothioate
  modified_base 3: mod_base = OTHER; note = 2'-O-methyladenosine-3'-phosphate
  modified_base 4: mod_base = OTHER; note = 2'-O-methyluridine-3'-phosphate
  modified_base 5: mod_base = OTHER; note = 2'-O-methyluridine-3'-phosphate
  modified_base 6: mod_base = OTHER; note = 2'-deoxy-2'-fluoroadenosine-3'-phosphate
  modified_base 7: mod_base = OTHER; note = 2'-O-methylcytidine-3'-phosphate
  modified_base 8: mod_base = OTHER; note = 2'-O-methyluridine-3'-phosphate
  modified_base 9: mod_base = OTHER; note = 2'-O-methyluridine-3'-phosphate
  modified_base 10: mod_base = OTHER; note = 2'-O-methyluridine-3'-phosphate
  modified_base 11: mod_base = OTHER; note = 2'-O-methylguanosine-3'-phosphate
  modified_base 12: mod_base = OTHER; note = 2'-O-methyluridine-3'-phosphate
  modified_base 13: mod_base = OTHER; note = 2'-O-methylcytidine-3'-phosphate
  modified_base 14: mod_base = OTHER; note = 2'-deoxy-2'-fluoroadenosine-3'-phosphate
  modified_base 15: mod_base = OTHER; note = 2'-O-methylguanosine-3'-phosphate
  modified_base 16: mod_base = OTHER; note = 2'-deoxy-2'-fluorouridine-3'-phosphate
  modified_base 17: mod_base = OTHER; note = 2'-O-methylguanosine-3'-phosphate
  modified_base 18: mod_base = OTHER; note = 2'-O-methyladenosine-3'-phosphate
  modified_base 19: mod_base = OTHER; note = 2'-O-methyluridine-3'-phosphate
  modified_base 20: mod_base = OTHER; note = 2'-O-methylguanosine-3'-phosphate
  modified_base 21: mod_base = OTHER; note = 2'-O-methyladenosine-3'-phosphorothioate
  modified_base 22: mod_base = OTHER; note = 2'-O-methylcytidine-3'-phosphorothioate
  modified_base 23: mod_base = OTHER; note = 2'-O-methylguanosine
tgattactttgtcagtgatgacg

SEQ ID NO: 1110 - RNA, 23 nt, synthetic construct
  source 1..23: mol_type = other RNA
  modified_base 1: mod_base = OTHER; note = 2'-O-methyluridine-3'-phosphorothioate 5'-(E)-Vinylphosphonate
  modified_base 2: mod_base = OTHER; note = 2'-deoxy-2'-fluoroguanosine-3'-phosphorothioate
  modified_base 3: mod_base = OTHER; note = 2'-O-methylguanosine-3'-phosphate
  modified_base 4: mod_base = OTHER; note = 2'-O-methyladenosine-3'-phosphate
  modified_base 5: mod_base = OTHER; note = 2'-O-methyluridine-3'-phosphate
  modified_base 6: mod_base = OTHER; note = 2'-deoxy-2'-fluorouridine-3'-phosphate
  modified_base 7: mod_base = OTHER; note = 2'-O-methyladenosine-3'-phosphate
  modified_base 8: mod_base = OTHER; note = 2'-O-methylcytidine-3'-phosphate
  modified_base 9: mod_base = OTHER; note = 2'-O-methyluridine-3'-phosphate
  modified_base 10: mod_base = OTHER; note = 2'-O-methyluridine-3'-phosphate
  modified_base 11: mod_base = OTHER; note = 2'-O-methyluridine-3'-phosphate
  modified_base 12: mod_base = OTHER; note = 2'-O-methylguanosine-3'-phosphate
  modified_base 13: mod_base = OTHER; note = 2'-O-methyluridine-3'-phosphate
  modified_base 14: mod_base = OTHER; note = 2'-deoxy-2'-fluorocytidine-3'-phosphate
  modified_base 15: mod_base = OTHER; note = 2'-O-methyladenosine-3'-phosphate
  modified_base 16: mod_base = OTHER; note = 2'-deoxy-2'-fluoroguanosine-3'-phosphate
  modified_base 17: mod_base = OTHER; note = 2'-O-methyluridine-3'-phosphate
  modified_base 18: mod_base = OTHER; note = 2'-O-methylguanosine-3'-phosphate
  modified_base 19: mod_base = OTHER; note = 2'-O-methyladenosine-3'-phosphate
  modified_base 20: mod_base = OTHER; note = 2'-O-methyluridine-3'-phosphate
  modified_base 21: mod_base = OTHER; note = 2'-O-methylguanosine-3'-phosphorothioate
  modified_base 22: mod_base = OTHER; note = 2'-O-methyladenosine-3'-phosphorothioate
  modified_base 23: mod_base = OTHER; note = 2'-O-methylcytidine
tggattactttgtcagtgatgac

SEQ ID NO: 1111 - RNA, 23 nt, synthetic construct
  source 1..23: mol_type = other RNA
  modified_base 1: mod_base = OTHER; note = 2'-O-methyluridine-3'-phosphorothioate 5'-(E)-Vinylphosphonate
  modified_base 2: mod_base = OTHER; note = 2'-deoxy-2'-fluoroguanosine-3'-phosphorothioate
  modified_base 3: mod_base = OTHER; note = 2'-O-methylguanosine-3'-phosphate
  modified_base 4: mod_base = OTHER; note = 2'-O-methylguanosine-3'-phosphate
  modified_base 5: mod_base = OTHER; note = 2'-O-methyladenosine-3'-phosphate
  modified_base 6: mod_base = OTHER; note = 2'-deoxy-2'-fluorouridine-3'-phosphate
  modified_base 7: mod_base = OTHER; note = 2'-O-methyluridine-3'-phosphate
  modified_base 8: mod_base = OTHER; note = 2'-O-methyladenosine-3'-phosphate
  modified_base 9: mod_base = OTHER; note = 2'-O-methylcytidine-3'-phosphate
  modified_base 10: mod_base = OTHER; note = 2'-O-methyluridine-3'-phosphate
  modified_base 11: mod_base = OTHER; note = 2'-O-methyluridine-3'-phosphate
  modified_base 12: mod_base = OTHER; note = 2'-O-methyluridine-3'-phosphate
  modified_base 13: mod_base = OTHER; note = 2'-O-methylguanosine-3'-phosphate
  modified_base 14: mod_base = OTHER; note = 2'-deoxy-2'-fluorouridine-3'-phosphate
  modified_base 15: mod_base = OTHER; note = 2'-O-methylcytidine-3'-phosphate
  modified_base 16: mod_base = OTHER; note = 2'-deoxy-2'-fluoroadenosine-3'-phosphate
  modified_base 17: mod_base = OTHER; note = 2'-O-methylguanosine-3'-phosphate
  modified_base 18: mod_base = OTHER; note = 2'-O-methyluridine-3'-phosphate
  modified_base 19: mod_base = OTHER; note = 2'-O-methylguanosine-3'-phosphate
  modified_base 20: mod_base = OTHER; note = 2'-O-methyladenosine-3'-phosphate
  modified_base 21: mod_base = OTHER; note = 2'-O-methyluridine-3'-phosphorothioate
  modified_base 22: mod_base = OTHER; note = 2'-O-methylguanosine-3'-phosphorothioate
  modified_base 23: mod_base = OTHER; note = 2'-O-methyladenosine
tgggattactttgtcagtgatga

SEQ ID NO: 1112 - RNA, 23 nt, synthetic construct
  source 1..23: mol_type = other RNA
  modified_base 1: mod_base = OTHER; note = 2'-O-methyluridine-3'-phosphorothioate 5'-(E)-Vinylphosphonate
  modified_base 2: mod_base = OTHER; note = 2'-deoxy-2'-fluorouridine-3'-phosphorothioate
  modified_base 3: mod_base = OTHER; note = 2'-O-methylguanosine-3'-phosphate
  modified_base 4: mod_base = OTHER; note = 2'-O-methylguanosine-3'-phosphate
  modified_base 5: mod_base = OTHER; note = 2'-O-methylguanosine-3'-phosphate
  modified_base 6: mod_base = OTHER; note = 2'-deoxy-2'-fluoroadenosine-3'-phosphate
  modified_base 7: mod_base = OTHER; note = 2'-O-methyluridine-3'-phosphate
  modified_base 8: mod_base = OTHER; note = 2'-O-methyluridine-3'-phosphate
  modified_base 9: mod_base = OTHER; note = 2'-O-methyladenosine-3'-phosphate
  modified_base 10: mod_base = OTHER; note = 2'-O-methylcytidine-3'-phosphate
  modified_base 11: mod_base = OTHER; note = 2'-O-methyluridine-3'-phosphate
  modified_base 12: mod_base = OTHER; note = 2'-O-methyluridine-3'-phosphate
  modified_base 13: mod_base = OTHER; note = 2'-O-methyluridine-3'-phosphate
  modified_base 14: mod_base = OTHER; note = 2'-deoxy-2'-fluoroguanosine-3'-phosphate
  modified_base 15: mod_base = OTHER; note = 2'-O-methyluridine-3'-phosphate
  modified_base 16: mod_base = OTHER; note = 2'-deoxy-2'-fluorocytidine-3'-phosphate
  modified_base 17: mod_base = OTHER; note = 2'-O-methyladenosine-3'-phosphate
  modified_base 18: mod_base = OTHER; note = 2'-O-methylguanosine-3'-phosphate
  modified_base 19: mod_base = OTHER; note = 2'-O-methyluridine-3'-phosphate
  modified_base 20: mod_base = OTHER; note = 2'-O-methylguanosine-3'-phosphate
  modified_base 21: mod_base = OTHER; note = 2'-O-methyladenosine-3'-phosphorothioate
  modified_base 22: mod_base = OTHER; note = 2'-O-methyluridine-3'-phosphorothioate
  modified_base 23: mod_base = OTHER; note = 2'-O-methylguanosine
ttgggattactttgtcagtgatg

SEQ ID NO: 1113 - RNA, 23 nt, synthetic construct
  source 1..23: mol_type = other RNA
  modified_base 1: mod_base = OTHER; note = 2'-O-methyluridine-3'-phosphorothioate 5'-(E)-Vinylphosphonate
  modified_base 2: mod_base = OTHER; note = 2'-deoxy-2'-fluorouridine-3'-phosphorothioate
  modified_base 3: mod_base = OTHER; note = 2'-O-methylguanosine-3'-phosphate
  modified_base 4: mod_base = OTHER; note = 2'-O-methylguanosine-3'-phosphate
  modified_base 5: mod_base = OTHER; note = 2'-O-methylguanosine-3'-phosphate
  modified_base 6: mod_base = OTHER; note = 2'-deoxy-2'-fluoroadenosine-3'-phosphate
  modified_base 7: mod_base = OTHER; note = 2'-O-methyladenosine-3'-phosphate
  modified_base 8: mod_base = OTHER; note = 2'-O-methyluridine-3'-phosphate
  modified_base 9: mod_base = OTHER; note = 2'-O-methyladenosine-3'-phosphate
  modified_base 10: mod_base = OTHER; note = 2'-O-methylcytidine-3'-phosphate
  modified_base 11: mod_base = OTHER; note = 2'-O-methyluridine-3'-phosphate
  modified_base 12: mod_base = OTHER; note = 2'-O-methyluridine-3'-phosphate
  modified_base 13: mod_base = OTHER; note = 2'-O-methyluridine-3'-phosphate
  modified_base 14: mod_base = OTHER; note = 2'-deoxy-2'-fluoroguanosine-3'-phosphate
  modified_base 15: mod_base = OTHER; note = 2'-O-methyluridine-3'-phosphate
  modified_base 16: mod_base = OTHER; note = 2'-deoxy-2'-fluorocytidine-3'-phosphate
  modified_base 17: mod_base = OTHER; note = 2'-O-methyladenosine-3'-phosphate
  modified_base 18: mod_base = OTHER; note = 2'-O-methylguanosine-3'-phosphate
  modified_base 19: mod_base = OTHER; note = 2'-O-methyluridine-3'-phosphate
  modified_base 20: mod_base = OTHER; note = 2'-O-methylguanosine-3'-phosphate
  modified_base 21: mod_base = OTHER; note = 2'-O-methyladenosine-3'-phosphorothioate
  modified_base 22: mod_base = OTHER; note = 2'-O-methyluridine-3'-phosphorothioate
  modified_base 23: mod_base = OTHER; note = 2'-O-methylguanosine
ttgggaatactttgtcagtgatg

SEQ ID NO: 1114 - RNA, 23 nt, synthetic construct
  source 1..23: mol_type = other RNA
  modified_base 1: mod_base = OTHER; note = 2'-O-methyluridine-3'-phosphorothioate 5'-(E)-Vinylphosphonate
  modified_base 2: mod_base = OTHER; note = 2'-deoxy-2'-fluorocytidine-3'-phosphorothioate
  modified_base 3: mod_base = OTHER; note = 2'-O-methyluridine-3'-phosphate
  modified_base 4: mod_base = OTHER; note = 2'-O-methylguanosine-3'-phosphate
  modified_base 5: mod_base = OTHER; note = 2'-O-methylguanosine-3'-phosphate
  modified_base 6: mod_base = OTHER; note = 2'-deoxy-2'-fluoroguanosine-3'-phosphate
  modified_base 7: mod_base = OTHER; note = 2'-O-methyladenosine-3'-phosphate
  modified_base 8: mod_base = OTHER; note = 2'-O-methyluridine-3'-phosphate
  modified_base 9: mod_base = OTHER; note = 2'-O-methyluridine-3'-phosphate
  modified_base 10: mod_base = OTHER; note = 2'-O-methyladenosine-3'-phosphate
  modified_base 11: mod_base = OTHER; note = 2'-O-methylcytidine-3'-phosphate
  modified_base 12: mod_base = OTHER; note = 2'-O-methyluridine-3'-phosphate
  modified_base 13: mod_base = OTHER; note = 2'-O-methyluridine-3'-phosphate
  modified_base 14: mod_base = OTHER; note = 2'-deoxy-2'-fluorouridine-3'-phosphate
  modified_base 15: mod_base = OTHER; note = 2'-O-methylguanosine-3'-phosphate
  modified_base 16: mod_base = OTHER; note = 2'-deoxy-2'-fluorouridine-3'-phosphate
  modified_base 17: mod_base = OTHER; note = 2'-O-methylcytidine-3'-phosphate
  modified_base 18: mod_base = OTHER; note = 2'-O-methyladenosine-3'-phosphate
  modified_base 19: mod_base = OTHER; note = 2'-O-methylguanosine-3'-phosphate
  modified_base 20: mod_base = OTHER; note = 2'-O-methyluridine-3'-phosphate
  modified_base 21: mod_base = OTHER; note = 2'-O-methylguanosine-3'-phosphorothioate
  modified_base 22: mod_base = OTHER; note = 2'-O-methyladenosine-3'-phosphorothioate
  modified_base 23: mod_base = OTHER; note = 2'-O-methyluridine
tctgggattactttgtcagtgat

SEQ ID NO: 1115 - RNA, 23 nt, synthetic construct
  source 1..23: mol_type = other RNA
  modified_base 1: mod_base = OTHER; note = 2'-O-methyluridine-3'-phosphorothioate 5'-(E)-Vinylphosphonate
  modified_base 2: mod_base = OTHER; note = 2'-deoxy-2'-fluorocytidine-3'-phosphorothioate
  modified_base 3: mod_base = OTHER; note = 2'-O-methyluridine-3'-phosphate
  modified_base 4: mod_base = OTHER; note = 2'-O-methylguanosine-3'-phosphate
  modified_base 5: mod_base = OTHER; note = 2'-O-methylguanosine-3'-phosphate
  modified_base 6: mod_base = OTHER; note = 2'-deoxy-2'-fluoroadenosine-3'-phosphate
  modified_base 7: mod_base = OTHER; note = 2'-O-methyladenosine-3'-phosphate
  modified_base 8: mod_base = OTHER; note = 2'-O-methyluridine-3'-phosphate
  modified_base 9: mod_base = OTHER; note = 2'-O-methyluridine-3'-phosphate
  modified_base 10: mod_base = OTHER; note = 2'-O-methyladenosine-3'-phosphate
  modified_base 11: mod_base = OTHER; note = 2'-O-methylcytidine-3'-phosphate
  modified_base 12: mod_base = OTHER; note = 2'-O-methyluridine-3'-phosphate
  modified_base 13: mod_base = OTHER; note = 2'-O-methyluridine-3'-phosphate
  modified_base 14: mod_base = OTHER; note = 2'-deoxy-2'-fluorouridine-3'-phosphate
  modified_base 15: mod_base = OTHER; note = 2'-O-methylguanosine-3'-phosphate
  modified_base 16: mod_base = OTHER; note = 2'-deoxy-2'-fluorouridine-3'-phosphate
  modified_base 17: mod_base = OTHER; note = 2'-O-methylcytidine-3'-phosphate
  modified_base 18: mod_base = OTHER; note = 2'-O-methyladenosine-3'-phosphate
  modified_base 19: mod_base = OTHER; note = 2'-O-methylguanosine-3'-phosphate
  modified_base 20: mod_base = OTHER; note = 2'-O-methyluridine-3'-phosphate
  modified_base 21: mod_base = OTHER; note = 2'-O-methylguanosine-3'-phosphorothioate
  modified_base 22: mod_base = OTHER; note = 2'-O-methyladenosine-3'-phosphorothioate
  modified_base 23: mod_base = OTHER; note = 2'-O-methyluridine
tctggaattactttgtcagtgat

SEQ ID NO: 1116 - RNA, 23 nt, synthetic construct
  source 1..23: mol_type = other RNA
  modified_base 1: mod_base = OTHER; note = 2'-O-methyluridine-3'-phosphorothioate 5'-(E)-Vinylphosphonate
  modified_base 2: mod_base = OTHER; note = 2'-deoxy-2'-fluoroguanosine-3'-phosphorothioate
  modified_base 3: mod_base = OTHER; note = 2'-O-methylcytidine-3'-phosphate
  modified_base 4: mod_base = OTHER; note = 2'-O-methyluridine-3'-phosphate
  modified_base 5: mod_base = OTHER; note = 2'-O-methylguanosine-3'-phosphate
  modified_base 6: mod_base = OTHER; note = 2'-deoxy-2'-fluoroguanosine-3'-phosphate
  modified_base 7: mod_base = OTHER; note = 2'-O-methylguanosine-3'-phosphate
  modified_base 8: mod_base = OTHER; note = 2'-O-methyladenosine-3'-phosphate
  modified_base 9: mod_base = OTHER; note = 2'-O-methyluridine-3'-phosphate
  modified_base 10: mod_base = OTHER; note = 2'-O-methyluridine-3'-phosphate
  modified_base 11: mod_base = OTHER; note = 2'-O-methyladenosine-3'-phosphate
  modified_base 12: mod_base = OTHER; note = 2'-O-methylcytidine-3'-phosphate
  modified_base 13: mod_base = OTHER; note = 2'-O-methyluridine-3'-phosphate
  modified_base 14: mod_base = OTHER; note = 2'-deoxy-2'-fluorouridine-3'-phosphate
  modified_base 15: mod_base = OTHER; note = 2'-O-methyluridine-3'-phosphate
  modified_base 16: mod_base = OTHER; note = 2'-deoxy-2'-fluoroguanosine-3'-phosphate
  modified_base 17: mod_base = OTHER; note = 2'-O-methyluridine-3'-phosphate
  modified_base 18: mod_base = OTHER; note = 2'-O-methylcytidine-3'-phosphate
  modified_base 19: mod_base = OTHER; note = 2'-O-methyladenosine-3'-phosphate
  modified_base 20: mod_base = OTHER; note = 2'-O-methylguanosine-3'-phosphate
  modified_base 21: mod_base = OTHER; note = 2'-O-methyluridine-3'-phosphorothioate
  modified_base 22: mod_base = OTHER; note = 2'-O-methylguanosine-3'-phosphorothioate
  modified_base 23: mod_base = OTHER; note = 2'-O-methyladenosine
tgctgggattactttgtcagtga

SEQ ID NO: 1117 - RNA, 23 nt, synthetic construct
  source 1..23: mol_type = other RNA
  modified_base 1: mod_base = OTHER; note = 2'-O-methyluridine-3'-phosphorothioate 5'-(E)-Vinylphosphonate
  modified_base 2: mod_base = OTHER; note = 2'-deoxy-2'-fluoroguanosine-3'-phosphorothioate
  modified_base 3: mod_base = OTHER; note = 2'-O-methylcytidine-3'-phosphate
  modified_base 4: mod_base = OTHER; note = 2'-O-methyluridine-3'-phosphate
  modified_base 5: mod_base = OTHER; note = 2'-O-methylguanosine-3'-phosphate
  modified_base 6: mod_base = OTHER; note = 2'-deoxy-2'-fluoroguanosine-3'-phosphate
  modified_base 7: mod_base = OTHER; note = 2'-O-methyladenosine-3'-phosphate
  modified_base 8: mod_base = OTHER; note = 2'-O-methyladenosine-3'-phosphate
  modified_base 9: mod_base = OTHER; note = 2'-O-methyluridine-3'-phosphate
  modified_base 10: mod_base = OTHER; note = 2'-O-methyluridine-3'-phosphate
  modified_base 11: mod_base = OTHER; note = 2'-O-methyladenosine-3'-phosphate
  modified_base 12: mod_base = OTHER; note = 2'-O-methylcytidine-3'-phosphate
  modified_base 13: mod_base = OTHER; note = 2'-O-methyluridine-3'-phosphate
  modified_base 14: mod_base = OTHER; note = 2'-deoxy-2'-fluorouridine-3'-phosphate
  modified_base 15: mod_base = OTHER; note = 2'-O-methyluridine-3'-phosphate
  modified_base 16: mod_base = OTHER; note = 2'-deoxy-2'-fluoroguanosine-3'-phosphate
  modified_base 17: mod_base = OTHER; note = 2'-O-methyluridine-3'-phosphate
  modified_base 18: mod_base = OTHER; note = 2'-O-methylcytidine-3'-phosphate
  modified_base 19: mod_base = OTHER; note = 2'-O-methyladenosine-3'-phosphate
  modified_base 20: mod_base = OTHER; note = 2'-O-methylguanosine-3'-phosphate
  modified_base 21: mod_base = OTHER; note = 2'-O-methyluridine-3'-phosphorothioate
  modified_base 22: mod_base = OTHER; note = 2'-O-methylguanosine-3'-phosphorothioate
  modified_base 23: mod_base = OTHER; note = 2'-O-methyladenosine
tgctggaattactttgtcagtga

SEQ ID NO: 1118 - RNA, 23 nt, synthetic construct
  source 1..23: mol_type = other RNA
  modified_base 1: mod_base = OTHER; note = 2'-O-methyluridine-3'-phosphorothioate 5'-(E)-Vinylphosphonate
  modified_base 2: mod_base = OTHER; note = 2'-deoxy-2'-fluoroadenosine-3'-phosphorothioate
  modified_base 3: mod_base = OTHER; note = 2'-O-methyladenosine-3'-phosphate
  modified_base 4: mod_base = OTHER; note = 2'-O-methylguanosine-3'-phosphate
  modified_base 5: mod_base = OTHER; note = 2'-O-methylcytidine-3'-phosphate
  modified_base 6: mod_base = OTHER; note = 2'-deoxy-2'-fluorouridine-3'-phosphate
  modified_base 7: mod_base = OTHER; note = 2'-O-methylguanosine-3'-phosphate
  modified_base 8: mod_base = OTHER; note = 2'-O-methylguanosine-3'-phosphate
  modified_base 9: mod_base = OTHER; note = 2'-O-methylguanosine-3'-phosphate
  modified_base 10: mod_base = OTHER; note = 2'-O-methyladenosine-3'-phosphate
  modified_base 11: mod_base = OTHER; note = 2'-O-methyluridine-3'-phosphate
  modified_base 12: mod_base = OTHER; note = 2'-O-methyluridine-3'-phosphate
  modified_base 13: mod_base = OTHER; note = 2'-O-methyladenosine-3'-phosphate
  modified_base 14: mod_base = OTHER; note = 2'-deoxy-2'-fluorocytidine-3'-phosphate
  modified_base 15: mod_base = OTHER; note = 2'-O-methyluridine-3'-phosphate
  modified_base 16: mod_base = OTHER; note = 2'-deoxy-2'-fluorouridine-3'-phosphate
  modified_base 17: mod_base = OTHER; note = 2'-O-methyluridine-3'-phosphate
  modified_base 18: mod_base = OTHER; note = 2'-O-methylguanosine-3'-phosphate
  modified_base 19: mod_base = OTHER; note = 2'-O-methyluridine-3'-phosphate
  modified_base 20: mod_base = OTHER; note = 2'-O-methylcytidine-3'-phosphate
  modified_base 21: mod_base = OTHER; note = 2'-O-methyladenosine-3'-phosphorothioate
  modified_base 22: mod_base = OTHER; note = 2'-O-methylguanosine-3'-phosphorothioate
  modified_base 23: mod_base = OTHER; note = 2'-O-methyluridine
taagctgggattactttgtcagt

SEQ ID NO: 1119 - RNA, 23 nt, synthetic construct
  source 1..23: mol_type = other RNA
  modified_base 1: mod_base = OTHER; note = 2'-O-methyluridine-3'-phosphorothioate 5'-(E)-Vinylphosphonate
  modified_base 2: mod_base = OTHER; note = 2'-deoxy-2'-fluoroadenosine-3'-phosphorothioate
  modified_base 3: mod_base = OTHER; note = 2'-O-methyladenosine-3'-phosphate
  modified_base 4: mod_base = OTHER; note = 2'-O-methylguanosine-3'-phosphate
  modified_base 5: mod_base = OTHER; note = 2'-O-methylcytidine-3'-phosphate
  modified_base 6: mod_base = OTHER; note = 2'-deoxy-2'-fluorouridine-3'-phosphate
  modified_base 7: mod_base = OTHER; note = 2'-O-methyladenosine-3'-phosphate
  modified_base 8: mod_base = OTHER; note = 2'-O-methylguanosine-3'-phosphate
  modified_base 9: mod_base = OTHER; note = 2'-O-methylguanosine-3'-phosphate
  modified_base 10: mod_base = OTHER; note = 2'-O-methyladenosine-3'-phosphate
  modified_base 11: mod_base = OTHER; note = 2'-O-methyluridine-3'-phosphate
  modified_base 12: mod_base = OTHER; note = 2'-O-methyluridine-3'-phosphate
  modified_base 13: mod_base = OTHER; note = 2'-O-methyladenosine-3'-phosphate
  modified_base 14: mod_base = OTHER; note = 2'-deoxy-2'-fluorocytidine-3'-phosphate
  modified_base 15: mod_base = OTHER; note = 2'-O-methyluridine-3'-phosphate
  modified_base 16: mod_base = OTHER; note = 2'-deoxy-2'-fluorouridine-3'-phosphate
  modified_base 17: mod_base = OTHER; note = 2'-O-methyluridine-3'-phosphate
  modified_base 18: mod_base = OTHER; note = 2'-O-methylguanosine-3'-phosphate
  modified_base 19: mod_base = OTHER; note = 2'-O-methyluridine-3'-phosphate
  modified_base 20: mod_base = OTHER; note = 2'-O-methylcytidine-3'-phosphate
  modified_base 21: mod_base = OTHER; note = 2'-O-methyladenosine-3'-phosphorothioate
  modified_base 22: mod_base = OTHER; note = 2'-O-methylguanosine-3'-phosphorothioate
  modified_base 23: mod_base = OTHER; note = 2'-O-methyluridine
taagctaggattactttgtcagt

SEQ ID NO: 1120 - RNA, 23 nt, synthetic construct
  source 1..23: mol_type = other RNA
  modified_base 1: mod_base = OTHER; note = 2'-O-methyluridine-3'-phosphorothioate 5'-(E)-Vinylphosphonate
  modified_base 2: mod_base = OTHER; note = 2'-deoxy-2'-fluorocytidine-3'-phosphorothioate
  modified_base 3: mod_base = OTHER; note = 2'-O-methyladenosine-3'-phosphate
  modified_base 4: mod_base = OTHER; note = 2'-O-methyladenosine-3'-phosphate
  modified_base 5: mod_base = OTHER; note = 2'-O-methylguanosine-3'-phosphate
  modified_base 6: mod_base = OTHER; note = 2'-deoxy-2'-fluorocytidine-3'-phosphate
  modified_base 7: mod_base = OTHER; note = 2'-O-methyluridine-3'-phosphate
  modified_base 8: mod_base = OTHER; note = 2'-O-methylguanosine-3'-phosphate
  modified_base 9: mod_base = OTHER; note = 2'-O-methylguanosine-3'-phosphate
  modified_base 10: mod_base = OTHER; note = 2'-O-methylguanosine-3'-phosphate
  modified_base 11: mod_base = OTHER; note = 2'-O-methyladenosine-3'-phosphate
  modified_base 12: mod_base = OTHER; note = 2'-O-methyluridine-3'-phosphate
  modified_base 13: mod_base = OTHER; note = 2'-O-methyluridine-3'-phosphate
  modified_base 14: mod_base = OTHER; note = 2'-deoxy-2'-fluoroadenosine-3'-phosphate
  modified_base 15: mod_base = OTHER; note = 2'-O-methylcytidine-3'-phosphate
  modified_base 16: mod_base = OTHER; note = 2'-deoxy-2'-fluorouridine-3'-phosphate
  modified_base 17: mod_base = OTHER; note = 2'-O-methyluridine-3'-phosphate
  modified_base 18: mod_base = OTHER; note = 2'-O-methyluridine-3'-phosphate
  modified_base 19: mod_base = OTHER; note = 2'-O-methylguanosine-3'-phosphate
  modified_base 20: mod_base = OTHER; note = 2'-O-methyluridine-3'-phosphate
  modified_base 21: mod_base = OTHER; note = 2'-O-methylcytidine-3'-phosphorothioate
  modified_base 22: mod_base = OTHER; note = 2'-O-methyladenosine-3'-phosphorothioate
  modified_base 23: mod_base = OTHER; note = 2'-O-methylguanosine
tcaagctgggattactttgtcag

SEQ ID NO: 1121 - RNA, 23 nt, synthetic construct
  source 1..23: mol_type = other RNA
  modified_base 1: mod_base = OTHER; note = 2'-O-methyluridine-3'-phosphorothioate 5'-(E)-Vinylphosphonate
  modified_base 2: mod_base = OTHER; note = 2'-deoxy-2'-fluoroadenosine-3'-phosphorothioate
  modified_base 3: mod_base = OTHER; note = 2'-O-methylcytidine-3'-phosphate
  modified_base 4: mod_base = OTHER; note = 2'-O-methyladenosine-3'-phosphate
  modified_base 5: mod_base = OTHER; note = 2'-O-methyladenosine-3'-phosphate
  modified_base 6: mod_base = OTHER; note = 2'-deoxy-2'-fluoroguanosine-3'-phosphate
  modified_base 7: mod_base = OTHER; note = 2'-O-methylcytidine-3'-phosphate
  modified_base 8: mod_base = OTHER; note = 2'-O-methyluridine-3'-phosphate
  modified_base 9: mod_base = OTHER; note = 2'-O-methylguanosine-3'-phosphate
  modified_base 10: mod_base = OTHER; note = 2'-O-methylguanosine-3'-phosphate
  modified_base 11: mod_base = OTHER; note = 2'-O-methylguanosine-3'-phosphate
  modified_base 12: mod_base = OTHER; note = 2'-O-methyladenosine-3'-phosphate
  modified_base 13: mod_base = OTHER; note = 2'-O-methyluridine-3'-phosphate
  modified_base 14: mod_base = OTHER; note = 2'-deoxy-2'-fluorouridine-3'-phosphate
  modified_base 15: mod_base = OTHER; note = 2'-O-methyladenosine-3'-phosphate
  modified_base 16: mod_base = OTHER; note = 2'-deoxy-2'-fluorocytidine-3'-phosphate
  modified_base 17: mod_base = OTHER; note = 2'-O-methyluridine-3'-phosphate
  modified_base 18: mod_base = OTHER; note = 2'-O-methyluridine-3'-phosphate
  modified_base 19: mod_base = OTHER; note = 2'-O-methyluridine-3'-phosphate
  modified_base 20: mod_base = OTHER; note = 2'-O-methylguanosine-3'-phosphate
  modified_base 21: mod_base = OTHER; note = 2'-O-methyluridine-3'-phosphorothioate
  modified_base 22: mod_base = OTHER; note = 2'-O-methylcytidine-3'-phosphorothioate
  modified_base 23: mod_base = OTHER; note = 2'-O-methyladenosine
tacaagctgggattactttgtca

SEQ ID NO: 1122 - RNA, 23 nt, synthetic construct
  source 1..23: mol_type = other RNA
  modified_base 1: mod_base = OTHER; note = 2'-O-methyluridine-3'-phosphorothioate 5'-(E)-Vinylphosphonate
  modified_base 2: mod_base = OTHER; note = 2'-deoxy-2'-fluoroadenosine-3'-phosphorothioate
  modified_base 3: mod_base = OTHER; note = 2'-O-methylcytidine-3'-phosphate
  modified_base 4: mod_base = OTHER; note = 2'-O-methyladenosine-3'-phosphate
  modified_base 5: mod_base = OTHER; note = 2'-O-methyladenosine-3'-phosphate
  modified_base 6: mod_base = OTHER; note = 2'-deoxy-2'-fluoroguanosine-3'-phosphate
  modified_base 7: mod_base = OTHER; note = 2'-O-methyladenosine-3'-phosphate
  modified_base 8: mod_base = OTHER; note = 2'-O-methyluridine-3'-phosphate
  modified_base 9: mod_base = OTHER; note = 2'-O-methylguanosine-3'-phosphate
  modified_base 10: mod_base = OTHER; note = 2'-O-methylguanosine-3'-phosphate
  modified_base 11: mod_base = OTHER; note = 2'-O-methylguanosine-3'-phosphate
  modified_base 12: mod_base = OTHER; note = 2'-O-methyladenosine-3'-phosphate
  modified_base 13: mod_base = OTHER; note = 2'-O-methyluridine-3'-phosphate
  modified_base 14: mod_base = OTHER; note = 2'-deoxy-2'-fluorouridine-3'-phosphate
  modified_base 15: mod_base = OTHER; note = 2'-O-methyladenosine-3'-phosphate
  modified_base 16: mod_base = OTHER; note = 2'-deoxy-2'-fluorocytidine-3'-phosphate
  modified_base 17: mod_base = OTHER; note = 2'-O-methyluridine-3'-phosphate
  modified_base 18: mod_base = OTHER; note = 2'-O-methyluridine-3'-phosphate
  modified_base 19: mod_base = OTHER; note = 2'-O-methyluridine-3'-phosphate
  modified_base 20: mod_base = OTHER; note = 2'-O-methylguanosine-3'-phosphate
  modified_base 21: mod_base = OTHER; note = 2'-O-methyluridine-3'-phosphorothioate
  modified_base 22: mod_base = OTHER; note = 2'-O-methylcytidine-3'-phosphorothioate
  modified_base 23: mod_base = OTHER; note = 2'-O-methyladenosine
tacaagatgggattactttgtca

SEQ ID NO: 1123 - RNA, 23 nt, synthetic construct
  source 1..23: mol_type = other RNA
  modified_base 1: mod_base = OTHER; note = 2'-O-methyluridine-3'-phosphorothioate 5'-(E)-Vinylphosphonate
  modified_base 2: mod_base = OTHER; note = 2'-deoxy-2'-fluoroguanosine-3'-phosphorothioate
  modified_base 3: mod_base = OTHER; note = 2'-O-methyladenosine-3'-phosphate
  modified_base 4: mod_base = OTHER; note = 2'-O-methylcytidine-3'-phosphate
  modified_base 5: mod_base = OTHER; note = 2'-O-methyladenosine-3'-phosphate
  modified_base 6: mod_base = OTHER; note = 2'-deoxy-2'-fluoroadenosine-3'-phosphate
  modified_base 7: mod_base = OTHER; note = 2'-O-methylguanosine-3'-phosphate
  modified_base 8: mod_base = OTHER; note = 2'-O-methylcytidine-3'-phosphate
  modified_base 9: mod_base = OTHER; note = 2'-O-methyluridine-3'-phosphate
  modified_base 10: mod_base = OTHER; note = 2'-O-methylguanosine-3'-phosphate
  modified_base 11: mod_base = OTHER; note = 2'-O-methylguanosine-3'-phosphate
  modified_base 12: mod_base = OTHER; note = 2'-O-methylguanosine-3'-phosphate
  modified_base 13: mod_base = OTHER; note = 2'-O-methyladenosine-3'-phosphate
  modified_base 14: mod_base = OTHER; note = 2'-deoxy-2'-fluorouridine-3'-phosphate
  modified_base 15: mod_base = OTHER; note = 2'-O-methyluridine-3'-phosphate
  modified_base 16: mod_base = OTHER; note = 2'-deoxy-2'-fluoroadenosine-3'-phosphate
  modified_base 17: mod_base = OTHER; note = 2'-O-methylcytidine-3'-phosphate
  modified_base 18: mod_base = OTHER; note = 2'-O-methyluridine-3'-phosphate
  modified_base 19: mod_base = OTHER; note = 2'-O-methyluridine-3'-phosphate
  modified_base 20: mod_base = OTHER; note = 2'-O-methyluridine-3'-phosphate
  modified_base 21: mod_base = OTHER; note = 2'-O-methylguanosine-3'-phosphorothioate
  modified_base 22: mod_base = OTHER; note = 2'-O-methyluridine-3'-phosphorothioate
  modified_base 23: mod_base = OTHER; note = 2'-O-methylcytidine
tgacaagctgggattactttgtc

SEQ ID NO: 1124 - RNA, 23 nt, synthetic construct
  source 1..23: mol_type = other RNA
  modified_base 1: mod_base = OTHER; note = 2'-O-methyluridine-3'-phosphorothioate 5'-(E)-Vinylphosphonate
  modified_base 2: mod_base = OTHER; note = 2'-deoxy-2'-fluoroadenosine-3'-phosphorothioate
  modified_base 3: mod_base = OTHER; note = 2'-O-methylguanosine-3'-phosphate
  modified_base 4: mod_base = OTHER; note = 2'-O-methyladenosine-3'-phosphate
  modified_base 5: mod_base = OTHER; note = 2'-O-methylcytidine-3'-phosphate
  modified_base 6: mod_base = OTHER; note = 2'-deoxy-2'-fluoroadenosine-3'-phosphate
  modified_base 7: mod_base = OTHER; note = 2'-O-methyladenosine-3'-phosphate
  modified_base 8: mod_base = OTHER; note = 2'-O-methylguanosine-3'-phosphate
  modified_base 9: mod_base = OTHER; note = 2'-O-methylcytidine-3'-phosphate
  modified_base 10: mod_base = OTHER; note = 2'-O-methyluridine-3'-phosphate
  modified_base 11: mod_base = OTHER; note = 2'-O-methylguanosine-3'-phosphate
  modified_base 12: mod_base = OTHER; note = 2'-O-methylguanosine-3'-phosphate
  modified_base 13: mod_base = OTHER; note = 2'-O-methylguanosine-3'-phosphate
  modified_base 14: mod_base = OTHER; note = 2'-deoxy-2'-fluoroadenosine-3'-phosphate
  modified_base 15: mod_base = OTHER; note = 2'-O-methyluridine-3'-phosphate
  modified_base 16: mod_base = OTHER; note = 2'-deoxy-2'-fluorouridine-3'-phosphate
  modified_base 17: mod_base = OTHER; note = 2'-O-methyladenosine-3'-phosphate
  modified_base 18: mod_base = OTHER; note = 2'-O-methylcytidine-3'-phosphate
  modified_base 19: mod_base = OTHER; note = 2'-O-methyluridine-3'-phosphate
  modified_base 20: mod_base = OTHER; note = 2'-O-methyluridine-3'-phosphate
  modified_base 21: mod_base = OTHER; note = 2'-O-methyluridine-3'-phosphorothioate
  modified_base 22: mod_base = OTHER; note = 2'-O-methylguanosine-3'-phosphorothioate
  modified_base 23: mod_base = OTHER; note = 2'-O-methyluridine
tagacaagctgggattactttgt

SEQ ID NO: 1125 - RNA, 23 nt, synthetic construct
  source 1..23: mol_type = other RNA
  modified_base 1: mod_base = OTHER; note = 2'-O-methyluridine-3'-phosphorothioate 5'-(E)-Vinylphosphonate
  modified_base 2: mod_base = OTHER; note = 2'-deoxy-2'-fluoroguanosine-3'-phosphorothioate
  modified_base 3: mod_base = OTHER; note = 2'-O-methyladenosine-3'-phosphate
  modified_base 4: mod_base = OTHER; note = 2'-O-methyladenosine-3'-phosphate
  modified_base 5: mod_base = OTHER; note = 2'-O-methyladenosine-3'-phosphate
  modified_base 6: mod_base = OTHER; note = 2'-deoxy-2'-fluorocytidine-3'-phosphate
  modified_base 7: mod_base = OTHER; note = 2'-O-methyladenosine-3'-phosphate
  modified_base 8: mod_base = OTHER; note = 2'-O-methyluridine-3'-phosphate
  modified_base 9: mod_base = OTHER; note = 2'-O-methyluridine-3'-phosphate
  modified_base 10: mod_base = OTHER; note = 2'-O-methylcytidine-3'-phosphate
  modified_base 11: mod_base = OTHER; note = 2'-O-methylguanosine-3'-phosphate
  modified_base 12: mod_base = OTHER; note = 2'-O-methylguanosine-3'-phosphate
  modified_base 13: mod_base = OTHER; note = 2'-O-methyluridine-3'-phosphate
  modified_base 14: mod_base = OTHER; note = 2'-deoxy-2'-fluorocytidine-3'-phosphate
  modified_base 15: mod_base = OTHER; note = 2'-O-methylcytidine-3'-phosphate
  modified_base 16: mod_base = OTHER; note = 2'-deoxy-2'-fluoroguanosine-3'-phosphate
  modified_base 17: mod_base = OTHER; note = 2'-O-methylguanosine-3'-phosphate
  modified_base 18: mod_base = OTHER; note = 2'-O-methyluridine-3'-phosphate
  modified_base 19: mod_base = OTHER; note = 2'-O-methylcytidine-3'-phosphate
  modified_base 20: mod_base = OTHER; note = 2'-O-methyladenosine-3'-phosphate
  modified_base 21: mod_base = OTHER; note = 2'-O-methylguanosine-3'-phosphorothioate
  modified_base 22: mod_base = OTHER; note = 2'-O-methylcytidine-3'-phosphorothioate
  modified_base 23: mod_base = OTHER; note = 2'-O-methylguanosine
tgaaacattcggtccggtcagcg

SEQ ID NO: 1126 - RNA, 23 nt, synthetic construct
  source 1..23: mol_type = other RNA
  modified_base 1: mod_base = OTHER; note = 2'-O-methyluridine-3'-phosphorothioate 5'-(E)-Vinylphosphonate
  modified_base 2: mod_base = OTHER; note = 2'-deoxy-2'-fluoroguanosine-3'-phosphorothioate
  modified_base 3: mod_base = OTHER; note = 2'-O-methyladenosine-3'-phosphate
  modified_base 4: mod_base = OTHER; note = 2'-O-methyladenosine-3'-phosphate
  modified_base 5: mod_base = OTHER; note = 2'-O-methyladenosine-3'-phosphate
  modified_base 6: mod_base = OTHER; note = 2'-deoxy-2'-fluoroadenosine-3'-phosphate
  modified_base 7: mod_base = OTHER; note = 2'-O-methyladenosine-3'-phosphate
  modified_base 8: mod_base = OTHER; note = 2'-O-methyluridine-3'-phosphate
  modified_base 9: mod_base = OTHER; note = 2'-O-methyluridine-3'-phosphate
  modified_base 10: mod_base = OTHER; note = 2'-O-methylcytidine-3'-phosphate
  modified_base 11: mod_base = OTHER; note = 2'-O-methylguanosine-3'-phosphate
  modified_base 12: mod_base = OTHER; note = 2'-O-methylguanosine-3'-phosphate
  modified_base 13: mod_base = OTHER; note = 2'-O-methyluridine-3'-phosphate
  modified_base 14: mod_base = OTHER; note = 2'-deoxy-2'-fluorocytidine-3'-phosphate
  modified_base 15: mod_base = OTHER; note = 2'-O-methylcytidine-3'-phosphate
  modified_base 16: mod_base = OTHER; note = 2'-deoxy-2'-fluoroguanosine-3'-phosphate
  modified_base 17: mod_base = OTHER; note = 2'-O-methylguanosine-3'-phosphate
  modified_base 18: mod_base = OTHER; note = 2'-O-methyluridine-3'-phosphate
  modified_base 19: mod_base = OTHER; note = 2'-O-methylcytidine-3'-phosphate
  modified_base 20: mod_base = OTHER; note = 2'-O-methyladenosine-3'-phosphate
  modified_base 21: mod_base = OTHER; note = 2'-O-methylguanosine-3'-phosphorothioate
  modified_base 22: mod_base = OTHER; note = 2'-O-methylcytidine-3'-phosphorothioate
  modified_base 23: mod_base = OTHER; note = 2'-O-methylguanosine
tgaaaaattcggtccggtcagcg

SEQ ID NO: 1127 - RNA, 23 nt, synthetic construct
  source 1..23: mol_type = other RNA
  modified_base 1: mod_base = OTHER; note = 2'-O-methyluridine-3'-phosphorothioate 5'-(E)-Vinylphosphonate
  modified_base 2: mod_base = OTHER; note = 2'-deoxy-2'-fluoroguanosine-3'-phosphorothioate
  modified_base 3: mod_base = OTHER; note = 2'-O-methyladenosine-3'-phosphate
  modified_base 4: mod_base = OTHER; note = 2'-O-methyluridine-3'-phosphate
  modified_base 5: mod_base = OTHER; note = 2'-O-methylguanosine-3'-phosphate
  modified_base 6: mod_base = OTHER; note = 2'-deoxy-2'-fluoroadenosine-3'-phosphate
  modified_base 7: mod_base = OTHER; note = 2'-O-methyladenosine-3'-phosphate
  modified_base 8: mod_base = OTHER; note = 2'-O-methyladenosine-3'-phosphate
  modified_base 9: mod_base = OTHER; note = 2'-O-methylcytidine-3'-phosphate
  modified_base 10: mod_base = OTHER; note = 2'-O-methyladenosine-3'-phosphate
  modified_base 11: mod_base = OTHER; note = 2'-O-methyluridine-3'-phosphate
  modified_base 12: mod_base = OTHER; note = 2'-O-methyluridine-3'-phosphate
  modified_base 13: mod_base = OTHER; note = 2'-O-methylcytidine-3'-phosphate
  modified_base 14: mod_base = OTHER; note = 2'-deoxy-2'-fluoroguanosine-3'-phosphate
  modified_base 15: mod_base = OTHER; note = 2'-O-methylguanosine-3'-phosphate
  modified_base 16: mod_base = OTHER; note = 2'-deoxy-2'-fluorouridine-3'-phosphate
  modified_base 17: mod_base = OTHER; note = 2'-O-methylcytidine-3'-phosphate
  modified_base 18: mod_base = OTHER; note = 2'-O-methylcytidine-3'-phosphate
  modified_base 19: mod_base = OTHER; note = 2'-O-methylguanosine-3'-phosphate
  modified_base 20: mod_base = OTHER; note = 2'-O-methylguanosine-3'-phosphate
  modified_base 21: mod_base = OTHER; note = 2'-O-methyluridine-3'-phosphorothioate
  modified_base 22: mod_base = OTHER; note = 2'-O-methylcytidine-3'-phosphorothioate
  modified_base 23: mod_base = OTHER; note = 2'-O-methyladenosine
tgatgaaacattcggtccggtca

SEQ ID NO: 1128 - RNA, 23 nt, synthetic construct
  source 1..23: mol_type = other RNA
  modified_base 1: mod_base = OTHER; note = 2'-O-methyluridine-3'-phosphorothioate 5'-(E)-Vinylphosphonate
  modified_base 2: mod_base = OTHER; note = 2'-deoxy-2'-fluorouridine-3'-phosphorothioate
  modified_base 3: mod_base = OTHER; note = 2'-O-methylguanosine-3'-phosphate
  modified_base 4: mod_base = OTHER; note = 2'-O-methyladenosine-3'-phosphate
  modified_base 5: mod_base = OTHER; note = 2'-O-methyluridine-3'-phosphate
  modified_base 6: mod_base = OTHER; note = 2'-deoxy-2'-fluoroguanosine-3'-phosphate
  modified_base 7: mod_base = OTHER; note = 2'-O-methyladenosine-3'-phosphate
  modified_base 8: mod_base = OTHER; note = 2'-O-methyladenosine-3'-phosphate
  modified_base 9: mod_base = OTHER; note = 2'-O-methyladenosine-3'-phosphate
  modified_base 10: mod_base = OTHER; note = 2'-O-methylcytidine-3'-phosphate
  modified_base 11: mod_base = OTHER; note = 2'-O-methyladenosine-3'-phosphate
  modified_base 12: mod_base = OTHER; note = 2'-O-methyluridine-3'-phosphate
  modified_base 13: mod_base = OTHER; note = 2'-O-methyluridine-3'-phosphate
  modified_base 14: mod_base = OTHER; note = 2'-deoxy-2'-fluorocytidine-3'-phosphate
  modified_base 15: mod_base = OTHER; note = 2'-O-methylguanosine-3'-phosphate
  modified_base 16: mod_base = OTHER; note = 2'-deoxy-2'-fluoroguanosine-3'-phosphate
  modified_base 17: mod_base = OTHER; note = 2'-O-methyluridine-3'-phosphate
  modified_base 18: mod_base = OTHER; note = 2'-O-methylcytidine-3'-phosphate
  modified_base 19: mod_base = OTHER; note = 2'-O-methylcytidine-3'-phosphate
  modified_base 20: mod_base = OTHER; note = 2'-O-methylguanosine-3'-phosphate
  modified_base 21: mod_base = OTHER; note = 2'-O-methylguanosine-3'-phosphorothioate
  modified_base 22: mod_base = OTHER; note = 2'-O-methyluridine-3'-phosphorothioate
  modified_base 23: mod_base = OTHER; note = 2'-O-methylcytidine
ttgatgaaacattcggtccggtc

SEQ ID NO: 1129 - RNA, 23 nt, synthetic construct
  source 1..23: mol_type = other RNA
  modified_base 1: mod_base = OTHER; note = 2'-O-methyluridine-3'-phosphorothioate 5'-(E)-Vinylphosphonate
  modified_base 2: mod_base = OTHER; note = 2'-deoxy-2'-fluorouridine-3'-phosphorothioate
  modified_base 3: mod_base = OTHER; note = 2'-O-methylguanosine-3'-phosphate
  modified_base 4: mod_base = OTHER; note = 2'-O-methyladenosine-3'-phosphate
  modified_base 5: mod_base = OTHER; note = 2'-O-methyluridine-3'-phosphate
  modified_base 6: mod_base = OTHER; note = 2'-deoxy-2'-fluoroadenosine-3'-phosphate
  modified_base 7: mod_base = OTHER; note = 2'-O-methyladenosine-3'-phosphate
  modified_base 8: mod_base = OTHER; note = 2'-O-methyladenosine-3'-phosphate
  modified_base 9: mod_base = OTHER; note = 2'-O-methyladenosine-3'-phosphate
  modified_base 10: mod_base = OTHER; note = 2'-O-methylcytidine-3'-phosphate
  modified_base 11: mod_base = OTHER; note = 2'-O-methyladenosine-3'-phosphate
  modified_base 12: mod_base = OTHER; note = 2'-O-methyluridine-3'-phosphate
  modified_base 13: mod_base = OTHER; note = 2'-O-methyluridine-3'-phosphate
  modified_base 14: mod_base = OTHER; note = 2'-deoxy-2'-fluorocytidine-3'-phosphate
  modified_base 15: mod_base = OTHER; note = 2'-O-methylguanosine-3'-phosphate
  modified_base 16: mod_base = OTHER; note = 2'-deoxy-2'-fluoroguanosine-3'-phosphate
  modified_base 17: mod_base = OTHER; note = 2'-O-methyluridine-3'-phosphate
  modified_base 18: mod_base = OTHER; note = 2'-O-methylcytidine-3'-phosphate
  modified_base 19: mod_base = OTHER; note = 2'-O-methylcytidine-3'-phosphate
  modified_base 20: mod_base = OTHER; note = 2'-O-methylguanosine-3'-phosphate
  modified_base 21: mod_base = OTHER; note = 2'-O-methylguanosine-3'-phosphorothioate
  modified_base 22: mod_base = OTHER; note = 2'-O-methyluridine-3'-phosphorothioate
  modified_base 23: mod_base = OTHER; note = 2'-O-methylcytidine
ttgataaaacattcggtccggtc

SEQ ID NO: 1130 - RNA, 23 nt, synthetic construct
  source 1..23: mol_type = other RNA
  modified_base 1: mod_base = OTHER; note = 2'-O-methyluridine-3'-phosphorothioate 5'-(E)-Vinylphosphonate
  modified_base 2: mod_base = OTHER; note = 2'-deoxy-2'-fluoroguanosine-3'-phosphorothioate
  modified_base 3: mod_base = OTHER; note = 2'-O-methyluridine-3'-phosphate
  modified_base 4: mod_base = OTHER; note = 2'-O-methylguanosine-3'-phosphate
  modified_base 5: mod_base = OTHER; note = 2'-O-methyladenosine-3'-phosphate
  modified_base 6: mod_base = OTHER; note = 2'-deoxy-2'-fluorouridine-3'-phosphate
  modified_base 7: mod_base = OTHER; note = 2'-O-methylguanosine-3'-phosphate
  modified_base 8: mod_base = OTHER; note = 2'-O-methyladenosine-3'-phosphate
  modified_base 9: mod_base = OTHER; note = 2'-O-methyladenosine-3'-phosphate
  modified_base 10: mod_base = OTHER; note = 2'-O-methyladenosine-3'-phosphate
  modified_base 11: mod_base = OTHER; note = 2'-O-methylcytidine-3'-phosphate
  modified_base 12: mod_base = OTHER; note = 2'-O-methyladenosine-3'-phosphate
  modified_base 13: mod_base = OTHER; note = 2'-O-methyluridine-3'-phosphate
  modified_base 14: mod_base = OTHER; note = 2'-deoxy-2'-fluorouridine-3'-phosphate
  modified_base 15: mod_base = OTHER; note = 2'-O-methylcytidine-3'-phosphate
  modified_base 16: mod_base = OTHER; note = 2'-deoxy-2'-fluoroguanosine-3'-phosphate
  modified_base 17: mod_base = OTHER; note = 2'-O-methylguanosine-3'-phosphate
  modified_base 18: mod_base = OTHER; note = 2'-O-methyluridine-3'-phosphate
  modified_base 19: mod_base = OTHER; note = 2'-O-methylcytidine-3'-phosphate
  modified_base 20: mod_base = OTHER; note = 2'-O-methylcytidine-3'-phosphate
  modified_base 21: mod_base = OTHER; note = 2'-O-methylguanosine-3'-phosphorothioate
  modified_base 22: mod_base = OTHER; note = 2'-O-methylguanosine-3'-phosphorothioate
  modified_base 23: mod_base = OTHER; note = 2'-O-methyluridine
tgtgatgaaacattcggtccggt

SEQ ID NO: 1131 - RNA, 23 nt, synthetic construct
  source 1..23: mol_type = other RNA
  modified_base 1: mod_base = OTHER; note = 2'-O-methyluridine-3'-phosphorothioate 5'-(E)-Vinylphosphonate
  modified_base 2: mod_base = OTHER; note = 2'-deoxy-2'-fluoroguanosine-3'-phosphorothioate
  modified_base 3: mod_base = OTHER; note = 2'-O-methyluridine-3'-phosphate
  modified_base 4: mod_base = OTHER; note = 2'-O-methylguanosine-3'-phosphate
  modified_base 5: mod_base = OTHER; note = 2'-O-methyladenosine-3'-phosphate
  modified_base 6: mod_base = OTHER; note = 2'-deoxy-2'-fluorouridine-3'-phosphate
  modified_base 7: mod_base = OTHER; note = 2'-O-methyladenosine-3'-phosphate
  modified_base 8: mod_base = OTHER; note = 2'-O-methyladenosine-3'-phosphate
  modified_base 9: mod_base = OTHER; note = 2'-O-methyladenosine-3'-phosphate
  modified_base 10: mod_base = OTHER; note = 2'-O-methyladenosine-3'-phosphate
  modified_base 11: mod_base = OTHER; note = 2'-O-methylcytidine-3'-phosphate
  modified_base 12: mod_base = OTHER; note = 2'-O-methyladenosine-3'-phosphate
  modified_base 13: mod_base = OTHER; note = 2'-O-methyluridine-3'-phosphate
  modified_base 14: mod_base = OTHER; note = 2'-deoxy-2'-fluorouridine-3'-phosphate
  modified_base 15: mod_base = OTHER; note = 2'-O-methylcytidine-3'-phosphate
  modified_base 16: mod_base = OTHER; note = 2'-deoxy-2'-fluoroguanosine-3'-phosphate
  modified_base 17: mod_base = OTHER; note = 2'-O-methylguanosine-3'-phosphate
  modified_base 18: mod_base = OTHER; note = 2'-O-methyluridine-3'-phosphate
  modified_base 19: mod_base = OTHER; note = 2'-O-methylcytidine-3'-phosphate
  modified_base 20: mod_base = OTHER; note = 2'-O-methylcytidine-3'-phosphate
  modified_base 21: mod_base = OTHER; note = 2'-O-methylguanosine-3'-phosphorothioate
  modified_base 22: mod_base = OTHER; note = 2'-O-methylguanosine-3'-phosphorothioate
  modified_base 23: mod_base = OTHER; note = 2'-O-methyluridine
tgtgataaaacattcggtccggt

SEQ ID NO: 1132 - RNA, 23 nt, synthetic construct
  source 1..23: mol_type = other RNA
  modified_base 1: mod_base = OTHER; note = 2'-O-methyluridine-3'-phosphorothioate 5'-(E)-Vinylphosphonate
  modified_base 2: mod_base = OTHER; note = 2'-deoxy-2'-fluoroadenosine-3'-phosphorothioate
  modified_base 3: mod_base = OTHER; note = 2'-O-methylguanosine-3'-phosphate
  modified_base 4: mod_base = OTHER; note = 2'-O-methyluridine-3'-phosphate
  modified_base 5: mod_base = OTHER; note = 2'-O-methylguanosine-3'-phosphate
  modified_base 6: mod_base = OTHER; note = 2'-deoxy-2'-fluoroadenosine-3'-phosphate
  modified_base 7: mod_base = OTHER; note = 2'-O-methyluridine-3'-phosphate
  modified_base 8: mod_base = OTHER; note = 2'-O-methylguanosine-3'-phosphate
  modified_base 9: mod_base = OTHER; note = 2'-O-methyladenosine-3'-phosphate
  modified_base 10: mod_base = OTHER; note = 2'-O-methyladenosine-3'-phosphate
  modified_base 11: mod_base = OTHER; note = 2'-O-methyladenosine-3'-phosphate
  modified_base 12: mod_base = OTHER; note = 2'-O-methylcytidine-3'-phosphate
  modified_base 13: mod_base = OTHER; note = 2'-O-methyladenosine-3'-phosphate
  modified_base 14: mod_base = OTHER; note = 2'-deoxy-2'-fluorouridine-3'-phosphate
  modified_base 15: mod_base = OTHER; note = 2'-O-methyluridine-3'-phosphate
  modified_base 16: mod_base = OTHER; note = 2'-deoxy-2'-fluorocytidine-3'-phosphate
  modified_base 17: mod_base = OTHER; note = 2'-O-methylguanosine-3'-phosphate
  modified_base 18: mod_base = OTHER; note = 2'-O-methylguanosine-3'-phosphate
  modified_base 19: mod_base = OTHER; note = 2'-O-methyluridine-3'-phosphate
  modified_base 20: mod_base = OTHER; note = 2'-O-methylcytidine-3'-phosphate
  modified_base 21: mod_base = OTHER; note = 2'-O-methylcytidine-3'-phosphorothioate
  modified_base 22: mod_base = OTHER; note = 2'-O-methylguanosine-3'-phosphorothioate
  modified_base 23: mod_base = OTHER; note = 2'-O-methylguanosine
tagtgatgaaacattcggtccgg

SEQ ID NO: 1133 - RNA, 23 nt, synthetic construct
  source 1..23: mol_type = other RNA
  modified_base 1: mod_base = OTHER; note = 2'-O-methyluridine-3'-phosphorothioate 5'-(E)-Vinylphosphonate
  modified_base 2: mod_base = OTHER; note = 2'-deoxy-2'-fluoroadenosine-3'-phosphorothioate
  modified_base 3: mod_base = OTHER; note = 2'-O-methylguanosine-3'-phosphate
  modified_base 4: mod_base = OTHER; note = 2'-O-methyluridine-3'-phosphate
  modified_base 5: mod_base = OTHER; note = 2'-O-methylguanosine-3'-phosphate
  modified_base 6: mod_base = OTHER; note = 2'-deoxy-2'-fluoroadenosine-3'-phosphate
  modified_base 7: mod_base = OTHER; note = 2'-O-methyladenosine-3'-phosphate
  modified_base 8: mod_base = OTHER; note = 2'-O-methylguanosine-3'-phosphate
  modified_base 9: mod_base = OTHER; note = 2'-O-methyladenosine-3'-phosphate
  modified_base 10: mod_base = OTHER; note = 2'-O-methyladenosine-3'-phosphate
  modified_base 11: mod_base = OTHER; note = 2'-O-methyladenosine-3'-phosphate
  modified_base 12: mod_base = OTHER; note = 2'-O-methylcytidine-3'-phosphate
  modified_base 13: mod_base = OTHER; note = 2'-O-methyladenosine-3'-phosphate
  modified_base 14: mod_base = OTHER; note = 2'-deoxy-2'-fluorouridine-3'-phosphate
  modified_base 15: mod_base = OTHER; note = 2'-O-methyluridine-3'-phosphate
  modified_base 16: mod_base = OTHER; note = 2'-deoxy-2'-fluorocytidine-3'-phosphate
  modified_base 17: mod_base = OTHER; note = 2'-O-methylguanosine-3'-phosphate
  modified_base 18: mod_base = OTHER; note = 2'-O-methylguanosine-3'-phosphate
  modified_base 19: mod_base = OTHER; note = 2'-O-methyluridine-3'-phosphate
  modified_base 20: mod_base = OTHER; note = 2'-O-methylcytidine-3'-phosphate
  modified_base 21: mod_base = OTHER; note = 2'-O-methylcytidine-3'-phosphorothioate
  modified_base 22: mod_base = OTHER; note = 2'-O-methylguanosine-3'-phosphorothioate
  modified_base 23: mod_base = OTHER; note = 2'-O-methylguanosine
tagtgaagaaacattcggtccgg

SEQ ID NO: 1134 - RNA, 23 nt, synthetic construct
  source 1..23: mol_type = other RNA
  modified_base 1: mod_base = OTHER; note = 2'-O-methyluridine-3'-phosphorothioate 5'-(E)-Vinylphosphonate
  modified_base 2: mod_base = OTHER; note = 2'-deoxy-2'-fluorocytidine-3'-phosphorothioate
  modified_base 3: mod_base = OTHER; note = 2'-O-methyladenosine-3'-phosphate
  modified_base 4: mod_base = OTHER; note = 2'-O-methylguanosine-3'-phosphate
  modified_base 5: mod_base = OTHER; note = 2'-O-methyluridine-3'-phosphate
  modified_base 6: mod_base = OTHER; note = 2'-deoxy-2'-fluoroguanosine-3'-phosphate
  modified_base 7: mod_base = OTHER; note = 2'-O-methyladenosine-3'-phosphate
  modified_base 8: mod_base = OTHER; note = 2'-O-methyluridine-3'-phosphate
  modified_base 9: mod_base = OTHER; note = 2'-O-methylguanosine-3'-phosphate
  modified_base 10: mod_base = OTHER; note = 2'-O-methyladenosine-3'-phosphate
  modified_base 11: mod_base = OTHER; note = 2'-O-methyladenosine-3'-phosphate
  modified_base 12: mod_base = OTHER; note = 2'-O-methyladenosine-3'-phosphate
  modified_base 13: mod_base = OTHER; note = 2'-O-methylcytidine-3'-phosphate
  modified_base 14: mod_base = OTHER; note = 2'-deoxy-2'-fluoroadenosine-3'-phosphate
  modified_base 15: mod_base = OTHER; note = 2'-O-methyluridine-3'-phosphate
  modified_base 16: mod_base = OTHER; note = 2'-deoxy-2'-fluorouridine-3'-phosphate
  modified_base 17: mod_base = OTHER; note = 2'-O-methylcytidine-3'-phosphate
  modified_base 18: mod_base = OTHER; note = 2'-O-methylguanosine-3'-phosphate
  modified_base 19: mod_base = OTHER; note = 2'-O-methylguanosine-3'-phosphate
  modified_base 20: mod_base = OTHER; note = 2'-O-methyluridine-3'-phosphate
  modified_base 21: mod_base = OTHER; note = 2'-O-methylcytidine-3'-phosphorothioate
  modified_base 22: mod_base = OTHER; note = 2'-O-methylcytidine-3'-phosphorothioate
  modified_base 23: mod_base = OTHER; note = 2'-O-methylguanosine
tcagtgatgaaacattcggtccg

SEQ ID NO: 1135 - RNA, 23 nt, synthetic construct
  source 1..23: mol_type = other RNA
  modified_base 1: mod_base = OTHER; note = 2'-O-methyluridine-3'-phosphorothioate 5'-(E)-Vinylphosphonate
  modified_base 2: mod_base = OTHER; note = 2'-deoxy-2'-fluorocytidine-3'-phosphorothioate
  modified_base 3: mod_base = OTHER; note = 2'-O-methyladenosine-3'-phosphate
  modified_base 4: mod_base = OTHER; note = 2'-O-methylguanosine-3'-phosphate
  modified_base 5: mod_base = OTHER; note = 2'-O-methyluridine-3'-phosphate
  modified_base 6: mod_base = OTHER; note = 2'-deoxy-2'-fluoroadenosine-3'-phosphate
  modified_base 7: mod_base = OTHER; note = 2'-O-methyladenosine-3'-phosphate
  modified_base 8: mod_base = OTHER; note = 2'-O-methyluridine-3'-phosphate
  modified_base 9: mod_base = OTHER; note = 2'-O-methylguanosine-3'-phosphate
  modified_base 10: mod_base = OTHER; note = 2'-O-methyladenosine-3'-phosphate
  modified_base 11: mod_base = OTHER; note = 2'-O-methyladenosine-3'-phosphate
  modified_base 12: mod_base = OTHER; note = 2'-O-methyladenosine-3'-phosphate
  modified_base 13: mod_base = OTHER; note = 2'-O-methylcytidine-3'-phosphate
  modified_base 14: mod_base = OTHER; note = 2'-deoxy-2'-fluoroadenosine-3'-phosphate
  modified_base 15: mod_base = OTHER; note = 2'-O-methyluridine-3'-phosphate
  modified_base 16: mod_base = OTHER; note = 2'-deoxy-2'-fluorouridine-3'-phosphate
  modified_base 17: mod_base = OTHER; note = 2'-O-methylcytidine-3'-phosphate
  modified_base 18: mod_base = OTHER; note = 2'-O-methylguanosine-3'-phosphate
  modified_base 19: mod_base = OTHER; note = 2'-O-methylguanosine-3'-phosphate
  modified_base 20: mod_base = OTHER; note = 2'-O-methyluridine-3'-phosphate
  modified_base 21: mod_base = OTHER; note = 2'-O-methylcytidine-3'-phosphorothioate
  modified_base 22: mod_base = OTHER; note = 2'-O-methylcytidine-3'-phosphorothioate
  modified_base 23: mod_base = OTHER; note = 2'-O-methylguanosine
tcagtaatgaaacattcggtccg

SEQ ID NO: 1136 - RNA, 23 nt, synthetic construct
  source 1..23: mol_type = other RNA
  modified_base 1: mod_base = OTHER; note = 2'-O-methyluridine-3'-phosphorothioate 5'-(E)-Vinylphosphonate
  modified_base 2: mod_base = OTHER; note = 2'-deoxy-2'-fluoroadenosine-3'-phosphorothioate
  modified_base 3: mod_base = OTHER; note = 2'-O-methylguanosine-3'-phosphate
  modified_base 4: mod_base = OTHER; note = 2'-O-methylcytidine-3'-phosphate
  modified_base 5: mod_base = OTHER; note = 2'-O-methylcytidine-3'-phosphate
  modified_base 6: mod_base = OTHER; note = 2'-deoxy-2'-fluoroadenosine-3'-phosphate
  modified_base 7: mod_base = OTHER; note = 2'-O-methylguanosine-3'-phosphate
  modified_base 8: mod_base = OTHER; note = 2'-O-methyluridine-3'-phosphate
  modified_base 9: mod_base = OTHER; note = 2'-O-methylguanosine-3'-phosphate
  modified_base 10: mod_base = OTHER; note = 2'-O-methyladenosine-3'-phosphate
  modified_base 11: mod_base = OTHER; note = 2'-O-methyluridine-3'-phosphate
  modified_base 12: mod_base = OTHER; note = 2'-O-methylguanosine-3'-phosphate
  modified_base 13: mod_base = OTHER; note = 2'-O-methyladenosine-3'-phosphate
  modified_base 14: mod_base = OTHER; note = 2'-deoxy-2'-fluoroadenosine-3'-phosphate
  modified_base 15: mod_base = OTHER; note = 2'-O-methyladenosine-3'-phosphate
  modified_base 16: mod_base = OTHER; note = 2'-deoxy-2'-fluorocytidine-3'-phosphate
  modified_base 17: mod_base = OTHER; note = 2'-O-methyladenosine-3'-phosphate
  modified_base 18: mod_base = OTHER; note = 2'-O-methyluridine-3'-phosphate
  modified_base 19: mod_base = OTHER; note = 2'-O-methyluridine-3'-phosphate
  modified_base 20: mod_base = OTHER; note = 2'-O-methylcytidine-3'-phosphate
  modified_base 21: mod_base = OTHER; note = 2'-O-methylguanosine-3'-phosphorothioate
  modified_base 22: mod_base = OTHER; note = 2'-O-methylguanosine-3'-phosphorothioate
  modified_base 23: mod_base = OTHER; note = 2'-O-methyluridine
tagccagtgatgaaacattcggt

SEQ ID NO: 1137 - RNA, 23 nt, synthetic construct
  source 1..23: mol_type = other RNA
  modified_base 1: mod_base = OTHER; note = 2'-O-methyluridine-3'-phosphorothioate 5'-(E)-Vinylphosphonate
  modified_base 2: mod_base = OTHER; note = 2'-deoxy-2'-fluoroadenosine-3'-phosphorothioate
  modified_base 3: mod_base = OTHER; note = 2'-O-methylguanosine-3'-phosphate
  modified_base 4: mod_base = OTHER; note = 2'-O-methylcytidine-3'-phosphate
  modified_base 5: mod_base = OTHER; note = 2'-O-methylcytidine-3'-phosphate
  modified_base 6: mod_base = OTHER; note = 2'-deoxy-2'-fluoroadenosine-3'-phosphate
  modified_base 7: mod_base = OTHER; note = 2'-O-methyladenosine-3'-phosphate
  modified_base 8: mod_base = OTHER; note = 2'-O-methyluridine-3'-phosphate
  modified_base 9: mod_base = OTHER; note = 2'-O-methylguanosine-3'-phosphate
  modified_base 10: mod_base = OTHER; note = 2'-O-methyladenosine-3'-phosphate
  modified_base 11: mod_base = OTHER; note = 2'-O-methyluridine-3'-phosphate
  modified_base 12: mod_base = OTHER; note = 2'-O-methylguanosine-3'-phosphate
  modified_base 13: mod_base = OTHER; note = 2'-O-methyladenosine-3'-phosphate
  modified_base 14: mod_base = OTHER; note = 2'-deoxy-2'-fluoroadenosine-3'-phosphate
  modified_base 15: mod_base = OTHER; note = 2'-O-methyladenosine-3'-phosphate
  modified_base 16: mod_base = OTHER; note = 2'-deoxy-2'-fluorocytidine-3'-phosphate
  modified_base 17: mod_base = OTHER; note = 2'-O-methyladenosine-3'-phosphate
  modified_base 18: mod_base = OTHER; note = 2'-O-methyluridine-3'-phosphate
  modified_base 19: mod_base = OTHER; note = 2'-O-methyluridine-3'-phosphate
  modified_base 20: mod_base = OTHER; note = 2'-O-methylcytidine-3'-phosphate
  modified_base 21: mod_base = OTHER; note = 2'-O-methylguanosine-3'-phosphorothioate
  modified_base 22: mod_base = OTHER; note = 2'-O-methylguanosine-3'-phosphorothioate
  modified_base 23: mod_base = OTHER; note = 2'-O-methyluridine
tagccaatgatgaaacattcggt

SEQ ID NO: 1138 - RNA, 23 nt, synthetic construct
  source 1..23: mol_type = other RNA
  modified_base 1: mod_base = OTHER; note = 2'-O-methyluridine-3'-phosphorothioate 5'-(E)-Vinylphosphonate
  modified_base 2: mod_base = OTHER; note = 2'-deoxy-2'-fluorocytidine-3'-phosphorothioate
  modified_base 3: mod_base = OTHER; note = 2'-O-methyladenosine-3'-phosphate
  modified_base 4: mod_base = OTHER; note = 2'-O-methylcytidine-3'-phosphate
  modified_base 5: mod_base = OTHER; note = 2'-O-methyluridine-3'-phosphate
  modified_base 6: mod_base = OTHER; note = 2'-deoxy-2'-fluorouridine-3'-phosphate
  modified_base 7: mod_base = OTHER; note = 2'-O-methyluridine-3'-phosphate
  modified_base 8: mod_base = OTHER; note = 2'-O-methyladenosine-3'-phosphate
  modified_base 9: mod_base = OTHER; note = 2'-O-methyluridine-3'-phosphate
  modified_base 10: mod_base = OTHER; note = 2'-O-methyluridine-3'-phosphate
  modified_base 11: mod_base = OTHER; note = 2'-O-methylcytidine-3'-phosphate
  modified_base 12: mod_base = OTHER; note = 2'-O-methyluridine-3'-phosphate
  modified_base 13: mod_base = OTHER; note = 2'-O-methylcytidine-3'-phosphate
  modified_base 14: mod_base = OTHER; note = 2'-deoxy-2'-fluoroadenosine-3'-phosphate
  modified_base 15: mod_base = OTHER; note = 2'-O-methyladenosine-3'-phosphate
  modified_base 16: mod_base = OTHER; note = 2'-deoxy-2'-fluorouridine-3'-phosphate
  modified_base 17: mod_base = OTHER; note = 2'-O-methylcytidine-3'-phosphate
  modified_base 18: mod_base = OTHER; note = 2'-O-methyladenosine-3'-phosphate
  modified_base 19: mod_base = OTHER; note = 2'-O-methylcytidine-3'-phosphate
  modified_base 20: mod_base = OTHER; note = 2'-O-methyladenosine-3'-phosphate
  modified_base 21: mod_base = OTHER; note = 2'-O-methylguanosine-3'-phosphorothioate
  modified_base 22: mod_base = OTHER; note = 2'-O-methylguanosine-3'-phosphorothioate
  modified_base 23: mod_base = OTHER; note = 2'-O-methylguanosine
tcactttattctcaatcacaggg

SEQ ID NO: 1139 - RNA, 23 nt, synthetic construct
  source 1..23: mol_type = other RNA
  modified_base 1: mod_base = OTHER; note = 2'-O-methyluridine-3'-phosphorothioate 5'-(E)-Vinylphosphonate
  modified_base 2: mod_base = OTHER; note = 2'-deoxy-2'-fluoroadenosine-3'-phosphorothioate
  modified_base 3: mod_base = OTHER; note = 2'-O-methylcytidine-3'-phosphate
  modified_base 4: mod_base = OTHER; note = 2'-O-methyladenosine-3'-phosphate
  modified_base 5: mod_base = OTHER; note = 2'-O-methylcytidine-3'-phosphate
  modified_base 6: mod_base = OTHER; note = 2'-deoxy-2'-fluorouridine-3'-phosphate
  modified_base 7: mod_base = OTHER; note = 2'-O-methyluridine-3'-phosphate
  modified_base 8: mod_base = OTHER; note = 2'-O-methyluridine-3'-phosphate
  modified_base 9: mod_base = OTHER; note = 2'-O-methyladenosine-3'-phosphate
  modified_base 10: mod_base = OTHER; note = 2'-O-methyluridine-3'-phosphate
  modified_base 11: mod_base = OTHER; note = 2'-O-methyluridine-3'-phosphate
  modified_base 12: mod_base = OTHER; note = 2'-O-methylcytidine-3'-phosphate
  modified_base 13: mod_base = OTHER; note = 2'-O-methyluridine-3'-phosphate
  modified_base 14: mod_base = OTHER; note = 2'-deoxy-2'-fluorocytidine-3'-phosphate
  modified_base 15: mod_base = OTHER; note = 2'-O-methyladenosine-3'-phosphate
  modified_base 16: mod_base = OTHER; note = 2'-deoxy-2'-fluoroadenosine-3'-phosphate
  modified_base 17: mod_base = OTHER; note = 2'-O-methyluridine-3'-phosphate
  modified_base 18: mod_base = OTHER; note = 2'-O-methylcytidine-3'-phosphate
  modified_base 19: mod_base = OTHER; note = 2'-O-methyladenosine-3'-phosphate
  modified_base 20: mod_base = OTHER; note = 2'-O-methylcytidine-3'-phosphate
  modified_base 21: mod_base = OTHER; note = 2'-O-methyladenosine-3'-phosphorothioate
  modified_base 22: mod_base = OTHER; note = 2'-O-methylguanosine-3'-phosphorothioate
  modified_base 23: mod_base = OTHER; note = 2'-O-methylguanosine
tacactttattctcaatcacagg

SEQ ID NO: 1140 - RNA, 23 nt, synthetic construct
  source 1..23: mol_type = other RNA
  modified_base 1: mod_base = OTHER; note = 2'-O-methyluridine-3'-phosphorothioate 5'-(E)-Vinylphosphonate
  modified_base 2: mod_base = OTHER; note = 2'-deoxy-2'-fluorocytidine-3'-phosphorothioate
  modified_base 3: mod_base = OTHER; note = 2'-O-methyladenosine-3'-phosphate
  modified_base 4: mod_base = OTHER; note = 2'-O-methylcytidine-3'-phosphate
  modified_base 5: mod_base = OTHER; note = 2'-O-methyladenosine-3'-phosphate
  modified_base 6: mod_base = OTHER; note = 2'-deoxy-2'-fluorocytidine-3'-phosphate
  modified_base 7: mod_base = OTHER; note = 2'-O-methyluridine-3'-phosphate
  modified_base 8: mod_base = OTHER; note = 2'-O-methyluridine-3'-phosphate
  modified_base 9: mod_base = OTHER; note = 2'-O-methyluridine-3'-phosphate
  modified_base 10: mod_base = OTHER; note = 2'-O-methyladenosine-3'-phosphate
  modified_base 11: mod_base = OTHER; note = 2'-O-methyluridine-3'-phosphate
  modified_base 12: mod_base = OTHER; note = 2'-O-methyluridine-3'-phosphate
  modified_base 13: mod_base = OTHER; note = 2'-O-methylcytidine-3'-phosphate
  modified_base 14: mod_base = OTHER; note = 2'-deoxy-2'-fluorouridine-3'-phosphate
  modified_base 15: mod_base = OTHER; note = 2'-O-methylcytidine-3'-phosphate
  modified_base 16: mod_base = OTHER; note = 2'-deoxy-2'-fluoroadenosine-3'-phosphate
  modified_base 17: mod_base = OTHER; note = 2'-O-methyladenosine-3'-phosphate
  modified_base 18: mod_base = OTHER; note = 2'-O-methyluridine-3'-phosphate
  modified_base 19: mod_base = OTHER; note = 2'-O-methylcytidine-3'-phosphate
  modified_base 20: mod_base = OTHER; note = 2'-O-methyladenosine-3'-phosphate
  modified_base 21: mod_base = OTHER; note = 2'-O-methylcytidine-3'-phosphorothioate
  modified_base 22: mod_base = OTHER; note = 2'-O-methyladenosine-3'-phosphorothioate
  modified_base 23: mod_base = OTHER; note = 2'-O-methylguanosine
tcacactttattctcaatcacag

SEQ ID NO: 1141 - RNA, 23 nt, synthetic construct
  source 1..23: mol_type = other RNA
  modified_base 1: mod_base = OTHER; note = 2'-O-methyluridine-3'-phosphorothioate 5'-(E)-Vinylphosphonate
  modified_base 2: mod_base = OTHER; note = 2'-deoxy-2'-fluoroguanosine-3'-phosphorothioate
  modified_base 3: mod_base = OTHER; note = 2'-O-methylcytidine-3'-phosphate
  modified_base 4: mod_base = OTHER; note = 2'-O-methyladenosine-3'-phosphate
  modified_base 5: mod_base = OTHER; note = 2'-O-methylcytidine-3'-phosphate
  modified_base 6: mod_base = OTHER; note = 2'-deoxy-2'-fluoroadenosine-3'-phosphate
  modified_base 7: mod_base = OTHER; note = 2'-O-methylcytidine-3'-phosphate
  modified_base 8: mod_base = OTHER; note = 2'-O-methyluridine-3'-phosphate
  modified_base 9: mod_base = OTHER; note = 2'-O-methyluridine-3'-phosphate
  modified_base 10: mod_base = OTHER; note = 2'-O-methyluridine-3'-phosphate
  modified_base 11: mod_base = OTHER; note = 2'-O-methyladenosine-3'-phosphate
  modified_base 12: mod_base = OTHER; note = 2'-O-methyluridine-3'-phosphate
  modified_base 13: mod_base = OTHER; note = 2'-O-methyluridine-3'-phosphate
  modified_base 14: mod_base = OTHER; note = 2'-deoxy-2'-fluorocytidine-3'-phosphate
  modified_base 15: mod_base = OTHER; note = 2'-O-methyluridine-3'-phosphate
  modified_base 16: mod_base = OTHER; note = 2'-deoxy-2'-fluorocytidine-3'-phosphate
  modified_base 17: mod_base = OTHER; note = 2'-O-methyladenosine-3'-phosphate
  modified_base 18: mod_base = OTHER; note = 2'-O-methyladenosine-3'-phosphate
  modified_base 19: mod_base = OTHER; note = 2'-O-methyluridine-3'-phosphate
  modified_base 20: mod_base = OTHER; note = 2'-O-methylcytidine-3'-phosphate
  modified_base 21: mod_base = OTHER; note = 2'-O-methyladenosine-3'-phosphorothioate
  modified_base 22: mod_base = OTHER; note = 2'-O-methylcytidine-3'-phosphorothioate
  modified_base 23: mod_base = OTHER; note = 2'-O-methyladenosine
tgcacactttattctcaatcaca

SEQ ID NO: 1142 - RNA, 23 nt, synthetic construct
  source 1..23: mol_type = other RNA
  modified_base 1: mod_base = OTHER; note = 2'-O-methyluridine-3'-phosphorothioate 5'-(E)-Vinylphosphonate
  modified_base 2: mod_base = OTHER; note = 2'-deoxy-2'-fluorouridine-3'-phosphorothioate
  modified_base 3: mod_base = OTHER; note = 2'-O-methylguanosine-3'-phosphate
  modified_base 4: mod_base = OTHER; note = 2'-O-methylcytidine-3'-phosphate
  modified_base 5: mod_base = OTHER; note = 2'-O-methyladenosine-3'-phosphate
  modified_base 6: mod_base = OTHER; note = 2'-deoxy-2'-fluorocytidine-3'-phosphate
  modified_base 7: mod_base = OTHER; note = 2'-O-methyladenosine-3'-phosphate
  modified_base 8: mod_base = OTHER; note = 2'-O-methylcytidine-3'-phosphate
  modified_base 9: mod_base = OTHER; note = 2'-O-methyluridine-3'-phosphate
  modified_base 10: mod_base = OTHER; note = 2'-O-methyluridine-3'-phosphate
  modified_base 11: mod_base = OTHER; note = 2'-O-methyluridine-3'-phosphate
  modified_base 12: mod_base = OTHER; note = 2'-O-methyladenosine-3'-phosphate
  modified_base 13: mod_base = OTHER; note = 2'-O-methyluridine-3'-phosphate
  modified_base 14: mod_base = OTHER; note = 2'-deoxy-2'-fluorouridine-3'-phosphate
  modified_base 15: mod_base = OTHER; note = 2'-O-methylcytidine-3'-phosphate
  modified_base 16: mod_base = OTHER; note = 2'-deoxy-2'-fluorouridine-3'-phosphate
  modified_base 17: mod_base = OTHER; note = 2'-O-methylcytidine-3'-phosphate
  modified_base 18: mod_base = OTHER; note = 2'-O-methyladenosine-3'-phosphate
  modified_base 19: mod_base = OTHER; note = 2'-O-methyladenosine-3'-phosphate
  modified_base 20: mod_base = OTHER; note = 2'-O-methyluridine-3'-phosphate
  modified_base 21: mod_base = OTHER; note = 2'-O-methylcytidine-3'-phosphorothioate
  modified_base 22: mod_base = OTHER; note = 2'-O-methyladenosine-3'-phosphorothioate
  modified_base 23: mod_base = OTHER; note = 2'-O-methylcytidine
ttgcacactttattctcaatcac

SEQ ID NO: 1143 - RNA, 23 nt, synthetic construct
  source 1..23: mol_type = other RNA
  modified_base 1: mod_base = OTHER; note = 2'-O-methyluridine-3'-phosphorothioate 5'-(E)-Vinylphosphonate
  modified_base 2: mod_base = OTHER; note = 2'-deoxy-2'-fluorouridine-3'-phosphorothioate
  modified_base 3: mod_base = OTHER; note = 2'-O-methylguanosine-3'-phosphate
  modified_base 4: mod_base = OTHER; note = 2'-O-methylcytidine-3'-phosphate
  modified_base 5: mod_base = OTHER; note = 2'-O-methyladenosine-3'-phosphate
  modified_base 6: mod_base = OTHER; note = 2'-deoxy-2'-fluoroadenosine-3'-phosphate
  modified_base 7: mod_base = OTHER; note = 2'-O-methyladenosine-3'-phosphate
  modified_base 8: mod_base = OTHER; note = 2'-O-methylcytidine-3'-phosphate
  modified_base 9: mod_base = OTHER; note = 2'-O-methyluridine-3'-phosphate
  modified_base 10: mod_base = OTHER; note = 2'-O-methyluridine-3'-phosphate
  modified_base 11: mod_base = OTHER; note = 2'-O-methyluridine-3'-phosphate
  modified_base 12: mod_base = OTHER; note = 2'-O-methyladenosine-3'-phosphate
  modified_base 13: mod_base = OTHER; note = 2'-O-methyluridine-3'-phosphate
  modified_base 14: mod_base = OTHER; note = 2'-deoxy-2'-fluorouridine-3'-phosphate
  modified_base 15: mod_base = OTHER; note = 2'-O-methylcytidine-3'-phosphate
  modified_base 16: mod_base = OTHER; note = 2'-deoxy-2'-fluorouridine-3'-phosphate
  modified_base 17: mod_base = OTHER; note = 2'-O-methylcytidine-3'-phosphate
  modified_base 18: mod_base = OTHER; note = 2'-O-methyladenosine-3'-phosphate
  modified_base 19: mod_base = OTHER; note = 2'-O-methyladenosine-3'-phosphate
  modified_base 20: mod_base = OTHER; note = 2'-O-methyluridine-3'-phosphate
  modified_base 21: mod_base = OTHER; note = 2'-O-methylcytidine-3'-phosphorothioate
  modified_base 22: mod_base = OTHER; note = 2'-O-methyladenosine-3'-phosphorothioate
  modified_base 23: mod_base = OTHER; note = 2'-O-methylcytidine
ttgcaaactttattctcaatcac

SEQ ID NO: 1144 - RNA, 23 nt, synthetic construct
  source 1..23: mol_type = other RNA
  modified_base 1: mod_base = OTHER; note = 2'-O-methyluridine-3'-phosphorothioate 5'-(E)-Vinylphosphonate
  modified_base 2: mod_base = OTHER; note = 2'-deoxy-2'-fluoroadenosine-3'-phosphorothioate
  modified_base 3: mod_base = OTHER; note = 2'-O-methyluridine-3'-phosphate
  modified_base 4: mod_base = OTHER; note = 2'-O-methyluridine-3'-phosphate
  modified_base 5: mod_base = OTHER; note = 2'-O-methylguanosine-3'-phosphate
  modified_base 6: mod_base = OTHER; note = 2'-deoxy-2'-fluorocytidine-3'-phosphate
  modified_base 7: mod_base = OTHER; note = 2'-O-methyladenosine-3'-phosphate
  modified_base 8: mod_base = OTHER; note = 2'-O-methylcytidine-3'-phosphate
  modified_base 9: mod_base = OTHER; note = 2'-O-methyladenosine-3'-phosphate
  modified_base 10: mod_base = OTHER; note = 2'-O-methylcytidine-3'-phosphate
  modified_base 11: mod_base = OTHER; note = 2'-O-methyluridine-3'-phosphate
  modified_base 12: mod_base = OTHER; note = 2'-O-methyluridine-3'-phosphate
  modified_base 13: mod_base = OTHER; note = 2'-O-methyluridine-3'-phosphate
  modified_base 14: mod_base = OTHER; note = 2'-deoxy-2'-fluoroadenosine-3'-phosphate
  modified_base 15: mod_base = OTHER; note = 2'-O-methyluridine-3'-phosphate
  modified_base 16: mod_base = OTHER; note = 2'-deoxy-2'-fluorouridine-3'-phosphate
  modified_base 17: mod_base = OTHER; note = 2'-O-methylcytidine-3'-phosphate
  modified_base 18: mod_base = OTHER; note = 2'-O-methyluridine-3'-phosphate
  modified_base 19: mod_base = OTHER; note = 2'-O-methylcytidine-3'-phosphate
  modified_base 20: mod_base = OTHER; note = 2'-O-methyladenosine-3'-phosphate
  modified_base 21: mod_base = OTHER; note = 2'-O-methyladenosine-3'-phosphorothioate
  modified_base 22: mod_base = OTHER; note = 2'-O-methyluridine-3'-phosphorothioate
  modified_base 23: mod_base = OTHER; note = 2'-O-methylcytidine
tattgcacactttattctcaatc

SEQ ID NO: 1145 - RNA, 23 nt, synthetic construct
  source 1..23: mol_type = other RNA
  modified_base 1: mod_base = OTHER; note = 2'-O-methyluridine-3'-phosphorothioate 5'-(E)-Vinylphosphonate
  modified_base 2: mod_base = OTHER; note = 2'-deoxy-2'-fluoroadenosine-3'-phosphorothioate
  modified_base 3: mod_base = OTHER; note = 2'-O-methyluridine-3'-phosphate
  modified_base 4: mod_base = OTHER; note = 2'-O-methyluridine-3'-phosphate
  modified_base 5: mod_base = OTHER; note = 2'-O-methylguanosine-3'-phosphate
  modified_base 6: mod_base = OTHER; note = 2'-deoxy-2'-fluoroadenosine-3'-phosphate
  modified_base 7: mod_base = OTHER; note = 2'-O-methyladenosine-3'-phosphate
  modified_base 8: mod_base = OTHER; note = 2'-O-methylcytidine-3'-phosphate
  modified_base 9: mod_base = OTHER; note = 2'-O-methyladenosine-3'-phosphate
  modified_base 10: mod_base = OTHER; note = 2'-O-methylcytidine-3'-phosphate
  modified_base 11: mod_base = OTHER; note = 2'-O-methyluridine-3'-phosphate
  modified_base 12: mod_base = OTHER; note = 2'-O-methyluridine-3'-phosphate
  modified_base 13: mod_base = OTHER; note = 2'-O-methyluridine-3'-phosphate
  modified_base 14: mod_base = OTHER; note = 2'-deoxy-2'-fluoroadenosine-3'-phosphate
  modified_base 15: mod_base = OTHER; note = 2'-O-methyluridine-3'-phosphate
  modified_base 16: mod_base = OTHER; note = 2'-deoxy-2'-fluorouridine-3'-phosphate
  modified_base 17: mod_base = OTHER; note = 2'-O-methylcytidine-3'-phosphate
  modified_base 18: mod_base = OTHER; note = 2'-O-methyluridine-3'-phosphate
  modified_base 19: mod_base = OTHER; note = 2'-O-methylcytidine-3'-phosphate
  modified_base 20: mod_base = OTHER; note = 2'-O-methyladenosine-3'-phosphate
  modified_base 21: mod_base = OTHER; note = 2'-O-methyladenosine-3'-phosphorothioate
  modified_base 22: mod_base = OTHER; note = 2'-O-methyluridine-3'-phosphorothioate
  modified_base 23: mod_base = OTHER; note = 2'-O-methylcytidine
tattgaacactttattctcaatc

SEQ ID NO: 1146 - RNA, 23 nt, synthetic construct
  source 1..23: mol_type = other RNA
  modified_base 1: mod_base = OTHER; note = 2'-O-methyluridine-3'-phosphorothioate 5'-(E)-Vinylphosphonate
  modified_base 2: mod_base = OTHER; note = 2'-deoxy-2'-fluorocytidine-3'-phosphorothioate
  modified_base 3: mod_base = OTHER; note = 2'-O-methylguanosine-3'-phosphate
  modified_base 4: mod_base = OTHER; note = 2'-O-methyladenosine-3'-phosphate
  modified_base 5: mod_base = OTHER; note = 2'-O-methyluridine-3'-phosphate
  modified_base 6: mod_base = OTHER; note = 2'-deoxy-2'-fluorouridine-3'-phosphate
  modified_base 7: mod_base = OTHER; note = 2'-O-methylguanosine-3'-phosphate
  modified_base 8: mod_base = OTHER; note = 2'-O-methylcytidine-3'-phosphate
  modified_base 9: mod_base = OTHER; note = 2'-O-methyladenosine-3'-phosphate
  modified_base 10: mod_base = OTHER; note = 2'-O-methylcytidine-3'-phosphate
  modified_base 11: mod_base = OTHER; note = 2'-O-methyladenosine-3'-phosphate
  modified_base 12: mod_base = OTHER; note = 2'-O-methylcytidine-3'-phosphate
  modified_base 13: mod_base = OTHER; note = 2'-O-methyluridine-3'-phosphate
  modified_base 14: mod_base = OTHER; note = 2'-deoxy-2'-fluorouridine-3'-phosphate
  modified_base 15: mod_base = OTHER; note = 2'-O-methyluridine-3'-phosphate
  modified_base 16: mod_base = OTHER; note = 2'-deoxy-2'-fluoroadenosine-3'-phosphate
  modified_base 17: mod_base = OTHER; note = 2'-O-methyluridine-3'-phosphate
  modified_base 18: mod_base = OTHER; note = 2'-O-methyluridine-3'-phosphate
  modified_base 19: mod_base = OTHER; note = 2'-O-methylcytidine-3'-phosphate
  modified_base 20: mod_base = OTHER; note = 2'-O-methyluridine-3'-phosphate
  modified_base 21: mod_base = OTHER; note = 2'-O-methylcytidine-3'-phosphorothioate
  modified_base 22: mod_base = OTHER; note = 2'-O-methyladenosine-3'-phosphorothioate
  modified_base 23: mod_base = OTHER; note = 2'-O-methyladenosine
tcgattgcacactttattctcaa

SEQ ID NO: 1147 - RNA, 23 nt, synthetic construct
  source 1..23: mol_type = other RNA
  modified_base 1: mod_base = OTHER; note = 2'-O-methyluridine-3'-phosphorothioate 5'-(E)-Vinylphosphonate
  modified_base 2: mod_base = OTHER; note = 2'-deoxy-2'-fluorocytidine-3'-phosphorothioate
  modified_base 3: mod_base = OTHER; note = 2'-O-methylguanosine-3'-phosphate
  modified_base 4: mod_base = OTHER; note = 2'-O-methyladenosine-3'-phosphate
  modified_base 5: mod_base = OTHER; note = 2'-O-methyluridine-3'-phosphate
  modified_base 6: mod_base = OTHER; note = 2'-deoxy-2'-fluorouridine-3'-phosphate
  modified_base 7: mod_base = OTHER; note = 2'-O-methyladenosine-3'-phosphate
  modified_base 8: mod_base = OTHER; note = 2'-O-methylcytidine-3'-phosphate
  modified_base 9: mod_base = OTHER; note = 2'-O-methyladenosine-3'-phosphate
  modified_base 10: mod_base = OTHER; note = 2'-O-methylcytidine-3'-phosphate
  modified_base 11: mod_base = OTHER; note = 2'-O-methyladenosine-3'-phosphate
  modified_base 12: mod_base = OTHER; note = 2'-O-methylcytidine-3'-phosphate
  modified_base 13: mod_base = OTHER; note = 2'-O-methyluridine-3'-phosphate
  modified_base 14: mod_base = OTHER; note = 2'-deoxy-2'-fluorouridine-3'-phosphate
  modified_base 15: mod_base = OTHER; note = 2'-O-methyluridine-3'-phosphate
  modified_base 16: mod_base = OTHER; note = 2'-deoxy-2'-fluoroadenosine-3'-phosphate
  modified_base 17: mod_base = OTHER; note = 2'-O-methyluridine-3'-phosphate
  modified_base 18: mod_base = OTHER; note = 2'-O-methyluridine-3'-phosphate
  modified_base 19: mod_base = OTHER; note = 2'-O-methylcytidine-3'-phosphate
  modified_base 20: mod_base = OTHER; note = 2'-O-methyluridine-3'-phosphate
  modified_base 21: mod_base = OTHER; note = 2'-O-methylcytidine-3'-phosphorothioate
  modified_base 22: mod_base = OTHER; note = 2'-O-methyladenosine-3'-phosphorothioate
  modified_base 23: mod_base = OTHER; note = 2'-O-methyladenosine
tcgattacacactttattctcaa

SEQ ID NO: 1148 - RNA, 23 nt, synthetic construct
  source 1..23: mol_type = other RNA
  modified_base 1: mod_base = OTHER; note = 2'-O-methyluridine-3'-phosphorothioate 5'-(E)-Vinylphosphonate
  modified_base 2: mod_base = OTHER; note = 2'-deoxy-2'-fluoroadenosine-3'-phosphorothioate
  modified_base 3: mod_base = OTHER; note = 2'-O-methylguanosine-3'-phosphate
  modified_base 4: mod_base = OTHER; note = 2'-O-methylcytidine-3'-phosphate
  modified_base 5: mod_base = OTHER; note = 2'-O-methylguanosine-3'-phosphate
  modified_base 6: mod_base = OTHER; note = 2'-deoxy-2'-fluoroadenosine-3'-phosphate
  modified_base 7: mod_base = OTHER; note = 2'-O-methyluridine-3'-phosphate
  modified_base 8: mod_base = OTHER; note = 2'-O-methyluridine-3'-phosphate
  modified_base 9: mod_base = OTHER; note = 2'-O-methylguanosine-3'-phosphate
  modified_base 10: mod_base = OTHER; note = 2'-O-methylcytidine-3'-phosphate
  modified_base 11: mod_base = OTHER; note = 2'-O-methyladenosine-3'-phosphate
  modified_base 12: mod_base = OTHER; note = 2'-O-methylcytidine-3'-phosphate
  modified_base 13: mod_base = OTHER; note = 2'-O-methyladenosine-3'-phosphate
  modified_base 14: mod_base = OTHER; note = 2'-deoxy-2'-fluorocytidine-3'-phosphate
  modified_base 15: mod_base = OTHER; note = 2'-O-methyluridine-3'-phosphate
  modified_base 16: mod_base = OTHER; note = 2'-deoxy-2'-fluorouridine-3'-phosphate
  modified_base 17: mod_base = OTHER; note = 2'-O-methyluridine-3'-phosphate
  modified_base 18: mod_base = OTHER; note = 2'-O-methyladenosine-3'-phosphate
  modified_base 19: mod_base = OTHER; note = 2'-O-methyluridine-3'-phosphate
  modified_base 20: mod_base = OTHER; note = 2'-O-methyluridine-3'-phosphate
  modified_base 21: mod_base = OTHER; note = 2'-O-methylcytidine-3'-phosphorothioate
  modified_base 22: mod_base = OTHER; note = 2'-O-methyluridine-3'-phosphorothioate
  modified_base 23: mod_base = OTHER; note = 2'-O-methylcytidine
tagcgattgcacactttattctc

SEQ ID NO: 1149 - RNA, 23 nt, synthetic construct
  source 1..23: mol_type = other RNA
  modified_base 1: mod_base = OTHER; note = 2'-O-methyluridine-3'-phosphorothioate 5'-(E)-Vinylphosphonate
  modified_base 2: mod_base = OTHER; note = 2'-deoxy-2'-fluorouridine-3'-phosphorothioate
  modified_base 3: mod_base = OTHER; note = 2'-O-methyladenosine-3'-phosphate
  modified_base 4: mod_base = OTHER; note = 2'-O-methylguanosine-3'-phosphate
  modified_base 5: mod_base = OTHER; note = 2'-O-methylcytidine-3'-phosphate
  modified_base 6: mod_base = OTHER; note = 2'-deoxy-2'-fluoroguanosine-3'-phosphate
  modified_base 7: mod_base = OTHER; note = 2'-O-methyladenosine-3'-phosphate
  modified_base 8: mod_base = OTHER; note = 2'-O-methyluridine-3'-phosphate
  modified_base 9: mod_base = OTHER; note = 2'-O-methyluridine-3'-phosphate
  modified_base 10: mod_base = OTHER; note = 2'-O-methylguanosine-3'-phosphate
  modified_base 11: mod_base = OTHER; note = 2'-O-methylcytidine-3'-phosphate
  modified_base 12: mod_base = OTHER; note = 2'-O-methyladenosine-3'-phosphate
  modified_base 13: mod_base = OTHER; note = 2'-O-methylcytidine-3'-phosphate
  modified_base 14: mod_base = OTHER; note = 2'-deoxy-2'-fluoroadenosine-3'-phosphate
  modified_base 15: mod_base = OTHER; note = 2'-O-methylcytidine-3'-phosphate
  modified_base 16: mod_base = OTHER; note = 2'-deoxy-2'-fluorouridine-3'-phosphate
  modified_base 17: mod_base = OTHER; note = 2'-O-methyluridine-3'-phosphate
  modified_base 18: mod_base = OTHER; note = 2'-O-methyluridine-3'-phosphate
  modified_base 19: mod_base = OTHER; note = 2'-O-methyladenosine-3'-phosphate
  modified_base 20: mod_base = OTHER; note = 2'-O-methyluridine-3'-phosphate
  modified_base 21: mod_base = OTHER; note = 2'-O-methyluridine-3'-phosphorothioate
  modified_base 22: mod_base = OTHER; note = 2'-O-methylcytidine-3'-phosphorothioate
  modified_base 23: mod_base = OTHER; note = 2'-O-methyluridine
ttagcgattgcacactttattct

SEQ ID NO: 1150 - RNA, 23 nt, synthetic construct
  source 1..23: mol_type = other RNA
  modified_base 1: mod_base = OTHER; note = 2'-O-methyluridine-3'-phosphorothioate 5'-(E)-Vinylphosphonate
  modified_base 2: mod_base = OTHER; note = 2'-deoxy-2'-fluorocytidine-3'-phosphorothioate
  modified_base 3: mod_base = OTHER; note = 2'-O-methyladenosine-3'-phosphate
  modified_base 4: mod_base = OTHER; note = 2'-O-methyluridine-3'-phosphate
  modified_base 5: mod_base = OTHER; note = 2'-O-methyladenosine-3'-phosphate
  modified_base 6: mod_base = OTHER; note = 2'-deoxy-2'-fluoroguanosine-3'-phosphate
  modified_base 7: mod_base = OTHER; note = 2'-O-methylcytidine-3'-phosphate
  modified_base 8: mod_base = OTHER; note = 2'-O-methylguanosine-3'-phosphate
  modified_base 9: mod_base = OTHER; note = 2'-O-methyladenosine-3'-phosphate
  modified_base 10: mod_base = OTHER; note = 2'-O-methyluridine-3'-phosphate
  modified_base 11: mod_base = OTHER; note = 2'-O-methyluridine-3'-phosphate
  modified_base 12: mod_base = OTHER; note = 2'-O-methylguanosine-3'-phosphate
  modified_base 13: mod_base = OTHER; note = 2'-O-methylcytidine-3'-phosphate
  modified_base 14: mod_base = OTHER; note = 2'-deoxy-2'-fluoroadenosine-3'-phosphate
  modified_base 15: mod_base = OTHER; note = 2'-O-methylcytidine-3'-phosphate
  modified_base 16: mod_base = OTHER; note = 2'-deoxy-2'-fluoroadenosine-3'-phosphate
  modified_base 17: mod_base = OTHER; note = 2'-O-methylcytidine-3'-phosphate
  modified_base 18: mod_base = OTHER; note = 2'-O-methyluridine-3'-phosphate
  modified_base 19: mod_base = OTHER; note = 2'-O-methyluridine-3'-phosphate
  modified_base 20: mod_base = OTHER; note = 2'-O-methyluridine-3'-phosphate
  modified_base 21: mod_base = OTHER; note = 2'-O-methyladenosine-3'-phosphorothioate
  modified_base 22: mod_base = OTHER; note = 2'-O-methyluridine-3'-phosphorothioate
  modified_base 23: mod_base = OTHER; note = 2'-O-methyluridine
tcatagcgattgcacactttatt

SEQ ID NO: 1151 - RNA, 23 nt, synthetic construct
  source 1..23: mol_type = other RNA
  modified_base 1: mod_base = OTHER; note = 2'-O-methyluridine-3'-phosphorothioate 5'-(E)-Vinylphosphonate
  modified_base 2: mod_base = OTHER; note = 2'-deoxy-2'-fluorouridine-3'-phosphorothioate
  modified_base 3: mod_base = OTHER; note = 2'-O-methylcytidine-3'-phosphate
  modified_base 4: mod_base = OTHER; note = 2'-O-methyladenosine-3'-phosphate
  modified_base 5: mod_base = OTHER; note = 2'-O-methyluridine-3'-phosphate
  modified_base 6: mod_base = OTHER; note = 2'-deoxy-2'-fluoroadenosine-3'-phosphate
  modified_base 7: mod_base = OTHER; note = 2'-O-methylguanosine-3'-phosphate
  modified_base 8: mod_base = OTHER; note = 2'-O-methylcytidine-3'-phosphate
  modified_base 9: mod_base = OTHER; note = 2'-O-methylguanosine-3'-phosphate
  modified_base 10: mod_base = OTHER; note = 2'-O-methyladenosine-3'-phosphate
  modified_base 11: mod_base = OTHER; note = 2'-O-methyluridine-3'-phosphate
  modified_base 12: mod_base = OTHER; note = 2'-O-methyluridine-3'-phosphate
  modified_base 13: mod_base = OTHER; note = 2'-O-methylguanosine-3'-phosphate
  modified_base 14: mod_base = OTHER; note = 2'-deoxy-2'-fluorocytidine-3'-phosphate
  modified_base 15: mod_base = OTHER; note = 2'-O-methyladenosine-3'-phosphate
  modified_base 16: mod_base = OTHER; note = 2'-deoxy-2'-fluorocytidine-3'-phosphate
  modified_base 17: mod_base = OTHER; note = 2'-O-methyladenosine-3'-phosphate
  modified_base 18: mod_base = OTHER; note = 2'-O-methylcytidine-3'-phosphate
  modified_base 19: mod_base = OTHER; note = 2'-O-methyluridine-3'-phosphate
  modified_base 20: mod_base = OTHER; note = 2'-O-methyluridine-3'-phosphate
  modified_base 21: mod_base = OTHER; note = 2'-O-methyluridine-3'-phosphorothioate
  modified_base 22: mod_base = OTHER; note = 2'-O-methyladenosine-3'-phosphorothioate
  modified_base 23: mod_base = OTHER; note = 2'-O-methyluridine
ttcatagcgattgcacactttat

SEQ ID NO: 1152 - RNA, 23 nt, synthetic construct
  source 1..23: mol_type = other RNA
  modified_base 1: mod_base = OTHER; note = 2'-O-methyluridine-3'-phosphorothioate 5'-(E)-Vinylphosphonate
  modified_base 2: mod_base = OTHER; note = 2'-deoxy-2'-fluorouridine-3'-phosphorothioate
  modified_base 3: mod_base = OTHER; note = 2'-O-methylcytidine-3'-phosphate
  modified_base 4: mod_base = OTHER; note = 2'-O-methyladenosine-3'-phosphate
  modified_base 5: mod_base = OTHER; note = 2'-O-methyluridine-3'-phosphate
  modified_base 6: mod_base = OTHER; note = 2'-deoxy-2'-fluoroadenosine-3'-phosphate
  modified_base 7: mod_base = OTHER; note = 2'-O-methyladenosine-3'-phosphate
  modified_base 8: mod_base = OTHER; note = 2'-O-methylcytidine-3'-phosphate
  modified_base 9: mod_base = OTHER; note = 2'-O-methylguanosine-3'-phosphate
  modified_base 10: mod_base = OTHER; note = 2'-O-methyladenosine-3'-phosphate
  modified_base 11: mod_base = OTHER; note = 2'-O-methyluridine-3'-phosphate
  modified_base 12: mod_base = OTHER; note = 2'-O-methyluridine-3'-phosphate
  modified_base 13: mod_base = OTHER; note = 2'-O-methylguanosine-3'-phosphate
  modified_base 14: mod_base = OTHER; note = 2'-deoxy-2'-fluorocytidine-3'-phosphate
  modified_base 15: mod_base = OTHER; note = 2'-O-methyladenosine-3'-phosphate
  modified_base 16: mod_base = OTHER; note = 2'-deoxy-2'-fluorocytidine-3'-phosphate
  modified_base 17: mod_base = OTHER; note = 2'-O-methyladenosine-3'-phosphate
  modified_base 18: mod_base = OTHER; note = 2'-O-methylcytidine-3'-phosphate
  modified_base 19: mod_base = OTHER; note = 2'-O-methyluridine-3'-phosphate
  modified_base 20: mod_base = OTHER; note = 2'-O-methyluridine-3'-phosphate
  modified_base 21: mod_base = OTHER; note = 2'-O-methyluridine-3'-phosphorothioate
  modified_base 22: mod_base = OTHER; note = 2'-O-methyladenosine-3'-phosphorothioate
  modified_base 23: mod_base = OTHER; note = 2'-O-methyluridine
ttcataacgattgcacactttat

SEQ ID NO: 1153 - RNA, 23 nt, synthetic construct
  source 1..23: mol_type = other RNA
  modified_base 1: mod_base = OTHER; note = 2'-O-methyluridine-3'-phosphorothioate 5'-(E)-Vinylphosphonate
  modified_base 2: mod_base = OTHER; note = 2'-deoxy-2'-fluorocytidine-3'-phosphorothioate
  modified_base 3: mod_base = OTHER; note = 2'-O-methyluridine-3'-phosphate
  modified_base 4: mod_base = OTHER; note = 2'-O-methylcytidine-3'-phosphate
  modified_base 5: mod_base = OTHER; note = 2'-O-methyladenosine-3'-phosphate
  modified_base 6: mod_base = OTHER; note = 2'-deoxy-2'-fluorouridine-3'-phosphate
  modified_base 7: mod_base = OTHER; note = 2'-O-methyladenosine-3'-phosphate
  modified_base 8: mod_base = OTHER; note = 2'-O-methylguanosine-3'-phosphate
  modified_base 9: mod_base = OTHER; note = 2'-O-methylcytidine-3'-phosphate
  modified_base 10: mod_base = OTHER; note = 2'-O-methylguanosine-3'-phosphate
  modified_base 11: mod_base = OTHER; note = 2'-O-methyladenosine-3'-phosphate
  modified_base 12: mod_base = OTHER; note = 2'-O-methyluridine-3'-phosphate
  modified_base 13: mod_base = OTHER; note = 2'-O-methyluridine-3'-phosphate
  modified_base 14: mod_base = OTHER; note = 2'-deoxy-2'-fluoroguanosine-3'-phosphate
  modified_base 15: mod_base = OTHER; note = 2'-O-methylcytidine-3'-phosphate
  modified_base 16: mod_base = OTHER; note = 2'-deoxy-2'-fluoroadenosine-3'-phosphate
  modified_base 17: mod_base = OTHER; note = 2'-O-methylcytidine-3'-phosphate
  modified_base 18: mod_base = OTHER; note = 2'-O-methyladenosine-3'-phosphate
  modified_base 19: mod_base = OTHER; note = 2'-O-methylcytidine-3'-phosphate
  modified_base 20: mod_base = OTHER; note = 2'-O-methyluridine-3'-phosphate
  modified_base 21: mod_base = OTHER; note = 2'-O-methyluridine-3'-phosphorothioate
  modified_base 22: mod_base = OTHER; note = 2'-O-methyluridine-3'-phosphorothioate
  modified_base 23: mod_base = OTHER; note = 2'-O-methyladenosine
tctcatagcgattgcacacttta

SEQ ID NO: 1154 - RNA, 23 nt, synthetic construct
  source 1..23: mol_type = other RNA
  modified_base 1: mod_base = OTHER; note = 2'-O-methyluridine-3'-phosphorothioate 5'-(E)-Vinylphosphonate
  modified_base 2: mod_base = OTHER; note = 2'-deoxy-2'-fluoroadenosine-3'-phosphorothioate
  modified_base 3: mod_base = OTHER; note = 2'-O-methylcytidine-3'-phosphate
  modified_base 4: mod_base = OTHER; note = 2'-O-methyluridine-3'-phosphate
  modified_base 5: mod_base = OTHER; note = 2'-O-methylcytidine-3'-phosphate
  modified_base 6: mod_base = OTHER; note = 2'-deoxy-2'-fluoroadenosine-3'-phosphate
  modified_base 7: mod_base = OTHER; note = 2'-O-methyluridine-3'-phosphate
  modified_base 8: mod_base = OTHER; note = 2'-O-methyladenosine-3'-phosphate
  modified_base 9: mod_base = OTHER; note = 2'-O-methylguanosine-3'-phosphate
  modified_base 10: mod_base = OTHER; note = 2'-O-methylcytidine-3'-phosphate
  modified_base 11: mod_base = OTHER; note = 2'-O-methylguanosine-3'-phosphate
  modified_base 12: mod_base = OTHER; note = 2'-O-methyladenosine-3'-phosphate
  modified_base 13: mod_base = OTHER; note = 2'-O-methyluridine-3'-phosphate
  modified_base 14: mod_base = OTHER; note = 2'-deoxy-2'-fluorouridine-3'-phosphate
  modified_base 15: mod_base = OTHER; note = 2'-O-methylguanosine-3'-phosphate
  modified_base 16: mod_base = OTHER; note = 2'-deoxy-2'-fluorocytidine-3'-phosphate
  modified_base 17: mod_base = OTHER; note = 2'-O-methyladenosine-3'-phosphate
  modified_base 18: mod_base = OTHER; note = 2'-O-methylcytidine-3'-phosphate
  modified_base 19: mod_base = OTHER; note = 2'-O-methyladenosine-3'-phosphate
  modified_base 20: mod_base = OTHER; note = 2'-O-methylcytidine-3'-phosphate
  modified_base 21: mod_base = OTHER; note = 2'-O-methyluridine-3'-phosphorothioate
  modified_base 22: mod_base = OTHER; note = 2'-O-methyluridine-3'-phosphorothioate
  modified_base 23: mod_base = OTHER; note = 2'-O-methyluridine
tactcatagcgattgcacacttt

SEQ ID NO: 1155 - RNA, 23 nt, synthetic construct
  source 1..23: mol_type = other RNA
  modified_base 1: mod_base = OTHER; note = 2'-O-methyluridine-3'-phosphorothioate 5'-(E)-Vinylphosphonate
  modified_base 2: mod_base = OTHER; note = 2'-deoxy-2'-fluoroadenosine-3'-phosphorothioate
  modified_base 3: mod_base = OTHER; note = 2'-O-methyladenosine-3'-phosphate
  modified_base 4: mod_base = OTHER; note = 2'-O-methylcytidine-3'-phosphate
  modified_base 5: mod_base = OTHER; note = 2'-O-methyluridine-3'-phosphate
  modified_base 6: mod_base = OTHER; note = 2'-deoxy-2'-fluorocytidine-3'-phosphate
  modified_base 7: mod_base = OTHER; note = 2'-O-methyladenosine-3'-phosphate
  modified_base 8: mod_base = OTHER; note = 2'-O-methyluridine-3'-phosphate
  modified_base 9: mod_base = OTHER; note = 2'-O-methyladenosine-3'-phosphate
  modified_base 10: mod_base = OTHER; note = 2'-O-methylguanosine-3'-phosphate
  modified_base 11: mod_base = OTHER; note = 2'-O-methylcytidine-3'-phosphate
  modified_base 12: mod_base = OTHER; note = 2'-O-methylguanosine-3'-phosphate
  modified_base 13: mod_base = OTHER; note = 2'-O-methyladenosine-3'-phosphate
  modified_base 14: mod_base = OTHER; note = 2'-deoxy-2'-fluorouridine-3'-phosphate
  modified_base 15: mod_base = OTHER; note = 2'-O-methyluridine-3'-phosphate
  modified_base 16: mod_base = OTHER; note = 2'-deoxy-2'-fluoroguanosine-3'-phosphate
  modified_base 17: mod_base = OTHER; note = 2'-O-methylcytidine-3'-phosphate
  modified_base 18: mod_base = OTHER; note = 2'-O-methyladenosine-3'-phosphate
  modified_base 19: mod_base = OTHER; note = 2'-O-methylcytidine-3'-phosphate
  modified_base 20: mod_base = OTHER; note = 2'-O-methyladenosine-3'-phosphate
  modified_base 21: mod_base = OTHER; note = 2'-O-methylcytidine-3'-phosphorothioate
  modified_base 22: mod_base = OTHER; note = 2'-O-methyluridine-3'-phosphorothioate
  modified_base 23: mod_base = OTHER; note = 2'-O-methyluridine
taactcatagcgattgcacactt

SEQ ID NO: 1156 - RNA, 23 nt, synthetic construct
  source 1..23: mol_type = other RNA
  modified_base 1: mod_base = OTHER; note = 2'-O-methyluridine-3'-phosphorothioate 5'-(E)-Vinylphosphonate
  modified_base 2: mod_base = OTHER; note = 2'-deoxy-2'-fluoroadenosine-3'-phosphorothioate
  modified_base 3: mod_base = OTHER; note = 2'-O-methyladenosine-3'-phosphate
  modified_base 4: mod_base = OTHER; note = 2'-O-methylcytidine-3'-phosphate
  modified_base 5: mod_base = OTHER; note = 2'-O-methyluridine-3'-phosphate
  modified_base 6: mod_base = OTHER; note = 2'-deoxy-2'-fluoroadenosine-3'-phosphate
  modified_base 7: mod_base = OTHER; note = 2'-O-methyladenosine-3'-phosphate
  modified_base 8: mod_base = OTHER; note = 2'-O-methyluridine-3'-phosphate
  modified_base 9: mod_base = OTHER; note = 2'-O-methyladenosine-3'-phosphate
  modified_base 10: mod_base = OTHER; note = 2'-O-methylguanosine-3'-phosphate
  modified_base 11: mod_base = OTHER; note = 2'-O-methylcytidine-3'-phosphate
  modified_base 12: mod_base = OTHER; note = 2'-O-methylguanosine-3'-phosphate
  modified_base 13: mod_base = OTHER; note = 2'-O-methyladenosine-3'-phosphate
  modified_base 14: mod_base = OTHER; note = 2'-deoxy-2'-fluorouridine-3'-phosphate
  modified_base 15: mod_base = OTHER; note = 2'-O-methyluridine-3'-phosphate
  modified_base 16: mod_base = OTHER; note = 2'-deoxy-2'-fluoroguanosine-3'-phosphate
  modified_base 17: mod_base = OTHER; note = 2'-O-methylcytidine-3'-phosphate
  modified_base 18: mod_base = OTHER; note = 2'-O-methyladenosine-3'-phosphate
  modified_base 19: mod_base = OTHER; note = 2'-O-methylcytidine-3'-phosphate
  modified_base 20: mod_base = OTHER; note = 2'-O-methyladenosine-3'-phosphate
  modified_base 21: mod_base = OTHER; note = 2'-O-methylcytidine-3'-phosphorothioate
  modified_base 22: mod_base = OTHER; note = 2'-O-methyluridine-3'-phosphorothioate
  modified_base 23: mod_base = OTHER; note = 2'-O-methyluridine
taactaatagcgattgcacactt

SEQ ID NO: 1157 - RNA, 23 nt, synthetic construct
  source 1..23: mol_type = other RNA
  modified_base 1: mod_base = OTHER; note = 2'-O-methyluridine-3'-phosphorothioate 5'-(E)-Vinylphosphonate
  modified_base 2: mod_base = OTHER; note = 2'-deoxy-2'-fluoroadenosine-3'-phosphorothioate
  modified_base 3: mod_base = OTHER; note = 2'-O-methyladenosine-3'-phosphate
  modified_base 4: mod_base = OTHER; note = 2'-O-methyladenosine-3'-phosphate
  modified_base 5: mod_base = OTHER; note = 2'-O-methylcytidine-3'-phosphate
  modified_base 6: mod_base = OTHER; note = 2'-deoxy-2'-fluorouridine-3'-phosphate
  modified_base 7: mod_base = OTHER; note = 2'-O-methylcytidine-3'-phosphate
  modified_base 8: mod_base = OTHER; note = 2'-O-methyladenosine-3'-phosphate
  modified_base 9: mod_base = OTHER; note = 2'-O-methyluridine-3'-phosphate
  modified_base 10: mod_base = OTHER; note = 2'-O-methyladenosine-3'-phosphate
  modified_base 11: mod_base = OTHER; note = 2'-O-methylguanosine-3'-phosphate
  modified_base 12: mod_base = OTHER; note = 2'-O-methylcytidine-3'-phosphate
  modified_base 13: mod_base = OTHER; note = 2'-O-methylguanosine-3'-phosphate
  modified_base 14: mod_base = OTHER; note = 2'-deoxy-2'-fluoroadenosine-3'-phosphate
  modified_base 15: mod_base = OTHER; note = 2'-O-methyluridine-3'-phosphate
  modified_base 16: mod_base = OTHER; note = 2'-deoxy-2'-fluorouridine-3'-phosphate
  modified_base 17: mod_base = OTHER; note = 2'-O-methylguanosine-3'-phosphate
  modified_base 18: mod_base = OTHER; note = 2'-O-methylcytidine-3'-phosphate
  modified_base 19: mod_base = OTHER; note = 2'-O-methyladenosine-3'-phosphate
  modified_base 20: mod_base = OTHER; note = 2'-O-methylcytidine-3'-phosphate
  modified_base 21: mod_base = OTHER; note = 2'-O-methyladenosine-3'-phosphorothioate
  modified_base 22: mod_base = OTHER; note = 2'-O-methylcytidine-3'-phosphorothioate
  modified_base 23: mod_base = OTHER; note = 2'-O-methyluridine
taaactcatagcgattgcacact

SEQ ID NO: 1158 - RNA, 23 nt, synthetic construct
  source 1..23: mol_type = other RNA
  modified_base 1: mod_base = OTHER; note = 2'-O-methyluridine-3'-phosphorothioate 5'-(E)-Vinylphosphonate
  modified_base 2: mod_base = OTHER; note = 2'-deoxy-2'-fluoroadenosine-3'-phosphorothioate
  modified_base 3: mod_base = OTHER; note = 2'-O-methyladenosine-3'-phosphate
  modified_base 4: mod_base = OTHER; note = 2'-O-methyladenosine-3'-phosphate
  modified_base 5: mod_base = OTHER; note = 2'-O-methylcytidine-3'-phosphate
  modified_base 6: mod_base = OTHER; note = 2'-deoxy-2'-fluorouridine-3'-phosphate
  modified_base 7: mod_base = OTHER; note = 2'-O-methyladenosine-3'-phosphate
  modified_base 8: mod_base = OTHER; note = 2'-O-methyladenosine-3'-phosphate
  modified_base 9: mod_base = OTHER; note = 2'-O-methyluridine-3'-phosphate
  modified_base 10: mod_base = OTHER; note = 2'-O-methyladenosine-3'-phosphate
  modified_base 11: mod_base = OTHER; note = 2'-O-methylguanosine-3'-phosphate
  modified_base 12: mod_base = OTHER; note = 2'-O-methylcytidine-3'-phosphate
  modified_base 13: mod_base = OTHER; note = 2'-O-methylguanosine-3'-phosphate
  modified_base 14: mod_base = OTHER; note = 2'-deoxy-2'-fluoroadenosine-3'-phosphate
  modified_base 15: mod_base = OTHER; note = 2'-O-methyluridine-3'-phosphate
  modified_base 16: mod_base = OTHER; note = 2'-deoxy-2'-fluorouridine-3'-phosphate
  modified_base 17: mod_base = OTHER; note = 2'-O-methylguanosine-3'-phosphate
  modified_base 18: mod_base = OTHER; note = 2'-O-methylcytidine-3'-phosphate
  modified_base 19: mod_base = OTHER; note = 2'-O-methyladenosine-3'-phosphate
  modified_base 20: mod_base = OTHER; note = 2'-O-methylcytidine-3'-phosphate
  modified_base 21: mod_base = OTHER; note = 2'-O-methyladenosine-3'-phosphorothioate
  modified_base 22: mod_base = OTHER; note = 2'-O-methylcytidine-3'-phosphorothioate
  modified_base 23: mod_base = OTHER; note = 2'-O-methyluridine
taaactaatagcgattgcacact

SEQ ID NO: 1159 - RNA, 23 nt, synthetic construct
  source 1..23: mol_type = other RNA
  modified_base 1: mod_base = OTHER; note = 2'-O-methyluridine-3'-phosphorothioate 5'-(E)-Vinylphosphonate
  modified_base 2: mod_base = OTHER; note = 2'-deoxy-2'-fluoroguanosine-3'-phosphorothioate
  modified_base 3: mod_base = OTHER; note = 2'-O-methyladenosine-3'-phosphate
  modified_base 4: mod_base = OTHER; note = 2'-O-methyladenosine-3'-phosphate
  modified_base 5: mod_base = OTHER; note = 2'-O-methyladenosine-3'-phosphate
  modified_base 6: mod_base = OTHER; note = 2'-deoxy-2'-fluorocytidine-3'-phosphate
  modified_base 7: mod_base = OTHER; note = 2'-O-methyluridine-3'-phosphate
  modified_base 8: mod_base = OTHER; note = 2'-O-methylcytidine-3'-phosphate
  modified_base 9: mod_base = OTHER; note = 2'-O-methyladenosine-3'-phosphate
  modified_base 10: mod_base = OTHER; note = 2'-O-methyluridine-3'-phosphate
  modified_base 11: mod_base = OTHER; note = 2'-O-methyladenosine-3'-phosphate
  modified_base 12: mod_base = OTHER; note = 2'-O-methylguanosine-3'-phosphate
  modified_base 13: mod_base = OTHER; note = 2'-O-methylcytidine-3'-phosphate
  modified_base 14: mod_base = OTHER; note = 2'-deoxy-2'-fluoroguanosine-3'-phosphate
  modified_base 15: mod_base = OTHER; note = 2'-O-methyladenosine-3'-phosphate
  modified_base 16: mod_base = OTHER; note = 2'-deoxy-2'-fluorouridine-3'-phosphate
  modified_base 17: mod_base = OTHER; note = 2'-O-methyluridine-3'-phosphate
  modified_base 18: mod_base = OTHER; note = 2'-O-methylguanosine-3'-phosphate
  modified_base 19: mod_base = OTHER; note = 2'-O-methylcytidine-3'-phosphate
  modified_base 20: mod_base = OTHER; note = 2'-O-methyladenosine-3'-phosphate
  modified_base 21: mod_base = OTHER; note = 2'-O-methylcytidine-3'-phosphorothioate
  modified_base 22: mod_base = OTHER; note = 2'-O-methyladenosine-3'-phosphorothioate
  modified_base 23: mod_base = OTHER; note = 2'-O-methylcytidine
tgaaactcatagcgattgcacac

SEQ ID NO: 1160 - RNA, 23 nt, synthetic construct
  source 1..23: mol_type = other RNA
  modified_base 1: mod_base = OTHER; note = 2'-O-methyluridine-3'-phosphorothioate 5'-(E)-Vinylphosphonate
  modified_base 2: mod_base = OTHER; note = 2'-deoxy-2'-fluoroguanosine-3'-phosphorothioate
  modified_base 3: mod_base = OTHER; note = 2'-O-methyladenosine-3'-phosphate
  modified_base 4: mod_base = OTHER; note = 2'-O-methyladenosine-3'-phosphate
  modified_base 5: mod_base = OTHER; note = 2'-O-methyladenosine-3'-phosphate
  modified_base 6: mod_base = OTHER; note = 2'-deoxy-2'-fluorocytidine-3'-phosphate
  modified_base 7: mod_base = OTHER; note = 2'-O-methyladenosine-3'-phosphate
  modified_base 8: mod_base = OTHER; note = 2'-O-methylcytidine-3'-phosphate
  modified_base 9: mod_base = OTHER; note = 2'-O-methyladenosine-3'-phosphate
  modified_base 10: mod_base = OTHER; note = 2'-O-methyluridine-3'-phosphate
  modified_base 11: mod_base = OTHER; note = 2'-O-methyladenosine-3'-phosphate
  modified_base 12: mod_base = OTHER; note = 2'-O-methylguanosine-3'-phosphate
  modified_base 13: mod_base = OTHER; note = 2'-O-methylcytidine-3'-phosphate
  modified_base 14: mod_base = OTHER; note = 2'-deoxy-2'-fluoroguanosine-3'-phosphate
  modified_base 15: mod_base = OTHER; note = 2'-O-methyladenosine-3'-phosphate
  modified_base 16: mod_base = OTHER; note = 2'-deoxy-2'-fluorouridine-3'-phosphate
  modified_base 17: mod_base = OTHER; note = 2'-O-methyluridine-3'-phosphate
  modified_base 18: mod_base = OTHER; note = 2'-O-methylguanosine-3'-phosphate
  modified_base 19: mod_base = OTHER; note = 2'-O-methylcytidine-3'-phosphate
  modified_base 20: mod_base = OTHER; note = 2'-O-methyladenosine-3'-phosphate
  modified_base 21: mod_base = OTHER; note = 2'-O-methylcytidine-3'-phosphorothioate
  modified_base 22: mod_base = OTHER; note = 2'-O-methyladenosine-3'-phosphorothioate
  modified_base 23: mod_base = OTHER; note = 2'-O-methylcytidine
tgaaacacatagcgattgcacac

SEQ ID NO: 1161 - RNA, 23 nt, synthetic construct
  source 1..23: mol_type = other RNA
  modified_base 1: mod_base = OTHER; note = 2'-O-methyluridine-3'-phosphorothioate 5'-(E)-Vinylphosphonate
  modified_base 2: mod_base = OTHER; note = 2'-deoxy-2'-fluoroadenosine-3'-phosphorothioate
  modified_base 3: mod_base = OTHER; note = 2'-O-methylguanosine-3'-phosphate
  modified_base 4: mod_base = OTHER; note = 2'-O-methyladenosine-3'-phosphate
  modified_base 5: mod_base = OTHER; note = 2'-O-methyladenosine-3'-phosphate
  modified_base 6: mod_base = OTHER; note = 2'-deoxy-2'-fluoroadenosine-3'-phosphate
  modified_base 7: mod_base = OTHER; note = 2'-O-methylcytidine-3'-phosphate
  modified_base 8: mod_base = OTHER; note = 2'-O-methyluridine-3'-phosphate
  modified_base 9: mod_base = OTHER; note = 2'-O-methylcytidine-3'-phosphate
  modified_base 10: mod_base = OTHER; note = 2'-O-methyladenosine-3'-phosphate
  modified_base 11: mod_base = OTHER; note = 2'-O-methyluridine-3'-phosphate
  modified_base 12: mod_base = OTHER; note = 2'-O-methyladenosine-3'-phosphate
  modified_base 13: mod_base = OTHER; note = 2'-O-methylguanosine-3'-phosphate
  modified_base 14: mod_base = OTHER; note = 2'-deoxy-2'-fluorocytidine-3'-phosphate
  modified_base 15: mod_base = OTHER; note = 2'-O-methylguanosine-3'-phosphate
  modified_base 16: mod_base = OTHER; note = 2'-deoxy-2'-fluoroadenosine-3'-phosphate
  modified_base 17: mod_base = OTHER; note = 2'-O-methyluridine-3'-phosphate
  modified_base 18: mod_base = OTHER; note = 2'-O-methyluridine-3'-phosphate
  modified_base 19: mod_base = OTHER; note = 2'-O-methylguanosine-3'-phosphate
  modified_base 20: mod_base = OTHER; note = 2'-O-methylcytidine-3'-phosphate
  modified_base 21: mod_base = OTHER; note = 2'-O-methyladenosine-3'-phosphorothioate
  modified_base 22: mod_base = OTHER; note = 2'-O-methylcytidine-3'-phosphorothioate
  modified_base 23: mod_base = OTHER; note = 2'-O-methyladenosine
tagaaactcatagcgattgcaca

SEQ ID NO: 1162 - RNA, 23 nt, synthetic construct
  source 1..23: mol_type = other RNA
  modified_base 1: mod_base = OTHER; note = 2'-O-methyluridine-3'-phosphorothioate 5'-(E)-Vinylphosphonate
  modified_base 2: mod_base = OTHER; note = 2'-deoxy-2'-fluorouridine-3'-phosphorothioate
  modified_base 3: mod_base = OTHER; note = 2'-O-methylcytidine-3'-phosphate
  modified_base 4: mod_base = OTHER; note = 2'-O-methyladenosine-3'-phosphate
  modified_base 5: mod_base = OTHER; note = 2'-O-methylguanosine-3'-phosphate
  modified_base 6: mod_base = OTHER; note = 2'-deoxy-2'-fluoroadenosine-3'-phosphate
  modified_base 7: mod_base = OTHER; note = 2'-O-methyladenosine-3'-phosphate
  modified_base 8: mod_base = OTHER; note = 2'-O-methyladenosine-3'-phosphate
  modified_base 9: mod_base = OTHER; note = 2'-O-methylcytidine-3'-phosphate
  modified_base 10: mod_base = OTHER; note = 2'-O-methyluridine-3'-phosphate
  modified_base 11: mod_base = OTHER; note = 2'-O-methylcytidine-3'-phosphate
  modified_base 12: mod_base = OTHER; note = 2'-O-methyladenosine-3'-phosphate
  modified_base 13: mod_base = OTHER; note = 2'-O-methyluridine-3'-phosphate
  modified_base 14: mod_base = OTHER; note = 2'-deoxy-2'-fluoroadenosine-3'-phosphate
  modified_base 15: mod_base = OTHER; note = 2'-O-methylguanosine-3'-phosphate
  modified_base 16: mod_base = OTHER; note = 2'-deoxy-2'-fluorocytidine-3'-phosphate
  modified_base 17: mod_base = OTHER; note = 2'-O-methylguanosine-3'-phosphate
  modified_base 18: mod_base = OTHER; note = 2'-O-methyladenosine-3'-phosphate
  modified_base 19: mod_base = OTHER; note = 2'-O-methyluridine-3'-phosphate
  modified_base 20: mod_base = OTHER; note = 2'-O-methyluridine-3'-phosphate
  modified_base 21: mod_base = OTHER; note = 2'-O-methylguanosine-3'-phosphorothioate
  modified_base 22: mod_base = OTHER; note = 2'-O-methylcytidine-3'-phosphorothioate
  modified_base 23: mod_base = OTHER; note = 2'-O-methyladenosine
ttcagaaactcatagcgattgca

SEQ ID NO: 1163 - RNA, 23 nt, synthetic construct
  source 1..23: mol_type = other RNA
  modified_base 1: mod_base = OTHER; note = 2'-O-methyluridine-3'-phosphorothioate 5'-(E)-Vinylphosphonate
  modified_base 2: mod_base = OTHER; note = 2'-deoxy-2'-fluorouridine-3'-phosphorothioate
  modified_base 3: mod_base = OTHER; note = 2'-O-methyluridine-3'-phosphate
  modified_base 4: mod_base = OTHER; note = 2'-O-methylcytidine-3'-phosphate
  modified_base 5: mod_base = OTHER; note = 2'-O-methyladenosine-3'-phosphate
  modified_base 6: mod_base = OTHER; note = 2'-deoxy-2'-fluoroguanosine-3'-phosphate
  modified_base 7: mod_base = OTHER; note = 2'-O-methyladenosine-3'-phosphate
  modified_base 8: mod_base = OTHER; note = 2'-O-methyladenosine-3'-phosphate
  modified_base 9: mod_base = OTHER; note = 2'-O-methyladenosine-3'-phosphate
  modified_base 10: mod_base = OTHER; note = 2'-O-methylcytidine-3'-phosphate
  modified_base 11: mod_base = OTHER; note = 2'-O-methyluridine-3'-phosphate
  modified_base 12: mod_base = OTHER; note = 2'-O-methylcytidine-3'-phosphate
  modified_base 13: mod_base = OTHER; note = 2'-O-methyladenosine-3'-phosphate
  modified_base 14: mod_base = OTHER; note = 2'-deoxy-2'-fluorouridine-3'-phosphate
  modified_base 15: mod_base = OTHER; note = 2'-O-methyladenosine-3'-phosphate
  modified_base 16: mod_base = OTHER; note = 2'-deoxy-2'-fluoroguanosine-3'-phosphate
  modified_base 17: mod_base = OTHER; note = 2'-O-methylcytidine-3'-phosphate
  modified_base 18: mod_base = OTHER; note = 2'-O-methylguanosine-3'-phosphate
  modified_base 19: mod_base = OTHER; note = 2'-O-methyladenosine-3'-phosphate
  modified_base 20: mod_base = OTHER; note = 2'-O-methyluridine-3'-phosphate
  modified_base 21: mod_base = OTHER; note = 2'-O-methyluridine-3'-phosphorothioate
  modified_base 22: mod_base = OTHER; note = 2'-O-methylguanosine-3'-phosphorothioate
  modified_base 23: mod_base = OTHER; note = 2'-O-methylcytidine
tttcagaaactcatagcgattgc

SEQ ID NO: 1164 - RNA, 23 nt, synthetic construct
  source 1..23: mol_type = other RNA
  modified_base 1: mod_base = OTHER; note = 2'-O-methyluridine-3'-phosphorothioate 5'-(E)-Vinylphosphonate
  modified_base 2: mod_base = OTHER; note = 2'-deoxy-2'-fluorouridine-3'-phosphorothioate
  modified_base 3: mod_base = OTHER; note = 2'-O-methyluridine-3'-phosphate
  modified_base 4: mod_base = OTHER; note = 2'-O-methylcytidine-3'-phosphate
  modified_base 5: mod_base = OTHER; note = 2'-O-methyladenosine-3'-phosphate
  modified_base 6: mod_base = OTHER; note = 2'-deoxy-2'-fluoroadenosine-3'-phosphate
  modified_base 7: mod_base = OTHER; note = 2'-O-methyladenosine-3'-phosphate
  modified_base 8: mod_base = OTHER; note = 2'-O-methyladenosine-3'-phosphate
  modified_base 9: mod_base = OTHER; note = 2'-O-methyladenosine-3'-phosphate
  modified_base 10: mod_base = OTHER; note = 2'-O-methylcytidine-3'-phosphate
  modified_base 11: mod_base = OTHER; note = 2'-O-methyluridine-3'-phosphate
  modified_base 12: mod_base = OTHER; note = 2'-O-methylcytidine-3'-phosphate
  modified_base 13: mod_base = OTHER; note = 2'-O-methyladenosine-3'-phosphate
  modified_base 14: mod_base = OTHER; note = 2'-deoxy-2'-fluorouridine-3'-phosphate
  modified_base 15: mod_base = OTHER; note = 2'-O-methyladenosine-3'-phosphate
  modified_base 16: mod_base = OTHER; note = 2'-deoxy-2'-fluoroguanosine-3'-phosphate
  modified_base 17: mod_base = OTHER; note = 2'-O-methylcytidine-3'-phosphate
  modified_base 18: mod_base = OTHER; note = 2'-O-methylguanosine-3'-phosphate
  modified_base 19: mod_base = OTHER; note = 2'-O-methyladenosine-3'-phosphate
  modified_base 20: mod_base = OTHER; note = 2'-O-methyluridine-3'-phosphate
  modified_base 21: mod_base = OTHER; note = 2'-O-methyluridine-3'-phosphorothioate
  modified_base 22: mod_base = OTHER; note = 2'-O-methylguanosine-3'-phosphorothioate
  modified_base 23: mod_base = OTHER; note = 2'-O-methylcytidine
tttcaaaaactcatagcgattgc

SEQ ID NO: 1165 - RNA, 23 nt, synthetic construct
  source 1..23: mol_type = other RNA
  modified_base 1: mod_base = OTHER; note = 2'-O-methyluridine-3'-phosphorothioate 5'-(E)-Vinylphosphonate
  modified_base 2: mod_base = OTHER; note = 2'-deoxy-2'-fluoroadenosine-3'-phosphorothioate
  modified_base 3: mod_base = OTHER; note = 2'-O-methyluridine-3'-phosphate
  modified_base 4: mod_base = OTHER; note = 2'-O-methyluridine-3'-phosphate
  modified_base 5: mod_base = OTHER; note = 2'-O-methylcytidine-3'-phosphate
  modified_base 6: mod_base = OTHER; note = 2'-deoxy-2'-fluoroadenosine-3'-phosphate
  modified_base 7: mod_base = OTHER; note = 2'-O-methylguanosine-3'-phosphate
  modified_base 8: mod_base = OTHER; note = 2'-O-methyladenosine-3'-phosphate
  modified_base 9: mod_base = OTHER; note = 2'-O-methyladenosine-3'-phosphate
  modified_base 10: mod_base = OTHER; note = 2'-O-methyladenosine-3'-phosphate
  modified_base 11: mod_base = OTHER; note = 2'-O-methylcytidine-3'-phosphate
  modified_base 12: mod_base = OTHER; note = 2'-O-methyluridine-3'-phosphate
  modified_base 13: mod_base = OTHER; note = 2'-O-methylcytidine-3'-phosphate
  modified_base 14: mod_base = OTHER; note = 2'-deoxy-2'-fluoroadenosine-3'-phosphate
  modified_base 15: mod_base = OTHER; note = 2'-O-methyluridine-3'-phosphate
  modified_base 16: mod_base = OTHER; note = 2'-deoxy-2'-fluoroadenosine-3'-phosphate
  modified_base 17: mod_base = OTHER; note = 2'-O-methylguanosine-3'-phosphate
  modified_base 18: mod_base = OTHER; note = 2'-O-methylcytidine-3'-phosphate
  modified_base 19: mod_base = OTHER; note = 2'-O-methylguanosine-3'-phosphate
  modified_base 20: mod_base = OTHER; note = 2'-O-methyladenosine-3'-phosphate
  modified_base 21: mod_base = OTHER; note = 2'-O-methyluridine-3'-phosphorothioate
  modified_base 22: mod_base = OTHER; note = 2'-O-methyluridine-3'-phosphorothioate
  modified_base 23: mod_base = OTHER; note = 2'-O-methylguanosine
tattcagaaactcatagcgattg

SEQ ID NO: 1166 - RNA, 23 nt, synthetic construct
  source 1..23: mol_type = other RNA
  modified_base 1: mod_base = OTHER; note = 2'-O-methyluridine-3'-phosphorothioate 5'-(E)-Vinylphosphonate
  modified_base 2: mod_base = OTHER; note = 2'-deoxy-2'-fluoroadenosine-3'-phosphorothioate
  modified_base 3: mod_base = OTHER; note = 2'-O-methyluridine-3'-phosphate
  modified_base 4: mod_base = OTHER; note = 2'-O-methyluridine-3'-phosphate
  modified_base 5: mod_base = OTHER; note = 2'-O-methylcytidine-3'-phosphate
  modified_base 6: mod_base = OTHER; note = 2'-deoxy-2'-fluoroadenosine-3'-phosphate
  modified_base 7: mod_base = OTHER; note = 2'-O-methyladenosine-3'-phosphate
  modified_base 8: mod_base = OTHER; note = 2'-O-methyladenosine-3'-phosphate
  modified_base 9: mod_base = OTHER; note = 2'-O-methyladenosine-3'-phosphate
  modified_base 10: mod_base = OTHER; note = 2'-O-methyladenosine-3'-phosphate
  modified_base 11: mod_base = OTHER; note = 2'-O-methylcytidine-3'-phosphate
  modified_base 12: mod_base = OTHER; note = 2'-O-methyluridine-3'-phosphate
  modified_base 13: mod_base = OTHER; note = 2'-O-methylcytidine-3'-phosphate
  modified_base 14: mod_base = OTHER; note = 2'-deoxy-2'-fluoroadenosine-3'-phosphate
  modified_base 15: mod_base = OTHER; note = 2'-O-methyluridine-3'-phosphate
  modified_base 16: mod_base = OTHER; note = 2'-deoxy-2'-fluoroadenosine-3'-phosphate
  modified_base 17: mod_base = OTHER; note = 2'-O-methylguanosine-3'-phosphate
  modified_base 18: mod_base = OTHER; note = 2'-O-methylcytidine-3'-phosphate
  modified_base 19: mod_base = OTHER; note = 2'-O-methylguanosine-3'-phosphate
  modified_base 20: mod_base = OTHER; note = 2'-O-methyladenosine-3'-phosphate
  modified_base 21: mod_base = OTHER; note = 2'-O-methyluridine-3'-phosphorothioate
  modified_base 22: mod_base = OTHER; note = 2'-O-methyluridine-3'-phosphorothioate
  modified_base 23: mod_base = OTHER; note = 2'-O-methylguanosine
tattcaaaaactcatagcgattg

SEQ ID NO: 1167 - RNA, 23 nt, synthetic construct
  source 1..23: mol_type = other RNA
  modified_base 1: mod_base = OTHER; note = 2'-O-methyluridine-3'-phosphorothioate 5'-(E)-Vinylphosphonate
  modified_base 2: mod_base = OTHER; note = 2'-deoxy-2'-fluorocytidine-3'-phosphorothioate
  modified_base 3: mod_base = OTHER; note = 2'-O-methyladenosine-3'-phosphate
  modified_base 4: mod_base = OTHER; note = 2'-O-methyluridine-3'-phosphate
  modified_base 5: mod_base = OTHER; note = 2'-O-methyluridine-3'-phosphate
  modified_base 6: mod_base = OTHER; note = 2'-deoxy-2'-fluorocytidine-3'-phosphate
  modified_base 7: mod_base = OTHER; note = 2'-O-methyladenosine-3'-phosphate
  modified_base 8: mod_base = OTHER; note = 2'-O-methylguanosine-3'-phosphate
  modified_base 9: mod_base = OTHER; note = 2'-O-methyladenosine-3'-phosphate
  modified_base 10: mod_base = OTHER; note = 2'-O-methyladenosine-3'-phosphate
  modified_base 11: mod_base = OTHER; note = 2'-O-methyladenosine-3'-phosphate
  modified_base 12: mod_base = OTHER; note = 2'-O-methylcytidine-3'-phosphate
  modified_base 13: mod_base = OTHER; note = 2'-O-methyluridine-3'-phosphate
  modified_base 14: mod_base = OTHER; note = 2'-deoxy-2'-fluorocytidine-3'-phosphate
  modified_base 15: mod_base = OTHER; note = 2'-O-methyladenosine-3'-phosphate
  modified_base 16: mod_base = OTHER; note = 2'-deoxy-2'-fluorouridine-3'-phosphate
  modified_base 17: mod_base = OTHER; note = 2'-O-methyladenosine-3'-phosphate
  modified_base 18: mod_base = OTHER; note = 2'-O-methylguanosine-3'-phosphate
  modified_base 19: mod_base = OTHER; note = 2'-O-methylcytidine-3'-phosphate
  modified_base 20: mod_base = OTHER; note = 2'-O-methylguanosine-3'-phosphate
  modified_base 21: mod_base = OTHER; note = 2'-O-methyladenosine-3'-phosphorothioate
  modified_base 22: mod_base = OTHER; note = 2'-O-methyluridine-3'-phosphorothioate
  modified_base 23: mod_base = OTHER; note = 2'-O-methyluridine
tcattcagaaactcatagcgatt

SEQ ID NO: 1168 - RNA, 23 nt, synthetic construct
  source 1..23: mol_type = other RNA
  modified_base 1: mod_base = OTHER; note = 2'-O-methyluridine-3'-phosphorothioate 5'-(E)-Vinylphosphonate
  modified_base 2: mod_base = OTHER; note = 2'-deoxy-2'-fluorocytidine-3'-phosphorothioate
  modified_base 3: mod_base = OTHER; note = 2'-O-methyladenosine-3'-phosphate
  modified_base 4: mod_base = OTHER; note = 2'-O-methyluridine-3'-phosphate
  modified_base 5: mod_base = OTHER; note = 2'-O-methyluridine-3'-phosphate
  modified_base 6: mod_base = OTHER; note = 2'-deoxy-2'-fluoroadenosine-3'-phosphate
  modified_base 7: mod_base = OTHER; note = 2'-O-methyladenosine-3'-phosphate
  modified_base 8: mod_base = OTHER; note = 2'-O-methylguanosine-3'-phosphate
  modified_base 9: mod_base = OTHER; note = 2'-O-methyladenosine-3'-phosphate
  modified_base 10: mod_base = OTHER; note = 2'-O-methyladenosine-3'-phosphate
  modified_base 11: mod_base = OTHER; note = 2'-O-methyladenosine-3'-phosphate
  modified_base 12: mod_base = OTHER; note = 2'-O-methylcytidine-3'-phosphate
  modified_base 13: mod_base = OTHER; note = 2'-O-methyluridine-3'-phosphate
  modified_base 14: mod_base = OTHER; note = 2'-deoxy-2'-fluorocytidine-3'-phosphate
  modified_base 15: mod_base = OTHER; note = 2'-O-methyladenosine-3'-phosphate
  modified_base 16: mod_base = OTHER; note = 2'-deoxy-2'-fluorouridine-3'-phosphate
  modified_base 17: mod_base = OTHER; note = 2'-O-methyladenosine-3'-phosphate
  modified_base 18: mod_base = OTHER; note = 2'-O-methylguanosine-3'-phosphate
  modified_base 19: mod_base = OTHER; note = 2'-O-methylcytidine-3'-phosphate
  modified_base 20: mod_base = OTHER; note = 2'-O-methylguanosine-3'-phosphate
  modified_base 21: mod_base = OTHER; note = 2'-O-methyladenosine-3'-phosphorothioate
  modified_base 22: mod_base = OTHER; note = 2'-O-methyluridine-3'-phosphorothioate
  modified_base 23: mod_base = OTHER; note = 2'-O-methyluridine
tcattaagaaactcatagcgatt

SEQ ID NO: 1169 - RNA, 23 nt, synthetic construct
  source 1..23: mol_type = other RNA
  modified_base 1: mod_base = OTHER; note = 2'-O-methyluridine-3'-phosphorothioate 5'-(E)-Vinylphosphonate
  modified_base 2: mod_base = OTHER; note = 2'-deoxy-2'-fluorocytidine-3'-phosphorothioate
  modified_base 3: mod_base = OTHER; note = 2'-O-methylcytidine-3'-phosphate
  modified_base 4: mod_base = OTHER; note = 2'-O-methyladenosine-3'-phosphate
  modified_base 5: mod_base = OTHER; note = 2'-O-methyluridine-3'-phosphate
  modified_base 6: mod_base = OTHER; note = 2'-deoxy-2'-fluorouridine-3'-phosphate
  modified_base 7: mod_base = OTHER; note = 2'-O-methylcytidine-3'-phosphate
  modified_base 8: mod_base = OTHER; note = 2'-O-methyladenosine-3'-phosphate
  modified_base 9: mod_base = OTHER; note = 2'-O-methylguanosine-3'-phosphate
  modified_base 10: mod_base = OTHER; note = 2'-O-methyladenosine-3'-phosphate
  modified_base 11: mod_base = OTHER; note = 2'-O-methyladenosine-3'-phosphate
  modified_base 12: mod_base = OTHER; note = 2'-O-methyladenosine-3'-phosphate
  modified_base 13: mod_base = OTHER; note = 2'-O-methylcytidine-3'-phosphate
  modified_base 14: mod_base = OTHER; note = 2'-deoxy-2'-fluorouridine-3'-phosphate
  modified_base 15: mod_base = OTHER; note = 2'-O-methylcytidine-3'-phosphate
  modified_base 16: mod_base = OTHER; note = 2'-deoxy-2'-fluoroadenosine-3'-phosphate
  modified_base 17: mod_base = OTHER; note = 2'-O-methyluridine-3'-phosphate
  modified_base 18: mod_base = OTHER; note = 2'-O-methyladenosine-3'-phosphate
  modified_base 19: mod_base = OTHER; note = 2'-O-methylguanosine-3'-phosphate
  modified_base 20: mod_base = OTHER; note = 2'-O-methylcytidine-3'-phosphate
  modified_base 21: mod_base = OTHER; note = 2'-O-methylguanosine-3'-phosphorothioate
  modified_base 22: mod_base = OTHER; note = 2'-O-methyladenosine-3'-phosphorothioate
  modified_base 23: mod_base = OTHER; note = 2'-O-methyluridine
tccattcagaaactcatagcgat

SEQ ID NO: 1170 - RNA, 23 nt, synthetic construct
  source 1..23: mol_type = other RNA
  modified_base 1: mod_base = OTHER; note = 2'-O-methyluridine-3'-phosphorothioate 5'-(E)-Vinylphosphonate
  modified_base 2: mod_base = OTHER; note = 2'-deoxy-2'-fluorouridine-3'-phosphorothioate
  modified_base 3: mod_base = OTHER; note = 2'-O-methylcytidine-3'-phosphate
  modified_base 4: mod_base = OTHER; note = 2'-O-methylcytidine-3'-phosphate
  modified_base 5: mod_base = OTHER; note = 2'-O-methyladenosine-3'-phosphate
  modified_base 6: mod_base = OTHER; note = 2'-deoxy-2'-fluorouridine-3'-phosphate
  modified_base 7: mod_base = OTHER; note = 2'-O-methyluridine-3'-phosphate
  modified_base 8: mod_base = OTHER; note = 2'-O-methylcytidine-3'-phosphate
  modified_base 9: mod_base = OTHER; note = 2'-O-methyladenosine-3'-phosphate
  modified_base 10: mod_base = OTHER; note = 2'-O-methylguanosine-3'-phosphate
  modified_base 11: mod_base = OTHER; note = 2'-O-methyladenosine-3'-phosphate
  modified_base 12: mod_base = OTHER; note = 2'-O-methyladenosine-3'-phosphate
  modified_base 13: mod_base = OTHER; note = 2'-O-methyladenosine-3'-phosphate
  modified_base 14: mod_base = OTHER; note = 2'-deoxy-2'-fluorocytidine-3'-phosphate
  modified_base 15: mod_base = OTHER; note = 2'-O-methyluridine-3'-phosphate
  modified_base 16: mod_base = OTHER; note = 2'-deoxy-2'-fluorocytidine-3'-phosphate
  modified_base 17: mod_base = OTHER; note = 2'-O-methyladenosine-3'-phosphate
  modified_base 18: mod_base = OTHER; note = 2'-O-methyluridine-3'-phosphate
  modified_base 19: mod_base = OTHER; note = 2'-O-methyladenosine-3'-phosphate
  modified_base 20: mod_base = OTHER; note = 2'-O-methylguanosine-3'-phosphate
  modified_base 21: mod_base = OTHER; note = 2'-O-methylcytidine-3'-phosphorothioate
  modified_base 22: mod_base = OTHER; note = 2'-O-methylguanosine-3'-phosphorothioate
  modified_base 23: mod_base = OTHER; note = 2'-O-methyladenosine
ttccattcagaaactcatagcga

SEQ ID NO: 1171 - RNA, 23 nt, synthetic construct
  source 1..23: mol_type = other RNA
  modified_base 1: mod_base = OTHER; note = 2'-O-methyluridine-3'-phosphorothioate 5'-(E)-Vinylphosphonate
  modified_base 2: mod_base = OTHER; note = 2'-deoxy-2'-fluorouridine-3'-phosphorothioate
  modified_base 3: mod_base = OTHER; note = 2'-O-methyluridine-3'-phosphate
  modified_base 4: mod_base = OTHER; note = 2'-O-methylcytidine-3'-phosphate
  modified_base 5: mod_base = OTHER; note = 2'-O-methylcytidine-3'-phosphate
  modified_base 6: mod_base = OTHER; note = 2'-deoxy-2'-fluoroadenosine-3'-phosphate
  modified_base 7: mod_base = OTHER; note = 2'-O-methyluridine-3'-phosphate
  modified_base 8: mod_base = OTHER; note = 2'-O-methyluridine-3'-phosphate
  modified_base 9: mod_base = OTHER; note = 2'-O-methylcytidine-3'-phosphate
  modified_base 10: mod_base = OTHER; note = 2'-O-methyladenosine-3'-phosphate
  modified_base 11: mod_base = OTHER; note = 2'-O-methylguanosine-3'-phosphate
  modified_base 12: mod_base = OTHER; note = 2'-O-methyladenosine-3'-phosphate
  modified_base 13: mod_base = OTHER; note = 2'-O-methyladenosine-3'-phosphate
  modified_base 14: mod_base = OTHER; note = 2'-deoxy-2'-fluoroadenosine-3'-phosphate
  modified_base 15: mod_base = OTHER; note = 2'-O-methylcytidine-3'-phosphate
  modified_base 16: mod_base = OTHER; note = 2'-deoxy-2'-fluorouridine-3'-phosphate
  modified_base 17: mod_base = OTHER; note = 2'-O-methylcytidine-3'-phosphate
  modified_base 18: mod_base = OTHER; note = 2'-O-methyladenosine-3'-phosphate
  modified_base 19: mod_base = OTHER; note = 2'-O-methyluridine-3'-phosphate
  modified_base 20: mod_base = OTHER; note = 2'-O-methyladenosine-3'-phosphate
  modified_base 21: mod_base = OTHER; note = 2'-O-methylguanosine-3'-phosphorothioate
  modified_base 22: mod_base = OTHER; note = 2'-O-methylcytidine-3'-phosphorothioate
  modified_base 23: mod_base = OTHER; note = 2'-O-methylguanosine
tttccattcagaaactcatagcg

SEQ ID NO: 1172 - RNA, 23 nt, synthetic construct
  source 1..23: mol_type = other RNA
  modified_base 1: mod_base = OTHER; note = 2'-O-methyluridine-3'-phosphorothioate 5'-(E)-Vinylphosphonate
  modified_base 2: mod_base = OTHER; note = 2'-deoxy-2'-fluorouridine-3'-phosphorothioate
  modified_base 3: mod_base = OTHER; note = 2'-O-methyluridine-3'-phosphate
  modified_base 4: mod_base = OTHER; note = 2'-O-methylcytidine-3'-phosphate
  modified_base 5: mod_base = OTHER; note = 2'-O-methylcytidine-3'-phosphate
  modified_base 6: mod_base = OTHER; note = 2'-deoxy-2'-fluoroadenosine-3'-phosphate
  modified_base 7: mod_base = OTHER; note = 2'-O-methyladenosine-3'-phosphate
  modified_base 8: mod_base = OTHER; note = 2'-O-methyluridine-3'-phosphate
  modified_base 9: mod_base = OTHER; note = 2'-O-methylcytidine-3'-phosphate
  modified_base 10: mod_base = OTHER; note = 2'-O-methyladenosine-3'-phosphate
  modified_base 11: mod_base = OTHER; note = 2'-O-methylguanosine-3'-phosphate
  modified_base 12: mod_base = OTHER; note = 2'-O-methyladenosine-3'-phosphate
  modified_base 13: mod_base = OTHER; note = 2'-O-methyladenosine-3'-phosphate
  modified_base 14: mod_base = OTHER; note = 2'-deoxy-2'-fluoroadenosine-3'-phosphate
  modified_base 15: mod_base = OTHER; note = 2'-O-methylcytidine-3'-phosphate
  modified_base 16: mod_base = OTHER; note = 2'-deoxy-2'-fluorouridine-3'-phosphate
  modified_base 17: mod_base = OTHER; note = 2'-O-methylcytidine-3'-phosphate
  modified_base 18: mod_base = OTHER; note = 2'-O-methyladenosine-3'-phosphate
  modified_base 19: mod_base = OTHER; note = 2'-O-methyluridine-3'-phosphate
  modified_base 20: mod_base = OTHER; note = 2'-O-methyladenosine-3'-phosphate
  modified_base 21: mod_base = OTHER; note = 2'-O-methylguanosine-3'-phosphorothioate
  modified_base 22: mod_base = OTHER; note = 2'-O-methylcytidine-3'-phosphorothioate
  modified_base 23: mod_base = OTHER; note = 2'-O-methylguanosine
tttccaatcagaaactcatagcg

SEQ ID NO: 1173 - RNA, 23 nt, synthetic construct
  source 1..23: mol_type = other RNA
  modified_base 1: mod_base = OTHER; note = 2'-O-methyluridine-3'-phosphorothioate 5'-(E)-Vinylphosphonate
  modified_base 2: mod_base = OTHER; note = 2'-deoxy-2'-fluorocytidine-3'-phosphorothioate
  modified_base 3: mod_base = OTHER; note = 2'-O-methyluridine-3'-phosphate
  modified_base 4: mod_base = OTHER; note = 2'-O-methyluridine-3'-phosphate
  modified_base 5: mod_base = OTHER; note = 2'-O-methylcytidine-3'-phosphate
  modified_base 6: mod_base = OTHER; note = 2'-deoxy-2'-fluorocytidine-3'-phosphate
  modified_base 7: mod_base = OTHER; note = 2'-O-methyladenosine-3'-phosphate
  modified_base 8: mod_base = OTHER; note = 2'-O-methyluridine-3'-phosphate
  modified_base 9: mod_base = OTHER; note = 2'-O-methyluridine-3'-phosphate
  modified_base 10: mod_base = OTHER; note = 2'-O-methylcytidine-3'-phosphate
  modified_base 11: mod_base = OTHER; note = 2'-O-methyladenosine-3'-phosphate
  modified_base 12: mod_base = OTHER; note = 2'-O-methylguanosine-3'-phosphate
  modified_base 13: mod_base = OTHER; note = 2'-O-methyladenosine-3'-phosphate
  modified_base 14: mod_base = OTHER; note = 2'-deoxy-2'-fluoroadenosine-3'-phosphate
  modified_base 15: mod_base = OTHER; note = 2'-O-methyladenosine-3'-phosphate
  modified_base 16: mod_base = OTHER; note = 2'-deoxy-2'-fluorocytidine-3'-phosphate
  modified_base 17: mod_base = OTHER; note = 2'-O-methyluridine-3'-phosphate
  modified_base 18: mod_base = OTHER; note = 2'-O-methylcytidine-3'-phosphate
  modified_base 19: mod_base = OTHER; note = 2'-O-methyladenosine-3'-phosphate
  modified_base 20: mod_base = OTHER; note = 2'-O-methyluridine-3'-phosphate
  modified_base 21: mod_base = OTHER; note = 2'-O-methyladenosine-3'-phosphorothioate
  modified_base 22: mod_base = OTHER; note = 2'-O-methylguanosine-3'-phosphorothioate
  modified_base 23: mod_base = OTHER; note = 2'-O-methylcytidine
tcttccattcagaaactcatagc

SEQ ID NO: 1174 - RNA, 23 nt, synthetic construct
  source 1..23: mol_type = other RNA
  modified_base 1: mod_base = OTHER; note = 2'-O-methyluridine-3'-phosphorothioate 5'-(E)-Vinylphosphonate
  modified_base 2: mod_base = OTHER; note = 2'-deoxy-2'-fluorocytidine-3'-phosphorothioate
  modified_base 3: mod_base = OTHER; note = 2'-O-methyluridine-3'-phosphate
  modified_base 4: mod_base = OTHER; note = 2'-O-methyluridine-3'-phosphate
  modified_base 5: mod_base = OTHER; note = 2'-O-methylcytidine-3'-phosphate
  modified_base 6: mod_base = OTHER; note = 2'-deoxy-2'-fluoroadenosine-3'-phosphate
  modified_base 7: mod_base = OTHER; note = 2'-O-methyladenosine-3'-phosphate
  modified_base 8: mod_base = OTHER; note = 2'-O-methyluridine-3'-phosphate
  modified_base 9: mod_base = OTHER; note = 2'-O-methyluridine-3'-phosphate
  modified_base 10: mod_base = OTHER; note = 2'-O-methylcytidine-3'-phosphate
  modified_base 11: mod_base = OTHER; note = 2'-O-methyladenosine-3'-phosphate
  modified_base 12: mod_base = OTHER; note = 2'-O-methylguanosine-3'-phosphate
  modified_base 13: mod_base = OTHER; note = 2'-O-methyladenosine-3'-phosphate
  modified_base 14: mod_base = OTHER; note = 2'-deoxy-2'-fluoroadenosine-3'-phosphate
  modified_base 15: mod_base = OTHER; note = 2'-O-methyladenosine-3'-phosphate
  modified_base 16: mod_base = OTHER; note = 2'-deoxy-2'-fluorocytidine-3'-phosphate
  modified_base 17: mod_base = OTHER; note = 2'-O-methyluridine-3'-phosphate
  modified_base 18: mod_base = OTHER; note = 2'-O-methylcytidine-3'-phosphate
  modified_base 19: mod_base = OTHER; note = 2'-O-methyladenosine-3'-phosphate
  modified_base 20: mod_base = OTHER; note = 2'-O-methyluridine-3'-phosphate
  modified_base 21: mod_base = OTHER; note = 2'-O-methyladenosine-3'-phosphorothioate
  modified_base 22: mod_base = OTHER; note = 2'-O-methylguanosine-3'-phosphorothioate
  modified_base 23: mod_base = OTHER; note = 2'-O-methylcytidine
tcttcaattcagaaactcatagc

SEQ ID NO: 1175 - RNA, 23 nt, synthetic construct
  source 1..23: mol_type = other RNA
  modified_base 1: mod_base = OTHER; note = 2'-O-methyluridine-3'-phosphorothioate 5'-(E)-Vinylphosphonate
  modified_base 2: mod_base = OTHER; note = 2'-deoxy-2'-fluorocytidine-3'-phosphorothioate
  modified_base 3: mod_base = OTHER; note = 2'-O-methyluridine-3'-phosphate
  modified_base 4: mod_base = OTHER; note = 2'-O-methylcytidine-3'-phosphate
  modified_base 5: mod_base = OTHER; note = 2'-O-methyluridine-3'-phosphate
  modified_base 6: mod_base = OTHER; note = 2'-deoxy-2'-fluorouridine-3'-phosphate
  modified_base 7: mod_base = OTHER; note = 2'-O-methylcytidine-3'-phosphate
  modified_base 8: mod_base = OTHER; note = 2'-O-methylcytidine-3'-phosphate
  modified_base 9: mod_base = OTHER; note = 2'-O-methyladenosine-3'-phosphate
  modified_base 10: mod_base = OTHER; note = 2'-O-methyluridine-3'-phosphate
  modified_base 11: mod_base = OTHER; note = 2'-O-methyluridine-3'-phosphate
  modified_base 12: mod_base = OTHER; note = 2'-O-methylcytidine-3'-phosphate
  modified_base 13: mod_base = OTHER; note = 2'-O-methyladenosine-3'-phosphate
  modified_base 14: mod_base = OTHER; note = 2'-deoxy-2'-fluoroguanosine-3'-phosphate
  modified_base 15: mod_base = OTHER; note = 2'-O-methyladenosine-3'-phosphate
  modified_base 16: mod_base = OTHER; note = 2'-deoxy-2'-fluoroadenosine-3'-phosphate
  modified_base 17: mod_base = OTHER; note = 2'-O-methyladenosine-3'-phosphate
  modified_base 18: mod_base = OTHER; note = 2'-O-methylcytidine-3'-phosphate
  modified_base 19: mod_base = OTHER; note = 2'-O-methyluridine-3'-phosphate
  modified_base 20: mod_base = OTHER; note = 2'-O-methylcytidine-3'-phosphate
  modified_base 21: mod_base = OTHER; note = 2'-O-methyladenosine-3'-phosphorothioate
  modified_base 22: mod_base = OTHER; note = 2'-O-methyluridine-3'-phosphorothioate
  modified_base 23: mod_base = OTHER; note = 2'-O-methyladenosine
tctcttccattcagaaactcata

SEQ ID NO: 1176 - RNA, 23 nt, synthetic construct
  source 1..23: mol_type = other RNA
  modified_base 1: mod_base = OTHER; note = 2'-O-methyluridine-3'-phosphorothioate 5'-(E)-Vinylphosphonate
  modified_base 2: mod_base = OTHER; note = 2'-deoxy-2'-fluoroadenosine-3'-phosphorothioate
  modified_base 3: mod_base = OTHER; note = 2'-O-methylcytidine-3'-phosphate
  modified_base 4: mod_base = OTHER; note = 2'-O-methyluridine-3'-phosphate
  modified_base 5: mod_base = OTHER; note = 2'-O-methylcytidine-3'-phosphate
  modified_base 6: mod_base = OTHER; note = 2'-deoxy-2'-fluorouridine-3'-phosphate
  modified_base 7: mod_base = OTHER; note = 2'-O-methyluridine-3'-phosphate
  modified_base 8: mod_base = OTHER; note = 2'-O-methylcytidine-3'-phosphate
  modified_base 9: mod_base = OTHER; note = 2'-O-methylcytidine-3'-phosphate
  modified_base 10: mod_base = OTHER; note = 2'-O-methyladenosine-3'-phosphate
  modified_base 11: mod_base = OTHER; note = 2'-O-methyluridine-3'-phosphate
  modified_base 12: mod_base = OTHER; note = 2'-O-methyluridine-3'-phosphate
  modified_base 13: mod_base = OTHER; note = 2'-O-methylcytidine-3'-phosphate
  modified_base 14: mod_base = OTHER; note = 2'-deoxy-2'-fluoroadenosine-3'-phosphate
  modified_base 15: mod_base = OTHER; note = 2'-O-methylguanosine-3'-phosphate
  modified_base 16: mod_base = OTHER; note = 2'-deoxy-2'-fluoroadenosine-3'-phosphate
  modified_base 17: mod_base = OTHER; note = 2'-O-methyladenosine-3'-phosphate
  modified_base 18: mod_base = OTHER; note = 2'-O-methyladenosine-3'-phosphate
  modified_base 19: mod_base = OTHER; note = 2'-O-methylcytidine-3'-phosphate
  modified_base 20: mod_base = OTHER; note = 2'-O-methyluridine-3'-phosphate
  modified_base 21: mod_base = OTHER; note = 2'-O-methylcytidine-3'-phosphorothioate
  modified_base 22: mod_base = OTHER; note = 2'-O-methyladenosine-3'-phosphorothioate
  modified_base 23: mod_base = OTHER; note = 2'-O-methyluridine
tactcttccattcagaaactcat

SEQ ID NO: 1177 - RNA, 23 nt, synthetic construct
  source 1..23: mol_type = other RNA
  modified_base 1: mod_base = OTHER; note = 2'-O-methyluridine-3'-phosphorothioate 5'-(E)-Vinylphosphonate
  modified_base 2: mod_base = OTHER; note = 2'-deoxy-2'-fluoroadenosine-3'-phosphorothioate
  modified_base 3: mod_base = OTHER; note = 2'-O-methylcytidine-3'-phosphate
  modified_base 4: mod_base = OTHER; note = 2'-O-methyluridine-3'-phosphate
  modified_base 5: mod_base = OTHER; note = 2'-O-methylcytidine-3'-phosphate
  modified_base 6: mod_base = OTHER; note = 2'-deoxy-2'-fluorouridine-3'-phosphate
  modified_base 7: mod_base = OTHER; note = 2'-O-methyladenosine-3'-phosphate
  modified_base 8: mod_base = OTHER; note = 2'-O-methylcytidine-3'-phosphate
  modified_base 9: mod_base = OTHER; note = 2'-O-methylcytidine-3'-phosphate
  modified_base 10: mod_base = OTHER; note = 2'-O-methyladenosine-3'-phosphate
  modified_base 11: mod_base = OTHER; note = 2'-O-methyluridine-3'-phosphate
  modified_base 12: mod_base = OTHER; note = 2'-O-methyluridine-3'-phosphate
  modified_base 13: mod_base = OTHER; note = 2'-O-methylcytidine-3'-phosphate
  modified_base 14: mod_base = OTHER; note = 2'-deoxy-2'-fluoroadenosine-3'-phosphate
  modified_base 15: mod_base = OTHER; note = 2'-O-methylguanosine-3'-phosphate
  modified_base 16: mod_base = OTHER; note = 2'-deoxy-2'-fluoroadenosine-3'-phosphate
  modified_base 17: mod_base = OTHER; note = 2'-O-methyladenosine-3'-phosphate
  modified_base 18: mod_base = OTHER; note = 2'-O-methyladenosine-3'-phosphate
  modified_base 19: mod_base = OTHER; note = 2'-O-methylcytidine-3'-phosphate
  modified_base 20: mod_base = OTHER; note = 2'-O-methyluridine-3'-phosphate
  modified_base 21: mod_base = OTHER; note = 2'-O-methylcytidine-3'-phosphorothioate
  modified_base 22: mod_base = OTHER; note = 2'-O-methyladenosine-3'-phosphorothioate
  modified_base 23: mod_base = OTHER; note = 2'-O-methyluridine
tactctaccattcagaaactcat

SEQ ID NO: 1178 - RNA, 23 nt, synthetic construct
  source 1..23: mol_type = other RNA
  modified_base 1: mod_base = OTHER; note = 2'-O-methyluridine-3'-phosphorothioate 5'-(E)-Vinylphosphonate
  modified_base 2: mod_base = OTHER; note = 2'-deoxy-2'-fluorouridine-3'-phosphorothioate
  modified_base 3: mod_base = OTHER; note = 2'-O-methylguanosine-3'-phosphate
  modified_base 4: mod_base = OTHER; note = 2'-O-methyluridine-3'-phosphate
  modified_base 5: mod_base = OTHER; note = 2'-O-methyladenosine-3'-phosphate
  modified_base 6: mod_base = OTHER; note = 2'-deoxy-2'-fluorouridine-3'-phosphate
  modified_base 7: mod_base = OTHER; note = 2'-O-methyluridine-3'-phosphate
  modified_base 8: mod_base = OTHER; note = 2'-O-methyluridine-3'-phosphate
  modified_base 9: mod_base = OTHER; note = 2'-O-methylguanosine-3'-phosphate
  modified_base 10: mod_base = OTHER; note = 2'-O-methyluridine-3'-phosphate
  modified_base 11: mod_base = OTHER; note = 2'-O-methylcytidine-3'-phosphate
  modified_base 12: mod_base = OTHER; note = 2'-O-methylcytidine-3'-phosphate
  modified_base 13: mod_base = OTHER; note = 2'-O-methyluridine-3'-phosphate
  modified_base 14: mod_base = OTHER; note = 2'-deoxy-2'-fluorouridine-3'-phosphate
  modified_base 15: mod_base = OTHER; note = 2'-O-methylcytidine-3'-phosphate
  modified_base 16: mod_base = OTHER; note = 2'-deoxy-2'-fluorouridine-3'-phosphate
  modified_base 17: mod_base = OTHER; note = 2'-O-methylcytidine-3'-phosphate
  modified_base 18: mod_base = OTHER; note = 2'-O-methylguanosine-3'-phosphate
  modified_base 19: mod_base = OTHER; note = 2'-O-methyladenosine-3'-phosphate
  modified_base 20: mod_base = OTHER; note = 2'-O-methyladenosine-3'-phosphate
  modified_base 21: mod_base = OTHER; note = 2'-O-methylguanosine-3'-phosphorothioate
  modified_base 22: mod_base = OTHER; note = 2'-O-methylcytidine-3'-phosphorothioate
  modified_base 23: mod_base = OTHER; note = 2'-O-methyladenosine
ttgtatttgtccttctcgaagca

SEQ ID NO: 1179 - RNA, 23 nt, synthetic construct
  source 1..23: mol_type = other RNA
  modified_base 1: mod_base = OTHER; note = 2'-O-methyluridine-3'-phosphorothioate 5'-(E)-Vinylphosphonate
  modified_base 2: mod_base = OTHER; note = 2'-deoxy-2'-fluoroadenosine-3'-phosphorothioate
  modified_base 3: mod_base = OTHER; note = 2'-O-methyluridine-3'-phosphate
  modified_base 4: mod_base = OTHER; note = 2'-O-methylguanosine-3'-phosphate
  modified_base 5: mod_base = OTHER; note = 2'-O-methyluridine-3'-phosphate
  modified_base 6: mod_base = OTHER; note = 2'-deoxy-2'-fluoroadenosine-3'-phosphate
  modified_base 7: mod_base = OTHER; note = 2'-O-methyluridine-3'-phosphate
  modified_base 8: mod_base = OTHER; note = 2'-O-methyluridine-3'-phosphate
  modified_base 9: mod_base = OTHER; note = 2'-O-methyluridine-3'-phosphate
  modified_base 10: mod_base = OTHER; note = 2'-O-methylguanosine-3'-phosphate
  modified_base 11: mod_base = OTHER; note = 2'-O-methyluridine-3'-phosphate
  modified_base 12: mod_base = OTHER; note = 2'-O-methylcytidine-3'-phosphate
  modified_base 13: mod_base = OTHER; note = 2'-O-methylcytidine-3'-phosphate
  modified_base 14: mod_base = OTHER; note = 2'-deoxy-2'-fluorouridine-3'-phosphate
  modified_base 15: mod_base = OTHER; note = 2'-O-methyluridine-3'-phosphate
  modified_base 16: mod_base = OTHER; note = 2'-deoxy-2'-fluorocytidine-3'-phosphate
  modified_base 17: mod_base = OTHER; note = 2'-O-methyluridine-3'-phosphate
  modified_base 18: mod_base = OTHER; note = 2'-O-methylcytidine-3'-phosphate
  modified_base 19: mod_base = OTHER; note = 2'-O-methylguanosine-3'-phosphate
  modified_base 20: mod_base = OTHER; note = 2'-O-methyladenosine-3'-phosphate
  modified_base 21: mod_base = OTHER; note = 2'-O-methyladenosine-3'-phosphorothioate
  modified_base 22: mod_base = OTHER; note = 2'-O-methylguanosine-3'-phosphorothioate
  modified_base 23: mod_base = OTHER; note = 2'-O-methylcytidine
tatgtatttgtccttctcgaagc

SEQ ID NO: 1180 - RNA, 23 nt, synthetic construct
  source 1..23: mol_type = other RNA
  modified_base 1: mod_base = OTHER; note = 2'-O-methyluridine-3'-phosphorothioate 5'-(E)-Vinylphosphonate
  modified_base 2: mod_base = OTHER; note = 2'-deoxy-2'-fluoroadenosine-3'-phosphorothioate
  modified_base 3: mod_base = OTHER; note = 2'-O-methyladenosine-3'-phosphate
  modified_base 4: mod_base = OTHER; note = 2'-O-methyluridine-3'-phosphate
  modified_base 5: mod_base = OTHER; note = 2'-O-methylguanosine-3'-phosphate
  modified_base 6: mod_base = OTHER; note = 2'-deoxy-2'-fluorouridine-3'-phosphate
  modified_base 7: mod_base = OTHER; note = 2'-O-methyladenosine-3'-phosphate
  modified_base 8: mod_base = OTHER; note = 2'-O-methyluridine-3'-phosphate
  modified_base 9: mod_base = OTHER; note = 2'-O-methyluridine-3'-phosphate
  modified_base 10: mod_base = OTHER; note = 2'-O-methyluridine-3'-phosphate
  modified_base 11: mod_base = OTHER; note = 2'-O-methylguanosine-3'-phosphate
  modified_base 12: mod_base = OTHER; note = 2'-O-methyluridine-3'-phosphate
  modified_base 13: mod_base = OTHER; note = 2'-O-methylcytidine-3'-phosphate
  modified_base 14: mod_base = OTHER; note = 2'-deoxy-2'-fluorocytidine-3'-phosphate
  modified_base 15: mod_base = OTHER; note = 2'-O-methyluridine-3'-phosphate
  modified_base 16: mod_base = OTHER; note = 2'-deoxy-2'-fluorouridine-3'-phosphate
  modified_base 17: mod_base = OTHER; note = 2'-O-methylcytidine-3'-phosphate
  modified_base 18: mod_base = OTHER; note = 2'-O-methyluridine-3'-phosphate
  modified_base 19: mod_base = OTHER; note = 2'-O-methylcytidine-3'-phosphate
  modified_base 20: mod_base = OTHER; note = 2'-O-methylguanosine-3'-phosphate
  modified_base 21: mod_base = OTHER; note = 2'-O-methyladenosine-3'-phosphorothioate
  modified_base 22: mod_base = OTHER; note = 2'-O-methyladenosine-3'-phosphorothioate
  modified_base 23: mod_base = OTHER; note = 2'-O-methylguanosine
taatgtatttgtccttctcgaag

SEQ ID NO: 1181 - RNA, 23 nt, synthetic construct
  source 1..23: mol_type = other RNA
  modified_base 1: mod_base = OTHER; note = 2'-O-methyluridine-3'-phosphorothioate 5'-(E)-Vinylphosphonate
  modified_base 2: mod_base = OTHER; note = 2'-deoxy-2'-fluoroadenosine-3'-phosphorothioate
  modified_base 3: mod_base = OTHER; note = 2'-O-methyladenosine-3'-phosphate
  modified_base 4: mod_base = OTHER; note = 2'-O-methyluridine-3'-phosphate
  modified_base 5: mod_base = OTHER; note = 2'-O-methylguanosine-3'-phosphate
  modified_base 6: mod_base = OTHER; note = 2'-deoxy-2'-fluoroadenosine-3'-phosphate
  modified_base 7: mod_base = OTHER; note = 2'-O-methyladenosine-3'-phosphate
  modified_base 8: mod_base = OTHER; note = 2'-O-methyluridine-3'-phosphate
  modified_base 9: mod_base = OTHER; note = 2'-O-methyluridine-3'-phosphate
  modified_base 10: mod_base = OTHER; note = 2'-O-methyluridine-3'-phosphate
  modified_base 11: mod_base = OTHER; note = 2'-O-methylguanosine-3'-phosphate
  modified_base 12: mod_base = OTHER; note = 2'-O-methyluridine-3'-phosphate
  modified_base 13: mod_base = OTHER; note = 2'-O-methylcytidine-3'-phosphate
  modified_base 14: mod_base = OTHER; note = 2'-deoxy-2'-fluorocytidine-3'-phosphate
  modified_base 15: mod_base = OTHER; note = 2'-O-methyluridine-3'-phosphate
  modified_base 16: mod_base = OTHER; note = 2'-deoxy-2'-fluorouridine-3'-phosphate
  modified_base 17: mod_base = OTHER; note = 2'-O-methylcytidine-3'-phosphate
  modified_base 18: mod_base = OTHER; note = 2'-O-methyluridine-3'-phosphate
  modified_base 19: mod_base = OTHER; note = 2'-O-methylcytidine-3'-phosphate
  modified_base 20: mod_base = OTHER; note = 2'-O-methylguanosine-3'-phosphate
  modified_base 21: mod_base = OTHER; note = 2'-O-methyladenosine-3'-phosphorothioate
  modified_base 22: mod_base = OTHER; note = 2'-O-methyladenosine-3'-phosphorothioate
  modified_base 23: mod_base = OTHER; note = 2'-O-methylguanosine
taatgaatttgtccttctcgaag

SEQ ID NO: 1182 - RNA, 23 nt, synthetic construct
  source 1..23: mol_type = other RNA
  modified_base 1: mod_base = OTHER; note = 2'-O-methyluridine-3'-phosphorothioate 5'-(E)-Vinylphosphonate
  modified_base 2: mod_base = OTHER; note = 2'-deoxy-2'-fluoroadenosine-3'-phosphorothioate
  modified_base 3: mod_base = OTHER; note = 2'-O-methyladenosine-3'-phosphate
  modified_base 4: mod_base = OTHER; note = 2'-O-methyladenosine-3'-phosphate
  modified_base 5: mod_base = OTHER; note = 2'-O-methyluridine-3'-phosphate
  modified_base 6: mod_base = OTHER; note = 2'-deoxy-2'-fluoroguanosine-3'-phosphate
  modified_base 7: mod_base = OTHER; note = 2'-O-methyluridine-3'-phosphate
  modified_base 8: mod_base = OTHER; note = 2'-O-methyladenosine-3'-phosphate
  modified_base 9: mod_base = OTHER; note = 2'-O-methyluridine-3'-phosphate
  modified_base 10: mod_base = OTHER; note = 2'-O-methyluridine-3'-phosphate
  modified_base 11: mod_base = OTHER; note = 2'-O-methyluridine-3'-phosphate
  modified_base 12: mod_base = OTHER; note = 2'-O-methylguanosine-3'-phosphate
  modified_base 13: mod_base = OTHER; note = 2'-O-methyluridine-3'-phosphate
  modified_base 14: mod_base = OTHER; note = 2'-deoxy-2'-fluorocytidine-3'-phosphate
  modified_base 15: mod_base = OTHER; note = 2'-O-methylcytidine-3'-phosphate
  modified_base 16: mod_base = OTHER; note = 2'-deoxy-2'-fluorouridine-3'-phosphate
  modified_base 17: mod_base = OTHER; note = 2'-O-methyluridine-3'-phosphate
  modified_base 18: mod_base = OTHER; note = 2'-O-methylcytidine-3'-phosphate
  modified_base 19: mod_base = OTHER; note = 2'-O-methyluridine-3'-phosphate
  modified_base 20: mod_base = OTHER; note = 2'-O-methylcytidine-3'-phosphate
  modified_base 21: mod_base = OTHER; note = 2'-O-methylguanosine-3'-phosphorothioate
  modified_base 22: mod_base = OTHER; note = 2'-O-methyladenosine-3'-phosphorothioate
  modified_base 23: mod_base = OTHER; note = 2'-O-methyladenosine
taaatgtatttgtccttctcgaa

SEQ ID NO: 1183 - RNA, 23 nt, synthetic construct
  source 1..23: mol_type = other RNA
  modified_base 1: mod_base = OTHER; note = 2'-O-methyluridine-3'-phosphorothioate 5'-(E)-Vinylphosphonate
  modified_base 2: mod_base = OTHER; note = 2'-deoxy-2'-fluoroadenosine-3'-phosphorothioate
  modified_base 3: mod_base = OTHER; note = 2'-O-methyladenosine-3'-phosphate
  modified_base 4: mod_base = OTHER; note = 2'-O-methyladenosine-3'-phosphate
  modified_base 5: mod_base = OTHER; note = 2'-O-methyluridine-3'-phosphate
  modified_base 6: mod_base = OTHER; note = 2'-deoxy-2'-fluoroguanosine-3'-phosphate
  modified_base 7: mod_base = OTHER; note = 2'-O-methyladenosine-3'-phosphate
  modified_base 8: mod_base = OTHER; note = 2'-O-methyladenosine-3'-phosphate
  modified_base 9: mod_base = OTHER; note = 2'-O-methyluridine-3'-phosphate
  modified_base 10: mod_base = OTHER; note = 2'-O-methyluridine-3'-phosphate
  modified_base 11: mod_base = OTHER; note = 2'-O-methyluridine-3'-phosphate
  modified_base 12: mod_base = OTHER; note = 2'-O-methylguanosine-3'-phosphate
  modified_base 13: mod_base = OTHER; note = 2'-O-methyluridine-3'-phosphate
  modified_base 14: mod_base = OTHER; note = 2'-deoxy-2'-fluorocytidine-3'-phosphate
  modified_base 15: mod_base = OTHER; note = 2'-O-methylcytidine-3'-phosphate
  modified_base 16: mod_base = OTHER; note = 2'-deoxy-2'-fluorouridine-3'-phosphate
  modified_base 17: mod_base = OTHER; note = 2'-O-methyluridine-3'-phosphate
  modified_base 18: mod_base = OTHER; note = 2'-O-methylcytidine-3'-phosphate
  modified_base 19: mod_base = OTHER; note = 2'-O-methyluridine-3'-phosphate
  modified_base 20: mod_base = OTHER; note = 2'-O-methylcytidine-3'-phosphate
  modified_base 21: mod_base = OTHER; note = 2'-O-methylguanosine-3'-phosphorothioate
  modified_base 22: mod_base = OTHER; note = 2'-O-methyladenosine-3'-phosphorothioate
  modified_base 23: mod_base = OTHER; note = 2'-O-methyladenosine
taaatgaatttgtccttctcgaa

SEQ ID NO: 1184 - RNA, 23 nt, synthetic construct
  source 1..23: mol_type = other RNA
  modified_base 1: mod_base = OTHER; note = 2'-O-methyluridine-3'-phosphorothioate 5'-(E)-Vinylphosphonate
  modified_base 2: mod_base = OTHER; note = 2'-deoxy-2'-fluoroadenosine-3'-phosphorothioate
  modified_base 3: mod_base = OTHER; note = 2'-O-methyladenosine-3'-phosphate
  modified_base 4: mod_base = OTHER; note = 2'-O-methyladenosine-3'-phosphate
  modified_base 5: mod_base = OTHER; note = 2'-O-methyladenosine-3'-phosphate
  modified_base 6: mod_base = OTHER; note = 2'-deoxy-2'-fluorouridine-3'-phosphate
  modified_base 7: mod_base = OTHER; note = 2'-O-methylguanosine-3'-phosphate
  modified_base 8: mod_base = OTHER; note = 2'-O-methyluridine-3'-phosphate
  modified_base 9: mod_base = OTHER; note = 2'-O-methyladenosine-3'-phosphate
  modified_base 10: mod_base = OTHER; note = 2'-O-methyluridine-3'-phosphate
  modified_base 11: mod_base = OTHER; note = 2'-O-methyluridine-3'-phosphate
  modified_base 12: mod_base = OTHER; note = 2'-O-methyluridine-3'-phosphate
  modified_base 13: mod_base = OTHER; note = 2'-O-methylguanosine-3'-phosphate
  modified_base 14: mod_base = OTHER; note = 2'-deoxy-2'-fluorouridine-3'-phosphate
  modified_base 15: mod_base = OTHER; note = 2'-O-methylcytidine-3'-phosphate
  modified_base 16: mod_base = OTHER; note = 2'-deoxy-2'-fluorocytidine-3'-phosphate
  modified_base 17: mod_base = OTHER; note = 2'-O-methyluridine-3'-phosphate
  modified_base 18: mod_base = OTHER; note = 2'-O-methyluridine-3'-phosphate
  modified_base 19: mod_base = OTHER; note = 2'-O-methylcytidine-3'-phosphate
  modified_base 20: mod_base = OTHER; note = 2'-O-methyluridine-3'-phosphate
  modified_base 21: mod_base = OTHER; note = 2'-O-methylcytidine-3'-phosphorothioate
  modified_base 22: mod_base = OTHER; note = 2'-O-methylguanosine-3'-phosphorothioate
  modified_base 23: mod_base = OTHER; note = 2'-O-methyladenosine
taaaatgtatttgtccttctcga

SEQ ID NO: 1185 - RNA, 23 nt, synthetic construct
  source 1..23: mol_type = other RNA
  modified_base 1: mod_base = OTHER; note = 2'-O-methyluridine-3'-phosphorothioate 5'-(E)-Vinylphosphonate
  modified_base 2: mod_base = OTHER; note = 2'-deoxy-2'-fluorouridine-3'-phosphorothioate
  modified_base 3: mod_base = OTHER; note = 2'-O-methyladenosine-3'-phosphate
  modified_base 4: mod_base = OTHER; note = 2'-O-methyladenosine-3'-phosphate
  modified_base 5: mod_base = OTHER; note = 2'-O-methyladenosine-3'-phosphate
  modified_base 6: mod_base = OTHER; note = 2'-deoxy-2'-fluoroadenosine-3'-phosphate
  modified_base 7: mod_base = OTHER; note = 2'-O-methyluridine-3'-phosphate
  modified_base 8: mod_base = OTHER; note = 2'-O-methylguanosine-3'-phosphate
  modified_base 9: mod_base = OTHER; note = 2'-O-methyluridine-3'-phosphate
  modified_base 10: mod_base = OTHER; note = 2'-O-methyladenosine-3'-phosphate
  modified_base 11: mod_base = OTHER; note = 2'-O-methyluridine-3'-phosphate
  modified_base 12: mod_base = OTHER; note = 2'-O-methyluridine-3'-phosphate
  modified_base 13: mod_base = OTHER; note = 2'-O-methyluridine-3'-phosphate
  modified_base 14: mod_base = OTHER; note = 2'-deoxy-2'-fluoroguanosine-3'-phosphate
  modified_base 15: mod_base = OTHER; note = 2'-O-methyluridine-3'-phosphate
  modified_base 16: mod_base = OTHER; note = 2'-deoxy-2'-fluorocytidine-3'-phosphate
  modified_base 17: mod_base = OTHER; note = 2'-O-methylcytidine-3'-phosphate
  modified_base 18: mod_base = OTHER; note = 2'-O-methyluridine-3'-phosphate
  modified_base 19: mod_base = OTHER; note = 2'-O-methyluridine-3'-phosphate
  modified_base 20: mod_base = OTHER; note = 2'-O-methylcytidine-3'-phosphate
  modified_base 21: mod_base = OTHER; note = 2'-O-methyluridine-3'-phosphorothioate
  modified_base 22: mod_base = OTHER; note = 2'-O-methylcytidine-3'-phosphorothioate
  modified_base 23: mod_base = OTHER; note = 2'-O-methylguanosine
ttaaaatgtatttgtccttctcg

SEQ ID NO: 1186 - RNA, 23 nt, synthetic construct
  source 1..23: mol_type = other RNA
  modified_base 1: mod_base = OTHER; note = 2'-O-methyluridine-3'-phosphorothioate 5'-(E)-Vinylphosphonate
  modified_base 2: mod_base = OTHER; note = 2'-deoxy-2'-fluoroguanosine-3'-phosphorothioate
  modified_base 3: mod_base = OTHER; note = 2'-O-methyluridine-3'-phosphate
  modified_base 4: mod_base = OTHER; note = 2'-O-methyladenosine-3'-phosphate
  modified_base 5: mod_base = OTHER; note = 2'-O-methyladenosine-3'-phosphate
  modified_base 6: mod_base = OTHER; note = 2'-deoxy-2'-fluoroadenosine-3'-phosphate
  modified_base 7: mod_base = OTHER; note = 2'-O-methyladenosine-3'-phosphate
  modified_base 8: mod_base = OTHER; note = 2'-O-methyluridine-3'-phosphate
  modified_base 9: mod_base = OTHER; note = 2'-O-methylguanosine-3'-phosphate
  modified_base 10: mod_base = OTHER; note = 2'-O-methyluridine-3'-phosphate
  modified_base 11: mod_base = OTHER; note = 2'-O-methyladenosine-3'-phosphate
  modified_base 12: mod_base = OTHER; note = 2'-O-methyluridine-3'-phosphate
  modified_base 13: mod_base = OTHER; note = 2'-O-methyluridine-3'-phosphate
  modified_base 14: mod_base = OTHER; note = 2'-deoxy-2'-fluorouridine-3'-phosphate
  modified_base 15: mod_base = OTHER; note = 2'-O-methylguanosine-3'-phosphate
  modified_base 16: mod_base = OTHER; note = 2'-deoxy-2'-fluorouridine-3'-phosphate
  modified_base 17: mod_base = OTHER; note = 2'-O-methylcytidine-3'-phosphate
  modified_base 18: mod_base = OTHER; note = 2'-O-methylcytidine-3'-phosphate
  modified_base 19: mod_base = OTHER; note = 2'-O-methyluridine-3'-phosphate
  modified_base 20: mod_base = OTHER; note = 2'-O-methyluridine-3'-phosphate
  modified_base 21: mod_base = OTHER; note = 2'-O-methylcytidine-3'-phosphorothioate
  modified_base 22: mod_base = OTHER; note = 2'-O-methyluridine-3'-phosphorothioate
  modified_base 23: mod_base = OTHER; note = 2'-O-methylcytidine
tgtaaaatgtatttgtccttctc

SEQ ID NO: 1187 - RNA, 23 nt, synthetic construct
  source 1..23: mol_type = other RNA
  modified_base 1: mod_base = OTHER; note = 2'-O-methyluridine-3'-phosphorothioate 5'-(E)-Vinylphosphonate
  modified_base 2: mod_base = OTHER; note = 2'-deoxy-2'-fluorouridine-3'-phosphorothioate
  modified_base 3: mod_base = OTHER; note = 2'-O-methylguanosine-3'-phosphate
  modified_base 4: mod_base = OTHER; note = 2'-O-methyluridine-3'-phosphate
  modified_base 5: mod_base = OTHER; note = 2'-O-methyladenosine-3'-phosphate
  modified_base 6: mod_base = OTHER; note = 2'-deoxy-2'-fluoroadenosine-3'-phosphate
  modified_base 7: mod_base = OTHER; note = 2'-O-methyladenosine-3'-phosphate
  modified_base 8: mod_base = OTHER; note = 2'-O-methyladenosine-3'-phosphate
  modified_base 9: mod_base = OTHER; note = 2'-O-methyluridine-3'-phosphate
  modified_base 10: mod_base = OTHER; note = 2'-O-methylguanosine-3'-phosphate
  modified_base 11: mod_base = OTHER; note = 2'-O-methyluridine-3'-phosphate
  modified_base 12: mod_base = OTHER; note = 2'-O-methyladenosine-3'-phosphate
  modified_base 13: mod_base = OTHER; note = 2'-O-methyluridine-3'-phosphate
  modified_base 14: mod_base = OTHER; note = 2'-deoxy-2'-fluorouridine-3'-phosphate
  modified_base 15: mod_base = OTHER; note = 2'-O-methyluridine-3'-phosphate
  modified_base 16: mod_base = OTHER; note = 2'-deoxy-2'-fluoroguanosine-3'-phosphate
  modified_base 17: mod_base = OTHER; note = 2'-O-methyluridine-3'-phosphate
  modified_base 18: mod_base = OTHER; note = 2'-O-methylcytidine-3'-phosphate
  modified_base 19: mod_base = OTHER; note = 2'-O-methylcytidine-3'-phosphate
  modified_base 20: mod_base = OTHER; note = 2'-O-methyluridine-3'-phosphate
  modified_base 21: mod_base = OTHER; note = 2'-O-methyluridine-3'-phosphorothioate
  modified_base 22: mod_base = OTHER; note = 2'-O-methylcytidine-3'-phosphorothioate
  modified_base 23: mod_base = OTHER; note = 2'-O-methyluridine
ttgtaaaatgtatttgtccttct

SEQ ID NO: 1188 - RNA, 23 nt, synthetic construct
  source 1..23: mol_type = other RNA
  modified_base 1: mod_base = OTHER; note = 2'-O-methyluridine-3'-phosphorothioate 5'-(E)-Vinylphosphonate
  modified_base 2: mod_base = OTHER; note = 2'-deoxy-2'-fluorouridine-3'-phosphorothioate
  modified_base 3: mod_base = OTHER; note = 2'-O-methyluridine-3'-phosphate
  modified_base 4: mod_base = OTHER; note = 2'-O-methylguanosine-3'-phosphate
  modified_base 5: mod_base = OTHER; note = 2'-O-methyluridine-3'-phosphate
  modified_base 6: mod_base = OTHER; note = 2'-deoxy-2'-fluoroadenosine-3'-phosphate
  modified_base 7: mod_base = OTHER; note = 2'-O-methyladenosine-3'-phosphate
  modified_base 8: mod_base = OTHER; note = 2'-O-methyladenosine-3'-phosphate
  modified_base 9: mod_base = OTHER; note = 2'-O-methyladenosine-3'-phosphate
  modified_base 10: mod_base = OTHER; note = 2'-O-methyluridine-3'-phosphate
  modified_base 11: mod_base = OTHER; note = 2'-O-methylguanosine-3'-phosphate
  modified_base 12: mod_base = OTHER; note = 2'-O-methyluridine-3'-phosphate
  modified_base 13: mod_base = OTHER; note = 2'-O-methyladenosine-3'-phosphate
  modified_base 14: mod_base = OTHER; note = 2'-deoxy-2'-fluorouridine-3'-phosphate
  modified_base 15: mod_base = OTHER; note = 2'-O-methyluridine-3'-phosphate
  modified_base 16: mod_base = OTHER; note = 2'-deoxy-2'-fluorouridine-3'-phosphate
  modified_base 17: mod_base = OTHER; note = 2'-O-methylguanosine-3'-phosphate
  modified_base 18: mod_base = OTHER; note = 2'-O-methyluridine-3'-phosphate
  modified_base 19: mod_base = OTHER; note = 2'-O-methylcytidine-3'-phosphate
  modified_base 20: mod_base = OTHER; note = 2'-O-methylcytidine-3'-phosphate
  modified_base 21: mod_base = OTHER; note = 2'-O-methyluridine-3'-phosphorothioate
  modified_base 22: mod_base = OTHER; note = 2'-O-methyluridine-3'-phosphorothioate
  modified_base 23: mod_base = OTHER; note = 2'-O-methylcytidine
tttgtaaaatgtatttgtccttc

SEQ ID NO: 1189 - RNA, 23 nt, synthetic construct
  source 1..23: mol_type = other RNA
  modified_base 1: mod_base = OTHER; note = 2'-O-methyluridine-3'-phosphorothioate 5'-(E)-Vinylphosphonate
  modified_base 2: mod_base = OTHER; note = 2'-deoxy-2'-fluorocytidine-3'-phosphorothioate
  modified_base 3: mod_base = OTHER; note = 2'-O-methyluridine-3'-phosphate
  modified_base 4: mod_base = OTHER; note = 2'-O-methyluridine-3'-phosphate
  modified_base 5: mod_base = OTHER; note = 2'-O-methylguanosine-3'-phosphate
  modified_base 6: mod_base = OTHER; note = 2'-deoxy-2'-fluorouridine-3'-phosphate
  modified_base 7: mod_base = OTHER; note = 2'-O-methyladenosine-3'-phosphate
  modified_base 8: mod_base = OTHER; note = 2'-O-methyladenosine-3'-phosphate
  modified_base 9: mod_base = OTHER; note = 2'-O-methyladenosine-3'-phosphate
  modified_base 10: mod_base = OTHER; note = 2'-O-methyladenosine-3'-phosphate
  modified_base 11: mod_base = OTHER; note = 2'-O-methyluridine-3'-phosphate
  modified_base 12: mod_base = OTHER; note = 2'-O-methylguanosine-3'-phosphate
  modified_base 13: mod_base = OTHER; note = 2'-O-methyluridine-3'-phosphate
  modified_base 14: mod_base = OTHER; note = 2'-deoxy-2'-fluoroadenosine-3'-phosphate
  modified_base 15: mod_base = OTHER; note = 2'-O-methyluridine-3'-phosphate
  modified_base 16: mod_base = OTHER; note = 2'-deoxy-2'-fluorouridine-3'-phosphate
  modified_base 17: mod_base = OTHER; note = 2'-O-methyluridine-3'-phosphate
  modified_base 18: mod_base = OTHER; note = 2'-O-methylguanosine-3'-phosphate
  modified_base 19: mod_base = OTHER; note = 2'-O-methyluridine-3'-phosphate
  modified_base 20: mod_base = OTHER; note = 2'-O-methylcytidine-3'-phosphate
  modified_base 21: mod_base = OTHER; note = 2'-O-methylcytidine-3'-phosphorothioate
  modified_base 22: mod_base = OTHER; note = 2'-O-methyluridine-3'-phosphorothioate
  modified_base 23: mod_base = OTHER; note = 2'-O-methyluridine
tcttgtaaaatgtatttgtcctt

SEQ ID NO: 1190 - RNA, 23 nt, synthetic construct
  source 1..23: mol_type = other RNA
  modified_base 1: mod_base = OTHER; note = 2'-O-methyluridine-3'-phosphorothioate 5'-(E)-Vinylphosphonate
  modified_base 2: mod_base = OTHER; note = 2'-deoxy-2'-fluorocytidine-3'-phosphorothioate
  modified_base 3: mod_base = OTHER; note = 2'-O-methylcytidine-3'-phosphate
  modified_base 4: mod_base = OTHER; note = 2'-O-methyluridine-3'-phosphate
  modified_base 5: mod_base = OTHER; note = 2'-O-methyluridine-3'-phosphate
  modified_base 6: mod_base = OTHER; note = 2'-deoxy-2'-fluoroguanosine-3'-phosphate
  modified_base 7: mod_base = OTHER; note = 2'-O-methyluridine-3'-phosphate
  modified_base 8: mod_base = OTHER; note = 2'-O-methyladenosine-3'-phosphate
  modified_base 9: mod_base = OTHER; note = 2'-O-methyladenosine-3'-phosphate
  modified_base 10: mod_base = OTHER; note = 2'-O-methyladenosine-3'-phosphate
  modified_base 11: mod_base = OTHER; note = 2'-O-methyladenosine-3'-phosphate
  modified_base 12: mod_base = OTHER; note = 2'-O-methyluridine-3'-phosphate
  modified_base 13: mod_base = OTHER; note = 2'-O-methylguanosine-3'-phosphate
  modified_base 14: mod_base = OTHER; note = 2'-deoxy-2'-fluorouridine-3'-phosphate
  modified_base 15: mod_base = OTHER; note = 2'-O-methyladenosine-3'-phosphate
  modified_base 16: mod_base = OTHER; note = 2'-deoxy-2'-fluorouridine-3'-phosphate
  modified_base 17: mod_base = OTHER; note = 2'-O-methyluridine-3'-phosphate
  modified_base 18: mod_base = OTHER; note = 2'-O-methyluridine-3'-phosphate
  modified_base 19: mod_base = OTHER; note = 2'-O-methylguanosine-3'-phosphate
  modified_base 20: mod_base = OTHER; note = 2'-O-methyluridine-3'-phosphate
  modified_base 21: mod_base = OTHER; note = 2'-O-methylcytidine-3'-phosphorothioate
  modified_base 22: mod_base = OTHER; note = 2'-O-methylcytidine-3'-phosphorothioate
  modified_base 23: mod_base = OTHER; note = 2'-O-methyluridine
tccttgtaaaatgtatttgtcct

SEQ ID NO: 1191 - RNA, 23 nt, synthetic construct
  source 1..23: mol_type = other RNA
  modified_base 1: mod_base = OTHER; note = 2'-O-methyluridine-3'-phosphorothioate 5'-(E)-Vinylphosphonate
  modified_base 2: mod_base = OTHER; note = 2'-deoxy-2'-fluorocytidine-3'-phosphorothioate
  modified_base 3: mod_base = OTHER; note = 2'-O-methylcytidine-3'-phosphate
  modified_base 4: mod_base = OTHER; note = 2'-O-methyluridine-3'-phosphate
  modified_base 5: mod_base = OTHER; note = 2'-O-methyluridine-3'-phosphate
  modified_base 6: mod_base = OTHER; note = 2'-deoxy-2'-fluoroguanosine-3'-phosphate
  modified_base 7: mod_base = OTHER; note = 2'-O-methyladenosine-3'-phosphate
  modified_base 8: mod_base = OTHER; note = 2'-O-methyladenosine-3'-phosphate
  modified_base 9: mod_base = OTHER; note = 2'-O-methyladenosine-3'-phosphate
  modified_base 10: mod_base = OTHER; note = 2'-O-methyladenosine-3'-phosphate
  modified_base 11: mod_base = OTHER; note = 2'-O-methyladenosine-3'-phosphate
  modified_base 12: mod_base = OTHER; note = 2'-O-methyluridine-3'-phosphate
  modified_base 13: mod_base = OTHER; note = 2'-O-methylguanosine-3'-phosphate
  modified_base 14: mod_base = OTHER; note = 2'-deoxy-2'-fluorouridine-3'-phosphate
  modified_base 15: mod_base = OTHER; note = 2'-O-methyladenosine-3'-phosphate
  modified_base 16: mod_base = OTHER; note = 2'-deoxy-2'-fluorouridine-3'-phosphate
  modified_base 17: mod_base = OTHER; note = 2'-O-methyluridine-3'-phosphate
  modified_base 18: mod_base = OTHER; note = 2'-O-methyluridine-3'-phosphate
  modified_base 19: mod_base = OTHER; note = 2'-O-methylguanosine-3'-phosphate
  modified_base 20: mod_base = OTHER; note = 2'-O-methyluridine-3'-phosphate
  modified_base 21: mod_base = OTHER; note = 2'-O-methylcytidine-3'-phosphorothioate
  modified_base 22: mod_base = OTHER; note = 2'-O-methylcytidine-3'-phosphorothioate
  modified_base 23: mod_base = OTHER; note = 2'-O-methyluridine
tccttgaaaaatgtatttgtcct

SEQ ID NO: 1192 - RNA, 23 nt, synthetic construct
  source 1..23: mol_type = other RNA
  modified_base 1: mod_base = OTHER; note = 2'-O-methyluridine-3'-phosphorothioate 5'-(E)-Vinylphosphonate
  modified_base 2: mod_base = OTHER; note = 2'-deoxy-2'-fluoroadenosine-3'-phosphorothioate
  modified_base 3: mod_base = OTHER; note = 2'-O-methyladenosine-3'-phosphate
  modified_base 4: mod_base = OTHER; note = 2'-O-methylcytidine-3'-phosphate
  modified_base 5: mod_base = OTHER; note = 2'-O-methyladenosine-3'-phosphate
  modified_base 6: mod_base = OTHER; note = 2'-deoxy-2'-fluorocytidine-3'-phosphate
  modified_base 7: mod_base = OTHER; note = 2'-O-methylguanosine-3'-phosphate
  modified_base 8: mod_base = OTHER; note = 2'-O-methyladenosine-3'-phosphate
  modified_base 9: mod_base = OTHER; note = 2'-O-methyladenosine-3'-phosphate
  modified_base 10: mod_base = OTHER; note = 2'-O-methylcytidine-3'-phosphate
  modified_base 11: mod_base = OTHER; note = 2'-O-methyladenosine-3'-phosphate
  modified_base 12: mod_base = OTHER; note = 2'-O-methyluridine-3'-phosphate
  modified_base 13: mod_base = OTHER; note = 2'-O-methyladenosine-3'-phosphate
  modified_base 14: mod_base = OTHER; note = 2'-deoxy-2'-fluoroguanosine-3'-phosphate
  modified_base 15: mod_base = OTHER; note = 2'-O-methyladenosine-3'-phosphate
  modified_base 16: mod_base = OTHER; note = 2'-deoxy-2'-fluorocytidine-3'-phosphate
  modified_base 17: mod_base = OTHER; note = 2'-O-methyladenosine-3'-phosphate
  modified_base 18: mod_base = OTHER; note = 2'-O-methylcytidine-3'-phosphate
  modified_base 19: mod_base = OTHER; note = 2'-O-methylcytidine-3'-phosphate
  modified_base 20: mod_base = OTHER; note = 2'-O-methyladenosine-3'-phosphate
  modified_base 21: mod_base = OTHER; note = 2'-O-methylguanosine-3'-phosphorothioate
  modified_base 22: mod_base = OTHER; note = 2'-O-methylguanosine-3'-phosphorothioate
  modified_base 23: mod_base = OTHER; note = 2'-O-methylcytidine
taacacgaacatagacaccaggc

SEQ ID NO: 1193 - RNA, 23 nt, synthetic construct
  source 1..23: mol_type = other RNA
  modified_base 1: mod_base = OTHER; note = 2'-O-methyluridine-3'-phosphorothioate 5'-(E)-Vinylphosphonate
  modified_base 2: mod_base = OTHER; note = 2'-deoxy-2'-fluoroadenosine-3'-phosphorothioate
  modified_base 3: mod_base = OTHER; note = 2'-O-methyladenosine-3'-phosphate
  modified_base 4: mod_base = OTHER; note = 2'-O-methyladenosine-3'-phosphate
  modified_base 5: mod_base = OTHER; note = 2'-O-methylcytidine-3'-phosphate
  modified_base 6: mod_base = OTHER; note = 2'-deoxy-2'-fluoroadenosine-3'-phosphate
  modified_base 7: mod_base = OTHER; note = 2'-O-methylcytidine-3'-phosphate
  modified_base 8: mod_base = OTHER; note = 2'-O-methylguanosine-3'-phosphate
  modified_base 9: mod_base = OTHER; note = 2'-O-methyladenosine-3'-phosphate
  modified_base 10: mod_base = OTHER; note = 2'-O-methyladenosine-3'-phosphate
  modified_base 11: mod_base = OTHER; note = 2'-O-methylcytidine-3'-phosphate
  modified_base 12: mod_base = OTHER; note = 2'-O-methyladenosine-3'-phosphate
  modified_base 13: mod_base = OTHER; note = 2'-O-methyluridine-3'-phosphate
  modified_base 14: mod_base = OTHER; note = 2'-deoxy-2'-fluoroadenosine-3'-phosphate
  modified_base 15: mod_base = OTHER; note = 2'-O-methylguanosine-3'-phosphate
  modified_base 16: mod_base = OTHER; note = 2'-deoxy-2'-fluoroadenosine-3'-phosphate
  modified_base 17: mod_base = OTHER; note = 2'-O-methylcytidine-3'-phosphate
  modified_base 18: mod_base = OTHER; note = 2'-O-methyladenosine-3'-phosphate
  modified_base 19: mod_base = OTHER; note = 2'-O-methylcytidine-3'-phosphate
  modified_base 20: mod_base = OTHER; note = 2'-O-methylcytidine-3'-phosphate
  modified_base 21: mod_base = OTHER; note = 2'-O-methyladenosine-3'-phosphorothioate
  modified_base 22: mod_base = OTHER; note = 2'-O-methylguanosine-3'-phosphorothioate
  modified_base 23: mod_base = OTHER; note = 2'-O-methylguanosine
taaacacgaacatagacaccagg

SEQ ID NO: 1194 - RNA, 23 nt, synthetic construct
  source 1..23: mol_type = other RNA
  modified_base 1: mod_base = OTHER; note = 2'-O-methyluridine-3'-phosphorothioate 5'-(E)-Vinylphosphonate
  modified_base 2: mod_base = OTHER; note = 2'-deoxy-2'-fluoroguanosine-3'-phosphorothioate
  modified_base 3: mod_base = OTHER; note = 2'-O-methyladenosine-3'-phosphate
  modified_base 4: mod_base = OTHER; note = 2'-O-methyladenosine-3'-phosphate
  modified_base 5: mod_base = OTHER; note = 2'-O-methyladenosine-3'-phosphate
  modified_base 6: mod_base = OTHER; note = 2'-deoxy-2'-fluorocytidine-3'-phosphate
  modified_base 7: mod_base = OTHER; note = 2'-O-methyladenosine-3'-phosphate
  modified_base 8: mod_base = OTHER; note = 2'-O-methylcytidine-3'-phosphate
  modified_base 9: mod_base = OTHER; note = 2'-O-methylguanosine-3'-phosphate
  modified_base 10: mod_base = OTHER; note = 2'-O-methyladenosine-3'-phosphate
  modified_base 11: mod_base = OTHER; note = 2'-O-methyladenosine-3'-phosphate
  modified_base 12: mod_base = OTHER; note = 2'-O-methylcytidine-3'-phosphate
  modified_base 13: mod_base = OTHER; note = 2'-O-methyladenosine-3'-phosphate
  modified_base 14: mod_base = OTHER; note = 2'-deoxy-2'-fluorouridine-3'-phosphate
  modified_base 15: mod_base = OTHER; note = 2'-O-methyladenosine-3'-phosphate
  modified_base 16: mod_base = OTHER; note = 2'-deoxy-2'-fluoroguanosine-3'-phosphate
  modified_base 17: mod_base = OTHER; note = 2'-O-methyladenosine-3'-phosphate
  modified_base 18: mod_base = OTHER; note = 2'-O-methylcytidine-3'-phosphate
  modified_base 19: mod_base = OTHER; note = 2'-O-methyladenosine-3'-phosphate
  modified_base 20: mod_base = OTHER; note = 2'-O-methylcytidine-3'-phosphate
  modified_base 21: mod_base = OTHER; note = 2'-O-methylcytidine-3'-phosphorothioate
  modified_base 22: mod_base = OTHER; note = 2'-O-methyladenosine-3'-phosphorothioate
  modified_base 23: mod_base = OTHER; note = 2'-O-methylguanosine
tgaaacacgaacatagacaccag

SEQ ID NO: 1195 - RNA, 23 nt, synthetic construct
  source 1..23: mol_type = other RNA
  modified_base 1: mod_base = OTHER; note = 2'-O-methyluridine-3'-phosphorothioate 5'-(E)-Vinylphosphonate
  modified_base 2: mod_base = OTHER; note = 2'-deoxy-2'-fluoroguanosine-3'-phosphorothioate
  modified_base 3: mod_base = OTHER; note = 2'-O-methyladenosine-3'-phosphate
  modified_base 4: mod_base = OTHER; note = 2'-O-methyladenosine-3'-phosphate
  modified_base 5: mod_base = OTHER; note = 2'-O-methyladenosine-3'-phosphate
  modified_base 6: mod_base = OTHER; note = 2'-deoxy-2'-fluoroadenosine-3'-phosphate
  modified_base 7: mod_base = OTHER; note = 2'-O-methyladenosine-3'-phosphate
  modified_base 8: mod_base = OTHER; note = 2'-O-methylcytidine-3'-phosphate
  modified_base 9: mod_base = OTHER; note = 2'-O-methylguanosine-3'-phosphate
  modified_base 10: mod_base = OTHER; note = 2'-O-methyladenosine-3'-phosphate
  modified_base 11: mod_base = OTHER; note = 2'-O-methyladenosine-3'-phosphate
  modified_base 12: mod_base = OTHER; note = 2'-O-methylcytidine-3'-phosphate
  modified_base 13: mod_base = OTHER; note = 2'-O-methyladenosine-3'-phosphate
  modified_base 14: mod_base = OTHER; note = 2'-deoxy-2'-fluorouridine-3'-phosphate
  modified_base 15: mod_base = OTHER; note = 2'-O-methyladenosine-3'-phosphate
  modified_base 16: mod_base = OTHER; note = 2'-deoxy-2'-fluoroguanosine-3'-phosphate
  modified_base 17: mod_base = OTHER; note = 2'-O-methyladenosine-3'-phosphate
  modified_base 18: mod_base = OTHER; note = 2'-O-methylcytidine-3'-phosphate
  modified_base 19: mod_base = OTHER; note = 2'-O-methyladenosine-3'-phosphate
  modified_base 20: mod_base = OTHER; note = 2'-O-methylcytidine-3'-phosphate
  modified_base 21: mod_base = OTHER; note = 2'-O-methylcytidine-3'-phosphorothioate
  modified_base 22: mod_base = OTHER; note = 2'-O-methyladenosine-3'-phosphorothioate
  modified_base 23: mod_base = OTHER; note = 2'-O-methylguanosine
tgaaaaacgaacatagacaccag

SEQ ID NO: 1196 - RNA, 23 nt, synthetic construct
  source 1..23: mol_type = other RNA
  modified_base 1: mod_base = OTHER; note = 2'-O-methyluridine-3'-phosphorothioate 5'-(E)-Vinylphosphonate
  modified_base 2: mod_base = OTHER; note = 2'-deoxy-2'-fluorouridine-3'-phosphorothioate
  modified_base 3: mod_base = OTHER; note = 2'-O-methylguanosine-3'-phosphate
  modified_base 4: mod_base = OTHER; note = 2'-O-methyladenosine-3'-phosphate
  modified_base 5: mod_base = OTHER; note = 2'-O-methyladenosine-3'-phosphate
  modified_base 6: mod_base = OTHER; note = 2'-deoxy-2'-fluoroadenosine-3'-phosphate
  modified_base 7: mod_base = OTHER; note = 2'-O-methylcytidine-3'-phosphate
  modified_base 8: mod_base = OTHER; note = 2'-O-methyladenosine-3'-phosphate
  modified_base 9: mod_base = OTHER; note = 2'-O-methylcytidine-3'-phosphate
  modified_base 10: mod_base = OTHER; note = 2'-O-methylguanosine-3'-phosphate
  modified_base 11: mod_base = OTHER; note = 2'-O-methyladenosine-3'-phosphate
  modified_base 12: mod_base = OTHER; note = 2'-O-methyladenosine-3'-phosphate
  modified_base 13: mod_base = OTHER; note = 2'-O-methylcytidine-3'-phosphate
  modified_base 14: mod_base = OTHER; note = 2'-deoxy-2'-fluoroadenosine-3'-phosphate
  modified_base 15: mod_base = OTHER; note = 2'-O-methyluridine-3'-phosphate
  modified_base 16: mod_base = OTHER; note = 2'-deoxy-2'-fluoroadenosine-3'-phosphate
  modified_base 17: mod_base = OTHER; note = 2'-O-methylguanosine-3'-phosphate
  modified_base 18: mod_base = OTHER; note = 2'-O-methyladenosine-3'-phosphate
  modified_base 19: mod_base = OTHER; note = 2'-O-methylcytidine-3'-phosphate
  modified_base 20: mod_base = OTHER; note = 2'-O-methyladenosine-3'-phosphate
  modified_base 21: mod_base = OTHER; note = 2'-O-methylcytidine-3'-phosphorothioate
  modified_base 22: mod_base = OTHER; note = 2'-O-methylcytidine-3'-phosphorothioate
  modified_base 23: mod_base = OTHER; note = 2'-O-methyladenosine
ttgaaacacgaacatagacacca

SEQ ID NO: 1197 - RNA, 23 nt, synthetic construct
  source 1..23: mol_type = other RNA
  modified_base 1: mod_base = OTHER; note = 2'-O-methyluridine-3'-phosphorothioate 5'-(E)-Vinylphosphonate
  modified_base 2: mod_base = OTHER; note = 2'-deoxy-2'-fluorouridine-3'-phosphorothioate
  modified_base 3: mod_base = OTHER; note = 2'-O-methyluridine-3'-phosphate
  modified_base 4: mod_base = OTHER; note = 2'-O-methylguanosine-3'-phosphate
  modified_base 5: mod_base = OTHER; note = 2'-O-methyladenosine-3'-phosphate
  modified_base 6: mod_base = OTHER; note = 2'-deoxy-2'-fluoroadenosine-3'-phosphate
  modified_base 7: mod_base = OTHER; note = 2'-O-methyladenosine-3'-phosphate
  modified_base 8: mod_base = OTHER; note = 2'-O-methylcytidine-3'-phosphate
  modified_base 9: mod_base = OTHER; note = 2'-O-methyladenosine-3'-phosphate
  modified_base 10: mod_base = OTHER; note = 2'-O-methylcytidine-3'-phosphate
  modified_base 11: mod_base = OTHER; note = 2'-O-methylguanosine-3'-phosphate
  modified_base 12: mod_base = OTHER; note = 2'-O-methyladenosine-3'-phosphate
  modified_base 13: mod_base = OTHER; note = 2'-O-methyladenosine-3'-phosphate
  modified_base 14: mod_base = OTHER; note = 2'-deoxy-2'-fluorocytidine-3'-phosphate
  modified_base 15: mod_base = OTHER; note = 2'-O-methyladenosine-3'-phosphate
  modified_base 16: mod_base = OTHER; note = 2'-deoxy-2'-fluorouridine-3'-phosphate
  modified_base 17: mod_base = OTHER; note = 2'-O-methyladenosine-3'-phosphate
  modified_base 18: mod_base = OTHER; note = 2'-O-methylguanosine-3'-phosphate
  modified_base 19: mod_base = OTHER; note = 2'-O-methyladenosine-3'-phosphate
  modified_base 20: mod_base = OTHER; note = 2'-O-methylcytidine-3'-phosphate
  modified_base 21: mod_base = OTHER; note = 2'-O-methyladenosine-3'-phosphorothioate
  modified_base 22: mod_base = OTHER; note = 2'-O-methylcytidine-3'-phosphorothioate
  modified_base 23: mod_base = OTHER; note = 2'-O-methylcytidine
tttgaaacacgaacatagacacc

SEQ ID NO: 1198 - RNA, 23 nt, synthetic construct
  source 1..23: mol_type = other RNA
  modified_base 1: mod_base = OTHER; note = 2'-O-methyluridine-3'-phosphorothioate 5'-(E)-Vinylphosphonate
  modified_base 2: mod_base = OTHER; note = 2'-deoxy-2'-fluorocytidine-3'-phosphorothioate
  modified_base 3: mod_base = OTHER; note = 2'-O-methyluridine-3'-phosphate
  modified_base 4: mod_base = OTHER; note = 2'-O-methyluridine-3'-phosphate
  modified_base 5: mod_base = OTHER; note = 2'-O-methylguanosine-3'-phosphate
  modified_base 6: mod_base = OTHER; note = 2'-deoxy-2'-fluoroadenosine-3'-phosphate
  modified_base 7: mod_base = OTHER; note = 2'-O-methyladenosine-3'-phosphate
  modified_base 8: mod_base = OTHER; note = 2'-O-methyladenosine-3'-phosphate
  modified_base 9: mod_base = OTHER; note = 2'-O-methylcytidine-3'-phosphate
  modified_base 10: mod_base = OTHER; note = 2'-O-methyladenosine-3'-phosphate
  modified_base 11: mod_base = OTHER; note = 2'-O-methylcytidine-3'-phosphate
  modified_base 12: mod_base = OTHER; note = 2'-O-methylguanosine-3'-phosphate
  modified_base 13: mod_base = OTHER; note = 2'-O-methyladenosine-3'-phosphate
  modified_base 14: mod_base = OTHER; note = 2'-deoxy-2'-fluoroadenosine-3'-phosphate
  modified_base 15: mod_base = OTHER; note = 2'-O-methylcytidine-3'-phosphate
  modified_base 16: mod_base = OTHER; note = 2'-deoxy-2'-fluoroadenosine-3'-phosphate
  modified_base 17: mod_base = OTHER; note = 2'-O-methyluridine-3'-phosphate
  modified_base 18: mod_base = OTHER; note = 2'-O-methyladenosine-3'-phosphate
  modified_base 19: mod_base = OTHER; note = 2'-O-methylguanosine-3'-phosphate
  modified_base 20: mod_base = OTHER; note = 2'-O-methyladenosine-3'-phosphate
  modified_base 21: mod_base = OTHER; note = 2'-O-methylcytidine-3'-phosphorothioate
  modified_base 22: mod_base = OTHER; note = 2'-O-methyladenosine-3'-phosphorothioate
  modified_base 23: mod_base = OTHER; note = 2'-O-methylcytidine
tcttgaaacacgaacatagacac

SEQ ID NO: 1199 - RNA, 23 nt, synthetic construct
  source 1..23: mol_type = other RNA
  modified_base 1: mod_base = OTHER; note = 2'-O-methyluridine-3'-phosphorothioate 5'-(E)-Vinylphosphonate
  modified_base 2: mod_base = OTHER; note = 2'-deoxy-2'-fluorocytidine-3'-phosphorothioate
  modified_base 3: mod_base = OTHER; note = 2'-O-methylcytidine-3'-phosphate
  modified_base 4: mod_base = OTHER; note = 2'-O-methyluridine-3'-phosphate
  modified_base 5: mod_base = OTHER; note = 2'-O-methyluridine-3'-phosphate
  modified_base 6: mod_base = OTHER; note = 2'-deoxy-2'-fluoroguanosine-3'-phosphate
  modified_base 7: mod_base = OTHER; note = 2'-O-methyladenosine-3'-phosphate
  modified_base 8: mod_base = OTHER; note = 2'-O-methyladenosine-3'-phosphate
  modified_base 9: mod_base = OTHER; note = 2'-O-methyladenosine-3'-phosphate
  modified_base 10: mod_base = OTHER; note = 2'-O-methylcytidine-3'-phosphate
  modified_base 11: mod_base = OTHER; note = 2'-O-methyladenosine-3'-phosphate
  modified_base 12: mod_base = OTHER; note = 2'-O-methylcytidine-3'-phosphate
  modified_base 13: mod_base = OTHER; note = 2'-O-methylguanosine-3'-phosphate
  modified_base 14: mod_base = OTHER; note = 2'-deoxy-2'-fluoroadenosine-3'-phosphate
  modified_base 15: mod_base = OTHER; note = 2'-O-methyladenosine-3'-phosphate
  modified_base 16: mod_base = OTHER; note = 2'-deoxy-2'-fluorocytidine-3'-phosphate
  modified_base 17: mod_base = OTHER; note = 2'-O-methyladenosine-3'-phosphate
  modified_base 18: mod_base = OTHER; note = 2'-O-methyluridine-3'-phosphate
  modified_base 19: mod_base = OTHER; note = 2'-O-methyladenosine-3'-phosphate
  modified_base 20: mod_base = OTHER; note = 2'-O-methylguanosine-3'-phosphate
  modified_base 21: mod_base = OTHER; note = 2'-O-methyladenosine-3'-phosphorothioate
  modified_base 22: mod_base = OTHER; note = 2'-O-methylcytidine-3'-phosphorothioate
  modified_base 23: mod_base = OTHER; note = 2'-O-methyladenosine
tccttgaaacacgaacatagaca

SEQ ID NO: 1200 - RNA, 23 nt, synthetic construct
  source 1..23: mol_type = other RNA
  modified_base 1: mod_base = OTHER; note = 2'-O-methyluridine-3'-phosphorothioate 5'-(E)-Vinylphosphonate
  modified_base 2: mod_base = OTHER; note = 2'-deoxy-2'-fluoroadenosine-3'-phosphorothioate
  modified_base 3: mod_base = OTHER; note = 2'-O-methylcytidine-3'-phosphate
  modified_base 4: mod_base = OTHER; note = 2'-O-methylcytidine-3'-phosphate
  modified_base 5: mod_base = OTHER; note = 2'-O-methyluridine-3'-phosphate
  modified_base 6: mod_base = OTHER; note = 2'-deoxy-2'-fluorouridine-3'-phosphate
  modified_base 7: mod_base = OTHER; note = 2'-O-methylguanosine-3'-phosphate
  modified_base 8: mod_base = OTHER; note = 2'-O-methyladenosine-3'-phosphate
  modified_base 9: mod_base = OTHER; note = 2'-O-methyladenosine-3'-phosphate
  modified_base 10: mod_base = OTHER; note = 2'-O-methyladenosine-3'-phosphate
  modified_base 11: mod_base = OTHER; note = 2'-O-methylcytidine-3'-phosphate
  modified_base 12: mod_base = OTHER; note = 2'-O-methyladenosine-3'-phosphate
  modified_base 13: mod_base = OTHER; note = 2'-O-methylcytidine-3'-phosphate
  modified_base 14: mod_base = OTHER; note = 2'-deoxy-2'-fluoroguanosine-3'-phosphate
  modified_base 15: mod_base = OTHER; note = 2'-O-methyladenosine-3'-phosphate
  modified_base 16: mod_base = OTHER; note = 2'-deoxy-2'-fluoroadenosine-3'-phosphate
  modified_base 17: mod_base = OTHER; note = 2'-O-methylcytidine-3'-phosphate
  modified_base 18: mod_base = OTHER; note = 2'-O-methyladenosine-3'-phosphate
  modified_base 19: mod_base = OTHER; note = 2'-O-methyluridine-3'-phosphate
  modified_base 20: mod_base = OTHER; note = 2'-O-methyladenosine-3'-phosphate
  modified_base 21: mod_base = OTHER; note = 2'-O-methylguanosine-3'-phosphorothioate
  modified_base 22: mod_base = OTHER; note = 2'-O-methyladenosine-3'-phosphorothioate
  modified_base 23: mod_base = OTHER; note = 2'-O-methylcytidine
taccttgaaacacgaacatagac

SEQ ID NO: 1201 - RNA, 23 nt, synthetic construct
  source 1..23: mol_type = other RNA
  modified_base 1: mod_base = OTHER; note = 2'-O-methyluridine-3'-phosphorothioate 5'-(E)-Vinylphosphonate
  modified_base 2: mod_base = OTHER; note = 2'-deoxy-2'-fluoroadenosine-3'-phosphorothioate
  modified_base 3: mod_base = OTHER; note = 2'-O-methyladenosine-3'-phosphate
  modified_base 4: mod_base = OTHER; note = 2'-O-methylcytidine-3'-phosphate
  modified_base 5: mod_base = OTHER; note = 2'-O-methylcytidine-3'-phosphate
  modified_base 6: mod_base = OTHER; note = 2'-deoxy-2'-fluorouridine-3'-phosphate
  modified_base 7: mod_base = OTHER; note = 2'-O-methyluridine-3'-phosphate
  modified_base 8: mod_base = OTHER; note = 2'-O-methylguanosine-3'-phosphate
  modified_base 9: mod_base = OTHER; note = 2'-O-methyladenosine-3'-phosphate
  modified_base 10: mod_base = OTHER; note = 2'-O-methyladenosine-3'-phosphate
  modified_base 11: mod_base = OTHER; note = 2'-O-methyladenosine-3'-phosphate
  modified_base 12: mod_base = OTHER; note = 2'-O-methylcytidine-3'-phosphate
  modified_base 13: mod_base = OTHER; note = 2'-O-methyladenosine-3'-phosphate
  modified_base 14: mod_base = OTHER; note = 2'-deoxy-2'-fluorocytidine-3'-phosphate
  modified_base 15: mod_base = OTHER; note = 2'-O-methylguanosine-3'-phosphate
  modified_base 16: mod_base = OTHER; note = 2'-deoxy-2'-fluoroadenosine-3'-phosphate
  modified_base 17: mod_base = OTHER; note = 2'-O-methyladenosine-3'-phosphate
  modified_base 18: mod_base = OTHER; note = 2'-O-methylcytidine-3'-phosphate
  modified_base 19: mod_base = OTHER; note = 2'-O-methyladenosine-3'-phosphate
  modified_base 20: mod_base = OTHER; note = 2'-O-methyluridine-3'-phosphate
  modified_base 21: mod_base = OTHER; note = 2'-O-methyladenosine-3'-phosphorothioate
  modified_base 22: mod_base = OTHER; note = 2'-O-methylguanosine-3'-phosphorothioate
  modified_base 23: mod_base = OTHER; note = 2'-O-methyladenosine
taaccttgaaacacgaacataga

SEQ ID NO: 1202 - RNA, 23 nt, synthetic construct
  source 1..23: mol_type = other RNA
  modified_base 1: mod_base = OTHER; note = 2'-O-methyluridine-3'-phosphorothioate 5'-(E)-Vinylphosphonate
  modified_base 2: mod_base = OTHER; note = 2'-deoxy-2'-fluoroadenosine-3'-phosphorothioate
  modified_base 3: mod_base = OTHER; note = 2'-O-methyladenosine-3'-phosphate
  modified_base 4: mod_base = OTHER; note = 2'-O-methyladenosine-3'-phosphate
  modified_base 5: mod_base = OTHER; note = 2'-O-methylcytidine-3'-phosphate
  modified_base 6: mod_base = OTHER; note = 2'-deoxy-2'-fluorocytidine-3'-phosphate
  modified_base 7: mod_base = OTHER; note = 2'-O-methyluridine-3'-phosphate
  modified_base 8: mod_base = OTHER; note = 2'-O-methyluridine-3'-phosphate
  modified_base 9: mod_base = OTHER; note = 2'-O-methylguanosine-3'-phosphate
  modified_base 10: mod_base = OTHER; note = 2'-O-methyladenosine-3'-phosphate
  modified_base 11: mod_base = OTHER; note = 2'-O-methyladenosine-3'-phosphate
  modified_base 12: mod_base = OTHER; note = 2'-O-methyladenosine-3'-phosphate
  modified_base 13: mod_base = OTHER; note = 2'-O-methylcytidine-3'-phosphate
  modified_base 14: mod_base = OTHER; note = 2'-deoxy-2'-fluoroadenosine-3'-phosphate
  modified_base 15: mod_base = OTHER; note = 2'-O-methylcytidine-3'-phosphate
  modified_base 16: mod_base = OTHER; note = 2'-deoxy-2'-fluoroguanosine-3'-phosphate
  modified_base 17: mod_base = OTHER; note = 2'-O-methyladenosine-3'-phosphate
  modified_base 18: mod_base = OTHER; note = 2'-O-methyladenosine-3'-phosphate
  modified_base 19: mod_base = OTHER; note = 2'-O-methylcytidine-3'-phosphate
  modified_base 20: mod_base = OTHER; note = 2'-O-methyladenosine-3'-phosphate
  modified_base 21: mod_base = OTHER; note = 2'-O-methyluridine-3'-phosphorothioate
  modified_base 22: mod_base = OTHER; note = 2'-O-methyladenosine-3'-phosphorothioate
  modified_base 23: mod_base = OTHER; note = 2'-O-methylguanosine
taaaccttgaaacacgaacatag

SEQ ID NO: 1203 - RNA, 23 nt, synthetic construct
  source 1..23: mol_type = other RNA
  modified_base 1: mod_base = OTHER; note = 2'-O-methyluridine-3'-phosphorothioate 5'-(E)-Vinylphosphonate
  modified_base 2: mod_base = OTHER; note = 2'-deoxy-2'-fluorocytidine-3'-phosphorothioate
  modified_base 3: mod_base = OTHER; note = 2'-O-methyladenosine-3'-phosphate
  modified_base 4: mod_base = OTHER; note = 2'-O-methyladenosine-3'-phosphate
  modified_base 5: mod_base = OTHER; note = 2'-O-methyladenosine-3'-phosphate
  modified_base 6: mod_base = OTHER; note = 2'-deoxy-2'-fluorocytidine-3'-phosphate
  modified_base 7: mod_base = OTHER; note = 2'-O-methylcytidine-3'-phosphate
  modified_base 8: mod_base = OTHER; note = 2'-O-methyluridine-3'-phosphate
  modified_base 9: mod_base = OTHER; note = 2'-O-methyluridine-3'-phosphate
  modified_base 10: mod_base = OTHER; note = 2'-O-methylguanosine-3'-phosphate
  modified_base 11: mod_base = OTHER; note = 2'-O-methyladenosine-3'-phosphate
  modified_base 12: mod_base = OTHER; note = 2'-O-methyladenosine-3'-phosphate
  modified_base 13: mod_base = OTHER; note = 2'-O-methyladenosine-3'-phosphate
  modified_base 14: mod_base = OTHER; note = 2'-deoxy-2'-fluorocytidine-3'-phosphate
  modified_base 15: mod_base = OTHER; note = 2'-O-methyladenosine-3'-phosphate
  modified_base 16: mod_base = OTHER; note = 2'-deoxy-2'-fluorocytidine-3'-phosphate
  modified_base 17: mod_base = OTHER; note = 2'-O-methylguanosine-3'-phosphate
  modified_base 18: mod_base = OTHER; note = 2'-O-methyladenosine-3'-phosphate
  modified_base 19: mod_base = OTHER; note = 2'-O-methyladenosine-3'-phosphate
  modified_base 20: mod_base = OTHER; note = 2'-O-methylcytidine-3'-phosphate
  modified_base 21: mod_base = OTHER; note = 2'-O-methyladenosine-3'-phosphorothioate
  modified_base 22: mod_base = OTHER; note = 2'-O-methyluridine-3'-phosphorothioate
  modified_base 23: mod_base = OTHER; note = 2'-O-methyladenosine
tcaaaccttgaaacacgaacata

SEQ ID NO: 1204 - RNA, 23 nt, synthetic construct
  source 1..23: mol_type = other RNA
  modified_base 1: mod_base = OTHER; note = 2'-O-methyluridine-3'-phosphorothioate 5'-(E)-Vinylphosphonate
  modified_base 2: mod_base = OTHER; note = 2'-deoxy-2'-fluoroadenosine-3'-phosphorothioate
  modified_base 3: mod_base = OTHER; note = 2'-O-methylcytidine-3'-phosphate
  modified_base 4: mod_base = OTHER; note = 2'-O-methyladenosine-3'-phosphate
  modified_base 5: mod_base = OTHER; note = 2'-O-methyladenosine-3'-phosphate
  modified_base 6: mod_base = OTHER; note = 2'-deoxy-2'-fluoroadenosine-3'-phosphate
  modified_base 7: mod_base = OTHER; note = 2'-O-methylcytidine-3'-phosphate
  modified_base 8: mod_base = OTHER; note = 2'-O-methylcytidine-3'-phosphate
  modified_base 9: mod_base = OTHER; note = 2'-O-methyluridine-3'-phosphate
  modified_base 10: mod_base = OTHER; note = 2'-O-methyluridine-3'-phosphate
  modified_base 11: mod_base = OTHER; note = 2'-O-methylguanosine-3'-phosphate
  modified_base 12: mod_base = OTHER; note = 2'-O-methyladenosine-3'-phosphate
  modified_base 13: mod_base = OTHER; note = 2'-O-methyladenosine-3'-phosphate
  modified_base 14: mod_base = OTHER; note = 2'-deoxy-2'-fluoroadenosine-3'-phosphate
  modified_base 15: mod_base = OTHER; note = 2'-O-methylcytidine-3'-phosphate
  modified_base 16: mod_base = OTHER; note = 2'-deoxy-2'-fluoroadenosine-3'-phosphate
  modified_base 17: mod_base = OTHER; note = 2'-O-methylcytidine-3'-phosphate
  modified_base 18: mod_base = OTHER; note = 2'-O-methylguanosine-3'-phosphate
  modified_base 19: mod_base = OTHER; note = 2'-O-methyladenosine-3'-phosphate
  modified_base 20: mod_base = OTHER; note = 2'-O-methyladenosine-3'-phosphate
  modified_base 21: mod_base = OTHER; note = 2'-O-methylcytidine-3'-phosphorothioate
  modified_base 22: mod_base = OTHER; note = 2'-O-methyladenosine-3'-phosphorothioate
  modified_base 23: mod_base = OTHER; note = 2'-O-methyluridine
tacaaaccttgaaacacgaacat

SEQ ID NO: 1205 - RNA, 23 nt, synthetic construct
  source 1..23: mol_type = other RNA
  modified_base 1: mod_base = OTHER; note = 2'-O-methyluridine-3'-phosphorothioate 5'-(E)-Vinylphosphonate
  modified_base 2: mod_base = OTHER; note = 2'-deoxy-2'-fluoroadenosine-3'-phosphorothioate
  modified_base 3: mod_base = OTHER; note = 2'-O-methyluridine-3'-phosphate
  modified_base 4: mod_base = OTHER; note = 2'-O-methyluridine-3'-phosphate
  modified_base 5: mod_base = OTHER; note = 2'-O-methyluridine-3'-phosphate
  modified_base 6: mod_base = OTHER; note = 2'-deoxy-2'-fluorocytidine-3'-phosphate
  modified_base 7: mod_base = OTHER; note = 2'-O-methyluridine-3'-phosphate
  modified_base 8: mod_base = OTHER; note = 2'-O-methylcytidine-3'-phosphate
  modified_base 9: mod_base = OTHER; note = 2'-O-methyladenosine-3'-phosphate
  modified_base 10: mod_base = OTHER; note = 2'-O-methyluridine-3'-phosphate
  modified_base 11: mod_base = OTHER; note = 2'-O-methylcytidine-3'-phosphate
  modified_base 12: mod_base = OTHER; note = 2'-O-methyladenosine-3'-phosphate
  modified_base 13: mod_base = OTHER; note = 2'-O-methylcytidine-3'-phosphate
  modified_base 14: mod_base = OTHER; note = 2'-deoxy-2'-fluorouridine-3'-phosphate
  modified_base 15: mod_base = OTHER; note = 2'-O-methylcytidine-3'-phosphate
  modified_base 16: mod_base = OTHER; note = 2'-deoxy-2'-fluorocytidine-3'-phosphate
  modified_base 17: mod_base = OTHER; note = 2'-O-methylcytidine-3'-phosphate
  modified_base 18: mod_base = OTHER; note = 2'-O-methyluridine-3'-phosphate
  modified_base 19: mod_base = OTHER; note = 2'-O-methylcytidine-3'-phosphate
  modified_base 20: mod_base = OTHER; note = 2'-O-methyladenosine-3'-phosphate
  modified_base 21: mod_base = OTHER; note = 2'-O-methyladenosine-3'-phosphorothioate
  modified_base 22: mod_base = OTHER; note = 2'-O-methyluridine-3'-phosphorothioate
  modified_base 23: mod_base = OTHER; note = 2'-O-methylcytidine
tatttctcatcactccctcaatc

SEQ ID NO: 1206 - RNA, 23 nt, synthetic construct
  source 1..23: mol_type = other RNA
  modified_base 1: mod_base = OTHER; note = 2'-O-methyluridine-3'-phosphorothioate 5'-(E)-Vinylphosphonate
  modified_base 2: mod_base = OTHER; note = 2'-deoxy-2'-fluoroadenosine-3'-phosphorothioate
  modified_base 3: mod_base = OTHER; note = 2'-O-methyluridine-3'-phosphate
  modified_base 4: mod_base = OTHER; note = 2'-O-methyluridine-3'-phosphate
  modified_base 5: mod_base = OTHER; note = 2'-O-methyluridine-3'-phosphate
  modified_base 6: mod_base = OTHER; note = 2'-deoxy-2'-fluorocytidine-3'-phosphate
  modified_base 7: mod_base = OTHER; note = 2'-O-methyladenosine-3'-phosphate
  modified_base 8: mod_base = OTHER; note = 2'-O-methylcytidine-3'-phosphate
  modified_base 9: mod_base = OTHER; note = 2'-O-methyladenosine-3'-phosphate
  modified_base 10: mod_base = OTHER; note = 2'-O-methyluridine-3'-phosphate
  modified_base 11: mod_base = OTHER; note = 2'-O-methylcytidine-3'-phosphate
  modified_base 12: mod_base = OTHER; note = 2'-O-methyladenosine-3'-phosphate
  modified_base 13: mod_base = OTHER; note = 2'-O-methylcytidine-3'-phosphate
  modified_base 14: mod_base = OTHER; note = 2'-deoxy-2'-fluorouridine-3'-phosphate
  modified_base 15: mod_base = OTHER; note = 2'-O-methylcytidine-3'-phosphate
  modified_base 16: mod_base = OTHER; note = 2'-deoxy-2'-fluorocytidine-3'-phosphate
  modified_base 17: mod_base = OTHER; note = 2'-O-methylcytidine-3'-phosphate
  modified_base 18: mod_base = OTHER; note = 2'-O-methyluridine-3'-phosphate
  modified_base 19: mod_base = OTHER; note = 2'-O-methylcytidine-3'-phosphate
  modified_base 20: mod_base = OTHER; note = 2'-O-methyladenosine-3'-phosphate
  modified_base 21: mod_base = OTHER; note = 2'-O-methyladenosine-3'-phosphorothioate
  modified_base 22: mod_base = OTHER; note = 2'-O-methyluridine-3'-phosphorothioate
  modified_base 23: mod_base = OTHER; note = 2'-O-methylcytidine
tatttcacatcactccctcaatc

SEQ ID NO: 1207 - RNA, 23 nt, synthetic construct
  source 1..23: mol_type = other RNA
  modified_base 1: mod_base = OTHER; note = 2'-O-methyluridine-3'-phosphorothioate 5'-(E)-Vinylphosphonate
  modified_base 2: mod_base = OTHER; note = 2'-deoxy-2'-fluorouridine-3'-phosphorothioate
  modified_base 3: mod_base = OTHER; note = 2'-O-methyladenosine-3'-phosphate
  modified_base 4: mod_base = OTHER; note = 2'-O-methyluridine-3'-phosphate
  modified_base 5: mod_base = OTHER; note = 2'-O-methyluridine-3'-phosphate
  modified_base 6: mod_base = OTHER; note = 2'-deoxy-2'-fluorouridine-3'-phosphate
  modified_base 7: mod_base = OTHER; note = 2'-O-methylcytidine-3'-phosphate
  modified_base 8: mod_base = OTHER; note = 2'-O-methyluridine-3'-phosphate
  modified_base 9: mod_base = OTHER; note = 2'-O-methylcytidine-3'-phosphate
  modified_base 10: mod_base = OTHER; note = 2'-O-methyladenosine-3'-phosphate
  modified_base 11: mod_base = OTHER; note = 2'-O-methyluridine-3'-phosphate
  modified_base 12: mod_base = OTHER; note = 2'-O-methylcytidine-3'-phosphate
  modified_base 13: mod_base = OTHER; note = 2'-O-methyladenosine-3'-phosphate
  modified_base 14: mod_base = OTHER; note = 2'-deoxy-2'-fluorocytidine-3'-phosphate
  modified_base 15: mod_base = OTHER; note = 2'-O-methyluridine-3'-phosphate
  modified_base 16: mod_base = OTHER; note = 2'-deoxy-2'-fluorocytidine-3'-phosphate
  modified_base 17: mod_base = OTHER; note = 2'-O-methylcytidine-3'-phosphate
  modified_base 18: mod_base = OTHER; note = 2'-O-methylcytidine-3'-phosphate
  modified_base 19: mod_base = OTHER; note = 2'-O-methyluridine-3'-phosphate
  modified_base 20: mod_base = OTHER; note = 2'-O-methylcytidine-3'-phosphate
  modified_base 21: mod_base = OTHER; note = 2'-O-methyladenosine-3'-phosphorothioate
  modified_base 22: mod_base = OTHER; note = 2'-O-methyladenosine-3'-phosphorothioate
  modified_base 23: mod_base = OTHER; note = 2'-O-methyluridine
ttatttctcatcactccctcaat

SEQ ID NO: 1208 - RNA, 23 nt, synthetic construct
  source 1..23: mol_type = other RNA
  modified_base 1: mod_base = OTHER; note = 2'-O-methyluridine-3'-phosphorothioate 5'-(E)-Vinylphosphonate
  modified_base 2: mod_base = OTHER; note = 2'-deoxy-2'-fluorouridine-3'-phosphorothioate
  modified_base 3: mod_base = OTHER; note = 2'-O-methyladenosine-3'-phosphate
  modified_base 4: mod_base = OTHER; note = 2'-O-methyluridine-3'-phosphate
  modified_base 5: mod_base = OTHER; note = 2'-O-methyluridine-3'-phosphate
  modified_base 6: mod_base = OTHER; note = 2'-deoxy-2'-fluorouridine-3'-phosphate
  modified_base 7: mod_base = OTHER; note = 2'-O-methyladenosine-3'-phosphate
  modified_base 8: mod_base = OTHER; note = 2'-O-methyluridine-3'-phosphate
  modified_base 9: mod_base = OTHER; note = 2'-O-methylcytidine-3'-phosphate
  modified_base 10: mod_base = OTHER; note = 2'-O-methyladenosine-3'-phosphate
  modified_base 11: mod_base = OTHER; note = 2'-O-methyluridine-3'-phosphate
  modified_base 12: mod_base = OTHER; note = 2'-O-methylcytidine-3'-phosphate
  modified_base 13: mod_base = OTHER; note = 2'-O-methyladenosine-3'-phosphate
  modified_base 14: mod_base = OTHER; note = 2'-deoxy-2'-fluorocytidine-3'-phosphate
  modified_base 15: mod_base = OTHER; note = 2'-O-methyluridine-3'-phosphate
  modified_base 16: mod_base = OTHER; note = 2'-deoxy-2'-fluorocytidine-3'-phosphate
  modified_base 17: mod_base = OTHER; note = 2'-O-methylcytidine-3'-phosphate
  modified_base 18: mod_base = OTHER; note = 2'-O-methylcytidine-3'-phosphate
  modified_base 19: mod_base = OTHER; note = 2'-O-methyluridine-3'-phosphate
  modified_base 20: mod_base = OTHER; note = 2'-O-methylcytidine-3'-phosphate
  modified_base 21: mod_base = OTHER; note = 2'-O-methyladenosine-3'-phosphorothioate
  modified_base 22: mod_base = OTHER; note = 2'-O-methyladenosine-3'-phosphorothioate
  modified_base 23: mod_base = OTHER; note = 2'-O-methyluridine
ttatttatcatcactccctcaat

SEQ ID NO: 1209 - RNA, 23 nt, synthetic construct
  source 1..23: mol_type = other RNA
  modified_base 1: mod_base = OTHER; note = 2'-O-methyluridine-3'-phosphorothioate 5'-(E)-Vinylphosphonate
  modified_base 2: mod_base = OTHER; note = 2'-deoxy-2'-fluorouridine-3'-phosphorothioate
  modified_base 3: mod_base = OTHER; note = 2'-O-methyluridine-3'-phosphate
  modified_base 4: mod_base = OTHER; note = 2'-O-methyladenosine-3'-phosphate
  modified_base 5: mod_base = OTHER; note = 2'-O-methyluridine-3'-phosphate
  modified_base 6: mod_base = OTHER; note = 2'-deoxy-2'-fluorouridine-3'-phosphate
  modified_base 7: mod_base = OTHER; note = 2'-O-methyluridine-3'-phosphate
  modified_base 8: mod_base = OTHER; note = 2'-O-methylcytidine-3'-phosphate
  modified_base 9: mod_base = OTHER; note = 2'-O-methyluridine-3'-phosphate
  modified_base 10: mod_base = OTHER; note = 2'-O-methylcytidine-3'-phosphate
  modified_base 11: mod_base = OTHER; note = 2'-O-methyladenosine-3'-phosphate
  modified_base 12: mod_base = OTHER; note = 2'-O-methyluridine-3'-phosphate
  modified_base 13: mod_base = OTHER; note = 2'-O-methylcytidine-3'-phosphate
  modified_base 14: mod_base = OTHER; note = 2'-deoxy-2'-fluoroadenosine-3'-phosphate
  modified_base 15: mod_base = OTHER; note = 2'-O-methylcytidine-3'-phosphate
  modified_base 16: mod_base = OTHER; note = 2'-deoxy-2'-fluorouridine-3'-phosphate
  modified_base 17: mod_base = OTHER; note = 2'-O-methylcytidine-3'-phosphate
  modified_base 18: mod_base = OTHER; note = 2'-O-methylcytidine-3'-phosphate
  modified_base 19: mod_base = OTHER; note = 2'-O-methylcytidine-3'-phosphate
  modified_base 20: mod_base = OTHER; note = 2'-O-methyluridine-3'-phosphate
  modified_base 21: mod_base = OTHER; note = 2'-O-methylcytidine-3'-phosphorothioate
  modified_base 22: mod_base = OTHER; note = 2'-O-methyladenosine-3'-phosphorothioate
  modified_base 23: mod_base = OTHER; note = 2'-O-methyladenosine
tttatttctcatcactccctcaa

SEQ ID NO: 1210 - RNA, 23 nt, synthetic construct
  source 1..23: mol_type = other RNA
  modified_base 1: mod_base = OTHER; note = 2'-O-methyluridine-3'-phosphorothioate 5'-(E)-Vinylphosphonate
  modified_base 2: mod_base = OTHER; note = 2'-deoxy-2'-fluorouridine-3'-phosphorothioate
  modified_base 3: mod_base = OTHER; note = 2'-O-methyluridine-3'-phosphate
  modified_base 4: mod_base = OTHER; note = 2'-O-methyladenosine-3'-phosphate
  modified_base 5: mod_base = OTHER; note = 2'-O-methyluridine-3'-phosphate
  modified_base 6: mod_base = OTHER; note = 2'-deoxy-2'-fluorouridine-3'-phosphate
  modified_base 7: mod_base = OTHER; note = 2'-O-methyladenosine-3'-phosphate
  modified_base 8: mod_base = OTHER; note = 2'-O-methylcytidine-3'-phosphate
  modified_base 9: mod_base = OTHER; note = 2'-O-methyluridine-3'-phosphate
  modified_base 10: mod_base = OTHER; note = 2'-O-methylcytidine-3'-phosphate
  modified_base 11: mod_base = OTHER; note = 2'-O-methyladenosine-3'-phosphate
  modified_base 12: mod_base = OTHER; note = 2'-O-methyluridine-3'-phosphate
  modified_base 13: mod_base = OTHER; note = 2'-O-methylcytidine-3'-phosphate
  modified_base 14: mod_base = OTHER; note = 2'-deoxy-2'-fluoroadenosine-3'-phosphate
  modified_base 15: mod_base = OTHER; note = 2'-O-methylcytidine-3'-phosphate
  modified_base 16: mod_base = OTHER; note = 2'-deoxy-2'-fluorouridine-3'-phosphate
  modified_base 17: mod_base = OTHER; note = 2'-O-methylcytidine-3'-phosphate
  modified_base 18: mod_base = OTHER; note = 2'-O-methylcytidine-3'-phosphate
  modified_base 19: mod_base = OTHER; note = 2'-O-methylcytidine-3'-phosphate
  modified_base 20: mod_base = OTHER; note = 2'-O-methyluridine-3'-phosphate
  modified_base 21: mod_base = OTHER; note = 2'-O-methylcytidine-3'-phosphorothioate
  modified_base 22: mod_base = OTHER; note = 2'-O-methyladenosine-3'-phosphorothioate
  modified_base 23: mod_base = OTHER; note = 2'-O-methyladenosine
tttattactcatcactccctcaa

SEQ ID NO: 1211 - RNA, 23 nt, synthetic construct
  source 1..23: mol_type = other RNA
  modified_base 1: mod_base = OTHER; note = 2'-O-methyluridine-3'-phosphorothioate 5'-(E)-Vinylphosphonate
  modified_base 2: mod_base = OTHER; note = 2'-deoxy-2'-fluoroadenosine-3'-phosphorothioate
  modified_base 3: mod_base = OTHER; note = 2'-O-methyladenosine-3'-phosphate
  modified_base 4: mod_base = OTHER; note = 2'-O-methyluridine-3'-phosphate
  modified_base 5: mod_base = OTHER; note = 2'-O-methyluridine-3'-phosphate
  modified_base 6: mod_base = OTHER; note = 2'-deoxy-2'-fluoroadenosine-3'-phosphate
  modified_base 7: mod_base = OTHER; note = 2'-O-methyluridine-3'-phosphate
  modified_base 8: mod_base = OTHER; note = 2'-O-methyluridine-3'-phosphate
  modified_base 9: mod_base = OTHER; note = 2'-O-methyluridine-3'-phosphate
  modified_base 10: mod_base = OTHER; note = 2'-O-methylcytidine-3'-phosphate
  modified_base 11: mod_base = OTHER; note = 2'-O-methyluridine-3'-phosphate
  modified_base 12: mod_base = OTHER; note = 2'-O-methylcytidine-3'-phosphate
  modified_base 13: mod_base = OTHER; note = 2'-O-methyladenosine-3'-phosphate
  modified_base 14: mod_base = OTHER; note = 2'-deoxy-2'-fluorouridine-3'-phosphate
  modified_base 15: mod_base = OTHER; note = 2'-O-methylcytidine-3'-phosphate
  modified_base 16: mod_base = OTHER; note = 2'-deoxy-2'-fluoroadenosine-3'-phosphate
  modified_base 17: mod_base = OTHER; note = 2'-O-methylcytidine-3'-phosphate
  modified_base 18: mod_base = OTHER; note = 2'-O-methyluridine-3'-phosphate
  modified_base 19: mod_base = OTHER; note = 2'-O-methylcytidine-3'-phosphate
  modified_base 20: mod_base = OTHER; note = 2'-O-methylcytidine-3'-phosphate
  modified_base 21: mod_base = OTHER; note = 2'-O-methylcytidine-3'-phosphorothioate
  modified_base 22: mod_base = OTHER; note = 2'-O-methyluridine-3'-phosphorothioate
  modified_base 23: mod_base = OTHER; note = 2'-O-methylcytidine
taattatttctcatcactccctc

SEQ ID NO: 1212 - RNA, 23 nt, synthetic construct
  source 1..23: mol_type = other RNA
  modified_base 1: mod_base = OTHER; note = 2'-O-methyluridine-3'-phosphorothioate 5'-(E)-Vinylphosphonate
  modified_base 2: mod_base = OTHER; note = 2'-deoxy-2'-fluorouridine-3'-phosphorothioate
  modified_base 3: mod_base = OTHER; note = 2'-O-methyluridine-3'-phosphate
  modified_base 4: mod_base = OTHER; note = 2'-O-methyladenosine-3'-phosphate
  modified_base 5: mod_base = OTHER; note = 2'-O-methyladenosine-3'-phosphate
  modified_base 6: mod_base = OTHER; note = 2'-deoxy-2'-fluorouridine-3'-phosphate
  modified_base 7: mod_base = OTHER; note = 2'-O-methyluridine-3'-phosphate
  modified_base 8: mod_base = OTHER; note = 2'-O-methyladenosine-3'-phosphate
  modified_base 9: mod_base = OTHER; note = 2'-O-methyluridine-3'-phosphate
  modified_base 10: mod_base = OTHER; note = 2'-O-methyluridine-3'-phosphate
  modified_base 11: mod_base = OTHER; note = 2'-O-methyluridine-3'-phosphate
  modified_base 12: mod_base = OTHER; note = 2'-O-methylcytidine-3'-phosphate
  modified_base 13: mod_base = OTHER; note = 2'-O-methyluridine-3'-phosphate
  modified_base 14: mod_base = OTHER; note = 2'-deoxy-2'-fluorocytidine-3'-phosphate
  modified_base 15: mod_base = OTHER; note = 2'-O-methyladenosine-3'-phosphate
  modified_base 16: mod_base = OTHER; note = 2'-deoxy-2'-fluorouridine-3'-phosphate
  modified_base 17: mod_base = OTHER; note = 2'-O-methylcytidine-3'-phosphate
  modified_base 18: mod_base = OTHER; note = 2'-O-methyladenosine-3'-phosphate
  modified_base 19: mod_base = OTHER; note = 2'-O-methylcytidine-3'-phosphate
  modified_base 20: mod_base = OTHER; note = 2'-O-methyluridine-3'-phosphate
  modified_base 21: mod_base = OTHER; note = 2'-O-methylcytidine-3'-phosphorothioate
  modified_base 22: mod_base = OTHER; note = 2'-O-methylcytidine-3'-phosphorothioate
  modified_base 23: mod_base = OTHER; note = 2'-O-methylcytidine
tttaattatttctcatcactccc

SEQ ID NO: 1213 - RNA, 23 nt, synthetic construct
  source 1..23: mol_type = other RNA
  modified_base 1: mod_base = OTHER; note = 2'-O-methyluridine-3'-phosphorothioate 5'-(E)-Vinylphosphonate
  modified_base 2: mod_base = OTHER; note = 2'-deoxy-2'-fluoroadenosine-3'-phosphorothioate
  modified_base 3: mod_base = OTHER; note = 2'-O-methyladenosine-3'-phosphate
  modified_base 4: mod_base = OTHER; note = 2'-O-methyluridine-3'-phosphate
  modified_base 5: mod_base = OTHER; note = 2'-O-methyluridine-3'-phosphate
  modified_base 6: mod_base = OTHER; note = 2'-deoxy-2'-fluoroadenosine-3'-phosphate
  modified_base 7: mod_base = OTHER; note = 2'-O-methyladenosine-3'-phosphate
  modified_base 8: mod_base = OTHER; note = 2'-O-methyluridine-3'-phosphate
  modified_base 9: mod_base = OTHER; note = 2'-O-methyluridine-3'-phosphate
  modified_base 10: mod_base = OTHER; note = 2'-O-methyladenosine-3'-phosphate
  modified_base 11: mod_base = OTHER; note = 2'-O-methyluridine-3'-phosphate
  modified_base 12: mod_base = OTHER; note = 2'-O-methyluridine-3'-phosphate
  modified_base 13: mod_base = OTHER; note = 2'-O-methyluridine-3'-phosphate
  modified_base 14: mod_base = OTHER; note = 2'-deoxy-2'-fluorocytidine-3'-phosphate
  modified_base 15: mod_base = OTHER; note = 2'-O-methyluridine-3'-phosphate
  modified_base 16: mod_base = OTHER; note = 2'-deoxy-2'-fluorocytidine-3'-phosphate
  modified_base 17: mod_base = OTHER; note = 2'-O-methyladenosine-3'-phosphate
  modified_base 18: mod_base = OTHER; note = 2'-O-methyluridine-3'-phosphate
  modified_base 19: mod_base = OTHER; note = 2'-O-methylcytidine-3'-phosphate
  modified_base 20: mod_base = OTHER; note = 2'-O-methyladenosine-3'-phosphate
  modified_base 21: mod_base = OTHER; note = 2'-O-methylcytidine-3'-phosphorothioate
  modified_base 22: mod_base = OTHER; note = 2'-O-methyluridine-3'-phosphorothioate
  modified_base 23: mod_base = OTHER; note = 2'-O-methylcytidine
taattaattatttctcatcactc

SEQ ID NO: 1214 - RNA, 23 nt, synthetic construct
  source 1..23: mol_type = other RNA
  modified_base 1: mod_base = OTHER; note = 2'-O-methyluridine-3'-phosphorothioate 5'-(E)-Vinylphosphonate
  modified_base 2: mod_base = OTHER; note = 2'-deoxy-2'-fluorocytidine-3'-phosphorothioate
  modified_base 3: mod_base = OTHER; note = 2'-O-methyladenosine-3'-phosphate
  modified_base 4: mod_base = OTHER; note = 2'-O-methyladenosine-3'-phosphate
  modified_base 5: mod_base = OTHER; note = 2'-O-methyluridine-3'-phosphate
  modified_base 6: mod_base = OTHER; note = 2'-deoxy-2'-fluorouridine-3'-phosphate
  modified_base 7: mod_base = OTHER; note = 2'-O-methyladenosine-3'-phosphate
  modified_base 8: mod_base = OTHER; note = 2'-O-methyladenosine-3'-phosphate
  modified_base 9: mod_base = OTHER; note = 2'-O-methyluridine-3'-phosphate
  modified_base 10: mod_base = OTHER; note = 2'-O-methyluridine-3'-phosphate
  modified_base 11: mod_base = OTHER; note = 2'-O-methyladenosine-3'-phosphate
  modified_base 12: mod_base = OTHER; note = 2'-O-methyluridine-3'-phosphate
  modified_base 13: mod_base = OTHER; note = 2'-O-methyluridine-3'-phosphate
  modified_base 14: mod_base = OTHER; note = 2'-deoxy-2'-fluorouridine-3'-phosphate
  modified_base 15: mod_base = OTHER; note = 2'-O-methylcytidine-3'-phosphate
  modified_base 16: mod_base = OTHER; note = 2'-deoxy-2'-fluorouridine-3'-phosphate
  modified_base 17: mod_base = OTHER; note = 2'-O-methylcytidine-3'-phosphate
  modified_base 18: mod_base = OTHER; note = 2'-O-methyladenosine-3'-phosphate
  modified_base 19: mod_base = OTHER; note = 2'-O-methyluridine-3'-phosphate
  modified_base 20: mod_base = OTHER; note = 2'-O-methylcytidine-3'-phosphate
  modified_base 21: mod_base = OTHER; note = 2'-O-methyladenosine-3'-phosphorothioate
  modified_base 22: mod_base = OTHER; note = 2'-O-methylcytidine-3'-phosphorothioate
  modified_base 23: mod_base = OTHER; note = 2'-O-methyluridine
tcaattaattatttctcatcact

SEQ ID NO: 1215 - RNA, 23 nt, synthetic construct
  source 1..23: mol_type = other RNA
  modified_base 1: mod_base = OTHER; note = 2'-O-methyluridine-3'-phosphorothioate 5'-(E)-Vinylphosphonate
  modified_base 2: mod_base = OTHER; note = 2'-deoxy-2'-fluorocytidine-3'-phosphorothioate
  modified_base 3: mod_base = OTHER; note = 2'-O-methylcytidine-3'-phosphate
  modified_base 4: mod_base = OTHER; note = 2'-O-methyladenosine-3'-phosphate
  modified_base 5: mod_base = OTHER; note = 2'-O-methyladenosine-3'-phosphate
  modified_base 6: mod_base = OTHER; note = 2'-deoxy-2'-fluorouridine-3'-phosphate
  modified_base 7: mod_base = OTHER; note = 2'-O-methyluridine-3'-phosphate
  modified_base 8: mod_base = OTHER; note = 2'-O-methyladenosine-3'-phosphate
  modified_base 9: mod_base = OTHER; note = 2'-O-methyladenosine-3'-phosphate
  modified_base 10: mod_base = OTHER; note = 2'-O-methyluridine-3'-phosphate
  modified_base 11: mod_base = OTHER; note = 2'-O-methyluridine-3'-phosphate
  modified_base 12: mod_base = OTHER; note = 2'-O-methyladenosine-3'-phosphate
  modified_base 13: mod_base = OTHER; note = 2'-O-methyluridine-3'-phosphate
  modified_base 14: mod_base = OTHER; note = 2'-deoxy-2'-fluorouridine-3'-phosphate
  modified_base 15: mod_base = OTHER; note = 2'-O-methyluridine-3'-phosphate
  modified_base 16: mod_base = OTHER; note = 2'-deoxy-2'-fluorocytidine-3'-phosphate
  modified_base 17: mod_base = OTHER; note = 2'-O-methyluridine-3'-phosphate
  modified_base 18: mod_base = OTHER; note = 2'-O-methylcytidine-3'-phosphate
  modified_base 19: mod_base = OTHER; note = 2'-O-methyladenosine-3'-phosphate
  modified_base 20: mod_base = OTHER; note = 2'-O-methyluridine-3'-phosphate
  modified_base 21: mod_base = OTHER; note = 2'-O-methylcytidine-3'-phosphorothioate
  modified_base 22: mod_base = OTHER; note = 2'-O-methyladenosine-3'-phosphorothioate
  modified_base 23: mod_base = OTHER; note = 2'-O-methylcytidine
tccaattaattatttctcatcac

SEQ ID NO: 1216 - RNA, 23 nt, synthetic construct
  source 1..23: mol_type = other RNA
  modified_base 1: mod_base = OTHER; note = 2'-O-methyluridine-3'-phosphorothioate 5'-(E)-Vinylphosphonate
  modified_base 2: mod_base = OTHER; note = 2'-deoxy-2'-fluorouridine-3'-phosphorothioate
  modified_base 3: mod_base = OTHER; note = 2'-O-methylcytidine-3'-phosphate
  modified_base 4: mod_base = OTHER; note = 2'-O-methylcytidine-3'-phosphate
  modified_base 5: mod_base = OTHER; note = 2'-O-methyladenosine-3'-phosphate
  modified_base 6: mod_base = OTHER; note = 2'-deoxy-2'-fluoroadenosine-3'-phosphate
  modified_base 7: mod_base = OTHER; note = 2'-O-methyluridine-3'-phosphate
  modified_base 8: mod_base = OTHER; note = 2'-O-methyluridine-3'-phosphate
  modified_base 9: mod_base = OTHER; note = 2'-O-methyladenosine-3'-phosphate
  modified_base 10: mod_base = OTHER; note = 2'-O-methyladenosine-3'-phosphate
  modified_base 11: mod_base = OTHER; note = 2'-O-methyluridine-3'-phosphate
  modified_base 12: mod_base = OTHER; note = 2'-O-methyluridine-3'-phosphate
  modified_base 13: mod_base = OTHER; note = 2'-O-methyladenosine-3'-phosphate
  modified_base 14: mod_base = OTHER; note = 2'-deoxy-2'-fluorouridine-3'-phosphate
  modified_base 15: mod_base = OTHER; note = 2'-O-methyluridine-3'-phosphate
  modified_base 16: mod_base = OTHER; note = 2'-deoxy-2'-fluorouridine-3'-phosphate
  modified_base 17: mod_base = OTHER; note = 2'-O-methylcytidine-3'-phosphate
  modified_base 18: mod_base = OTHER; note = 2'-O-methyluridine-3'-phosphate
  modified_base 19: mod_base = OTHER; note = 2'-O-methylcytidine-3'-phosphate
  modified_base 20: mod_base = OTHER; note = 2'-O-methyladenosine-3'-phosphate
  modified_base 21: mod_base = OTHER; note = 2'-O-methyluridine-3'-phosphorothioate
  modified_base 22: mod_base = OTHER; note = 2'-O-methylcytidine-3'-phosphorothioate
  modified_base 23: mod_base = OTHER; note = 2'-O-methyladenosine
ttccaattaattatttctcatca

SEQ ID NO: 1217 - RNA, 23 nt, synthetic construct
  source 1..23: mol_type = other RNA
  modified_base 1: mod_base = OTHER; note = 2'-O-methyluridine-3'-phosphorothioate 5'-(E)-Vinylphosphonate
  modified_base 2: mod_base = OTHER; note = 2'-deoxy-2'-fluorocytidine-3'-phosphorothioate
  modified_base 3: mod_base = OTHER; note = 2'-O-methyladenosine-3'-phosphate
  modified_base 4: mod_base = OTHER; note = 2'-O-methylguanosine-3'-phosphate
  modified_base 5: mod_base = OTHER; note = 2'-O-methylcytidine-3'-phosphate
  modified_base 6: mod_base = OTHER; note = 2'-deoxy-2'-fluorocytidine-3'-phosphate
  modified_base 7: mod_base = OTHER; note = 2'-O-methyluridine-3'-phosphate
  modified_base 8: mod_base = OTHER; note = 2'-O-methylcytidine-3'-phosphate
  modified_base 9: mod_base = OTHER; note = 2'-O-methyluridine-3'-phosphate
  modified_base 10: mod_base = OTHER; note = 2'-O-methyladenosine-3'-phosphate
  modified_base 11: mod_base = OTHER; note = 2'-O-methylguanosine-3'-phosphate
  modified_base 12: mod_base = OTHER; note = 2'-O-methylguanosine-3'-phosphate
  modified_base 13: mod_base = OTHER; note = 2'-O-methyluridine-3'-phosphate
  modified_base 14: mod_base = OTHER; note = 2'-deoxy-2'-fluoroguanosine-3'-phosphate
  modified_base 15: mod_base = OTHER; note = 2'-O-methyladenosine-3'-phosphate
  modified_base 16: mod_base = OTHER; note = 2'-deoxy-2'-fluoroguanosine-3'-phosphate
  modified_base 17: mod_base = OTHER; note = 2'-O-methyluridine-3'-phosphate
  modified_base 18: mod_base = OTHER; note = 2'-O-methylcytidine-3'-phosphate
  modified_base 19: mod_base = OTHER; note = 2'-O-methyladenosine-3'-phosphate
  modified_base 20: mod_base = OTHER; note = 2'-O-methylguanosine-3'-phosphate
  modified_base 21: mod_base = OTHER; note = 2'-O-methyluridine-3'-phosphorothioate
  modified_base 22: mod_base = OTHER; note = 2'-O-methylguanosine-3'-phosphorothioate
  modified_base 23: mod_base = OTHER; note = 2'-O-methylcytidine
tcagcctctaggtgagtcagtgc

SEQ ID NO: 1218 - RNA, 23 nt, synthetic construct
  source 1..23: mol_type = other RNA
  modified_base 1: mod_base = OTHER; note = 2'-O-methyluridine-3'-phosphorothioate 5'-(E)-Vinylphosphonate
  modified_base 2: mod_base = OTHER; note = 2'-deoxy-2'-fluorocytidine-3'-phosphorothioate
  modified_base 3: mod_base = OTHER; note = 2'-O-methyladenosine-3'-phosphate
  modified_base 4: mod_base = OTHER; note = 2'-O-methylguanosine-3'-phosphate
  modified_base 5: mod_base = OTHER; note = 2'-O-methylcytidine-3'-phosphate
  modified_base 6: mod_base = OTHER; note = 2'-deoxy-2'-fluoroadenosine-3'-phosphate
  modified_base 7: mod_base = OTHER; note = 2'-O-methyluridine-3'-phosphate
  modified_base 8: mod_base = OTHER; note = 2'-O-methylguanosine-3'-phosphate
  modified_base 9: mod_base = OTHER; note = 2'-O-methylcytidine-3'-phosphate
  modified_base 10: mod_base = OTHER; note = 2'-O-methyluridine-3'-phosphate
  modified_base 11: mod_base = OTHER; note = 2'-O-methyladenosine-3'-phosphate
  modified_base 12: mod_base = OTHER; note = 2'-O-methyladenosine-3'-phosphate
  modified_base 13: mod_base = OTHER; note = 2'-O-methyladenosine-3'-phosphate
  modified_base 14: mod_base = OTHER; note = 2'-deoxy-2'-fluorouridine-3'-phosphate
  modified_base 15: mod_base = OTHER; note = 2'-O-methylcytidine-3'-phosphate
  modified_base 16: mod_base = OTHER; note = 2'-deoxy-2'-fluorocytidine-3'-phosphate
  modified_base 17: mod_base = OTHER; note = 2'-O-methylcytidine-3'-phosphate
  modified_base 18: mod_base = OTHER; note = 2'-O-methyluridine-3'-phosphate
  modified_base 19: mod_base = OTHER; note = 2'-O-methyladenosine-3'-phosphate
  modified_base 20: mod_base = OTHER; note = 2'-O-methylcytidine-3'-phosphate
  modified_base 21: mod_base = OTHER; note = 2'-O-methylcytidine-3'-phosphorothioate
  modified_base 22: mod_base = OTHER; note = 2'-O-methylcytidine-3'-phosphorothioate
  modified_base 23: mod_base = OTHER; note = 2'-O-methyladenosine
tcagcatgctaaatccctaccca

SEQ ID NO: 1219 - RNA, 23 nt, synthetic construct
  source 1..23: mol_type = other RNA
  modified_base 1: mod_base = OTHER; note = 2'-O-methyluridine-3'-phosphorothioate 5'-(E)-Vinylphosphonate
  modified_base 2: mod_base = OTHER; note = 2'-deoxy-2'-fluorouridine-3'-phosphorothioate
  modified_base 3: mod_base = OTHER; note = 2'-O-methylcytidine-3'-phosphate
  modified_base 4: mod_base = OTHER; note = 2'-O-methylcytidine-3'-phosphate
  modified_base 5: mod_base = OTHER; note = 2'-O-methyladenosine-3'-phosphate
  modified_base 6: mod_base = OTHER; note = 2'-deoxy-2'-fluoroguanosine-3'-phosphate
  modified_base 7: mod_base = OTHER; note = 2'-O-methylcytidine-3'-phosphate
  modified_base 8: mod_base = OTHER; note = 2'-O-methyladenosine-3'-phosphate
  modified_base 9: mod_base = OTHER; note = 2'-O-methyluridine-3'-phosphate
  modified_base 10: mod_base = OTHER; note = 2'-O-methylguanosine-3'-phosphate
  modified_base 11: mod_base = OTHER; note = 2'-O-methylcytidine-3'-phosphate
  modified_base 12: mod_base = OTHER; note = 2'-O-methyluridine-3'-phosphate
  modified_base 13: mod_base = OTHER; note = 2'-O-methyladenosine-3'-phosphate
  modified_base 14: mod_base = OTHER; note = 2'-deoxy-2'-fluoroadenosine-3'-phosphate
  modified_base 15: mod_base = OTHER; note = 2'-O-methyladenosine-3'-phosphate
  modified_base 16: mod_base = OTHER; note = 2'-deoxy-2'-fluorouridine-3'-phosphate
  modified_base 17: mod_base = OTHER; note = 2'-O-methylcytidine-3'-phosphate
  modified_base 18: mod_base = OTHER; note = 2'-O-methylcytidine-3'-phosphate
  modified_base 19: mod_base = OTHER; note = 2'-O-methylcytidine-3'-phosphate
  modified_base 20: mod_base = OTHER; note = 2'-O-methyluridine-3'-phosphate
  modified_base 21: mod_base = OTHER; note = 2'-O-methyladenosine-3'-phosphorothioate
  modified_base 22: mod_base = OTHER; note = 2'-O-methylcytidine-3'-phosphorothioate
  modified_base 23: mod_base = OTHER; note = 2'-O-methylcytidine
ttccagcatgctaaatccctacc

SEQ ID NO: 1220 - RNA, 23 nt, synthetic construct
  source 1..23: mol_type = other RNA
  modified_base 1: mod_base = OTHER; note = 2'-O-methyluridine-3'-phosphorothioate 5'-(E)-Vinylphosphonate
  modified_base 2: mod_base = OTHER; note = 2'-deoxy-2'-fluorocytidine-3'-phosphorothioate
  modified_base 3: mod_base = OTHER; note = 2'-O-methyladenosine-3'-phosphate
  modified_base 4: mod_base = OTHER; note = 2'-O-methylguanosine-3'-phosphate
  modified_base 5: mod_base = OTHER; note = 2'-O-methyluridine-3'-phosphate
  modified_base 6: mod_base = OTHER; note = 2'-deoxy-2'-fluorouridine-3'-phosphate
  modified_base 7: mod_base = OTHER; note = 2'-O-methyladenosine-3'-phosphate
  modified_base 8: mod_base = OTHER; note = 2'-O-methyluridine-3'-phosphate
  modified_base 9: mod_base = OTHER; note = 2'-O-methyluridine-3'-phosphate
  modified_base 10: mod_base = OTHER; note = 2'-O-methyluridine-3'-phosphate
  modified_base 11: mod_base = OTHER; note = 2'-O-methylcytidine-3'-phosphate
  modified_base 12: mod_base = OTHER; note = 2'-O-methylcytidine-3'-phosphate
  modified_base 13: mod_base = OTHER; note = 2'-O-methyladenosine-3'-phosphate
  modified_base 14: mod_base = OTHER; note = 2'-deoxy-2'-fluoroguanosine-3'-phosphate
  modified_base 15: mod_base = OTHER; note = 2'-O-methylcytidine-3'-phosphate
  modified_base 16: mod_base = OTHER; note = 2'-deoxy-2'-fluoroadenosine-3'-phosphate
  modified_base 17: mod_base = OTHER; note = 2'-O-methyluridine-3'-phosphate
  modified_base 18: mod_base = OTHER; note = 2'-O-methylguanosine-3'-phosphate
  modified_base 19: mod_base = OTHER; note = 2'-O-methylcytidine-3'-phosphate
  modified_base 20: mod_base = OTHER; note = 2'-O-methyluridine-3'-phosphate
  modified_base 21: mod_base = OTHER; note = 2'-O-methyladenosine-3'-phosphorothioate
  modified_base 22: mod_base = OTHER; note = 2'-O-methyladenosine-3'-phosphorothioate
  modified_base 23: mod_base = OTHER; note = 2'-O-methyladenosine
tcagttatttccagcatgctaaa

SEQ ID NO: 1221 - RNA, 23 nt, synthetic construct
  source 1..23: mol_type = other RNA
  modified_base 1: mod_base = OTHER; note = 2'-O-methyluridine-3'-phosphorothioate 5'-(E)-Vinylphosphonate
  modified_base 2: mod_base = OTHER; note = 2'-deoxy-2'-fluorocytidine-3'-phosphorothioate
  modified_base 3: mod_base = OTHER; note = 2'-O-methylcytidine-3'-phosphate
  modified_base 4: mod_base = OTHER; note = 2'-O-methyladenosine-3'-phosphate
  modified_base 5: mod_base = OTHER; note = 2'-O-methylguanosine-3'-phosphate
  modified_base 6: mod_base = OTHER; note = 2'-deoxy-2'-fluorocytidine-3'-phosphate
  modified_base 7: mod_base = OTHER; note = 2'-O-methyladenosine-3'-phosphate
  modified_base 8: mod_base = OTHER; note = 2'-O-methylguanosine-3'-phosphate
  modified_base 9: mod_base = OTHER; note = 2'-O-methyluridine-3'-phosphate
  modified_base 10: mod_base = OTHER; note = 2'-O-methylcytidine-3'-phosphate
  modified_base 11: mod_base = OTHER; note = 2'-O-methyladenosine-3'-phosphate
  modified_base 12: mod_base = OTHER; note = 2'-O-methylguanosine-3'-phosphate
  modified_base 13: mod_base = OTHER; note = 2'-O-methyladenosine-3'-phosphate
  modified_base 14: mod_base = OTHER; note = 2'-deoxy-2'-fluoroadenosine-3'-phosphate
  modified_base 15: mod_base = OTHER; note = 2'-O-methyladenosine-3'-phosphate
  modified_base 16: mod_base = OTHER; note = 2'-deoxy-2'-fluoroadenosine-3'-phosphate
  modified_base 17: mod_base = OTHER; note = 2'-O-methyluridine-3'-phosphate
  modified_base 18: mod_base = OTHER; note = 2'-O-methyladenosine-3'-phosphate
  modified_base 19: mod_base = OTHER; note = 2'-O-methyladenosine-3'-phosphate
  modified_base 20: mod_base = OTHER; note = 2'-O-methylcytidine-3'-phosphate
  modified_base 21: mod_base = OTHER; note = 2'-O-methyladenosine-3'-phosphorothioate
  modified_base 22: mod_base = OTHER; note = 2'-O-methylcytidine-3'-phosphorothioate
  modified_base 23: mod_base = OTHER; note = 2'-O-methyladenosine
tccagcagtcagaaaataacaca

SEQ ID NO: 1222 - RNA, 23 nt, synthetic construct
  source 1..23: mol_type = other RNA
  modified_base 1: mod_base = OTHER; note = 2'-O-methyluridine-3'-phosphorothioate 5'-(E)-Vinylphosphonate
  modified_base 2: mod_base = OTHER; note = 2'-deoxy-2'-fluorocytidine-3'-phosphorothioate
  modified_base 3: mod_base = OTHER; note = 2'-O-methylcytidine-3'-phosphate
  modified_base 4: mod_base = OTHER; note = 2'-O-methyladenosine-3'-phosphate
  modified_base 5: mod_base = OTHER; note = 2'-O-methylguanosine-3'-phosphate
  modified_base 6: mod_base = OTHER; note = 2'-deoxy-2'-fluoroadenosine-3'-phosphate
  modified_base 7: mod_base = OTHER; note = 2'-O-methyladenosine-3'-phosphate
  modified_base 8: mod_base = OTHER; note = 2'-O-methylguanosine-3'-phosphate
  modified_base 9: mod_base = OTHER; note = 2'-O-methyluridine-3'-phosphate
  modified_base 10: mod_base = OTHER; note = 2'-O-methylcytidine-3'-phosphate
  modified_base 11: mod_base = OTHER; note = 2'-O-methyladenosine-3'-phosphate
  modified_base 12: mod_base = OTHER; note = 2'-O-methylguanosine-3'-phosphate
  modified_base 13: mod_base = OTHER; note = 2'-O-methyladenosine-3'-phosphate
  modified_base 14: mod_base = OTHER; note = 2'-deoxy-2'-fluoroadenosine-3'-phosphate
  modified_base 15: mod_base = OTHER; note = 2'-O-methyladenosine-3'-phosphate
  modified_base 16: mod_base = OTHER; note = 2'-deoxy-2'-fluoroadenosine-3'-phosphate
  modified_base 17: mod_base = OTHER; note = 2'-O-methyluridine-3'-phosphate
  modified_base 18: mod_base = OTHER; note = 2'-O-methyladenosine-3'-phosphate
  modified_base 19: mod_base = OTHER; note = 2'-O-methyladenosine-3'-phosphate
  modified_base 20: mod_base = OTHER; note = 2'-O-methylcytidine-3'-phosphate
  modified_base 21: mod_base = OTHER; note = 2'-O-methyladenosine-3'-phosphorothioate
  modified_base 22: mod_base = OTHER; note = 2'-O-methylcytidine-3'-phosphorothioate
  modified_base 23: mod_base = OTHER; note = 2'-O-methyladenosine
tccagaagtcagaaaataacaca

SEQ ID NO: 1223 - RNA, 23 nt, synthetic construct
  source 1..23: mol_type = other RNA
  modified_base 1: mod_base = OTHER; note = 2'-O-methyluridine-3'-phosphorothioate 5'-(E)-Vinylphosphonate
  modified_base 2: mod_base = OTHER; note = 2'-deoxy-2'-fluorouridine-3'-phosphorothioate
  modified_base 3: mod_base = OTHER; note = 2'-O-methylcytidine-3'-phosphate
  modified_base 4: mod_base = OTHER; note = 2'-O-methylcytidine-3'-phosphate
  modified_base 5: mod_base = OTHER; note = 2'-O-methyladenosine-3'-phosphate
  modified_base 6: mod_base = OTHER; note = 2'-deoxy-2'-fluoroguanosine-3'-phosphate
  modified_base 7: mod_base = OTHER; note = 2'-O-methylcytidine-3'-phosphate
  modified_base 8: mod_base = OTHER; note = 2'-O-methyladenosine-3'-phosphate
  modified_base 9: mod_base = OTHER; note = 2'-O-methylguanosine-3'-phosphate
  modified_base 10: mod_base = OTHER; note = 2'-O-methyluridine-3'-phosphate
  modified_base 11: mod_base = OTHER; note = 2'-O-methylcytidine-3'-phosphate
  modified_base 12: mod_base = OTHER; note = 2'-O-methyladenosine-3'-phosphate
  modified_base 13: mod_base = OTHER; note = 2'-O-methylguanosine-3'-phosphate
  modified_base 14: mod_base = OTHER; note = 2'-deoxy-2'-fluoroadenosine-3'-phosphate
  modified_base 15: mod_base = OTHER; note = 2'-O-methyladenosine-3'-phosphate
  modified_base 16: mod_base = OTHER; note = 2'-deoxy-2'-fluoroadenosine-3'-phosphate
  modified_base 17: mod_base = OTHER; note = 2'-O-methyladenosine-3'-phosphate
  modified_base 18: mod_base = OTHER; note = 2'-O-methyluridine-3'-phosphate
  modified_base 19: mod_base = OTHER; note = 2'-O-methyladenosine-3'-phosphate
  modified_base 20: mod_base = OTHER; note = 2'-O-methyladenosine-3'-phosphate
  modified_base 21: mod_base = OTHER; note = 2'-O-methylcytidine-3'-phosphorothioate
  modified_base 22: mod_base = OTHER; note = 2'-O-methyladenosine-3'-phosphorothioate
  modified_base 23: mod_base = OTHER; note = 2'-O-methylcytidine
ttccagcagtcagaaaataacac

SEQ ID NO: 1224 - RNA, 23 nt, synthetic construct
  source 1..23: mol_type = other RNA
  modified_base 1: mod_base = OTHER; note = 2'-O-methyluridine-3'-phosphorothioate 5'-(E)-Vinylphosphonate
  modified_base 2: mod_base = OTHER; note = 2'-deoxy-2'-fluorouridine-3'-phosphorothioate
  modified_base 3: mod_base = OTHER; note = 2'-O-methylcytidine-3'-phosphate
  modified_base 4: mod_base = OTHER; note = 2'-O-methylcytidine-3'-phosphate
  modified_base 5: mod_base = OTHER; note = 2'-O-methyladenosine-3'-phosphate
  modified_base 6: mod_base = OTHER; note = 2'-deoxy-2'-fluoroguanosine-3'-phosphate
  modified_base 7: mod_base = OTHER; note = 2'-O-methyladenosine-3'-phosphate
  modified_base 8: mod_base = OTHER; note = 2'-O-methyladenosine-3'-phosphate
  modified_base 9: mod_base = OTHER; note = 2'-O-methylguanosine-3'-phosphate
  modified_base 10: mod_base = OTHER; note = 2'-O-methyluridine-3'-phosphate
  modified_base 11: mod_base = OTHER; note = 2'-O-methylcytidine-3'-phosphate
  modified_base 12: mod_base = OTHER; note = 2'-O-methyladenosine-3'-phosphate
  modified_base 13: mod_base = OTHER; note = 2'-O-methylguanosine-3'-phosphate
  modified_base 14: mod_base = OTHER; note = 2'-deoxy-2'-fluoroadenosine-3'-phosphate
  modified_base 15: mod_base = OTHER; note = 2'-O-methyladenosine-3'-phosphate
  modified_base 16: mod_base = OTHER; note = 2'-deoxy-2'-fluoroadenosine-3'-phosphate
  modified_base 17: mod_base = OTHER; note = 2'-O-methyladenosine-3'-phosphate
  modified_base 18: mod_base = OTHER; note = 2'-O-methyluridine-3'-phosphate
  modified_base 19: mod_base = OTHER; note = 2'-O-methyladenosine-3'-phosphate
  modified_base 20: mod_base = OTHER; note = 2'-O-methyladenosine-3'-phosphate
  modified_base 21: mod_base = OTHER; note = 2'-O-methylcytidine-3'-phosphorothioate
  modified_base 22: mod_base = OTHER; note = 2'-O-methyladenosine-3'-phosphorothioate
  modified_base 23: mod_base = OTHER; note = 2'-O-methylcytidine
ttccagaagtcagaaaataacac

SEQ ID NO: 1225 - RNA, 23 nt, synthetic construct
  source 1..23: mol_type = other RNA
  modified_base 1: mod_base = OTHER; note = 2'-O-methyluridine-3'-phosphorothioate 5'-(E)-Vinylphosphonate
  modified_base 2: mod_base = OTHER; note = 2'-deoxy-2'-fluoroadenosine-3'-phosphorothioate
  modified_base 3: mod_base = OTHER; note = 2'-O-methyluridine-3'-phosphate
  modified_base 4: mod_base = OTHER; note = 2'-O-methylcytidine-3'-phosphate
  modified_base 5: mod_base = OTHER; note = 2'-O-methylcytidine-3'-phosphate
  modified_base 6: mod_base = OTHER; note = 2'-deoxy-2'-fluoroadenosine-3'-phosphate
  modified_base 7: mod_base = OTHER; note = 2'-O-methylguanosine-3'-phosphate
  modified_base 8: mod_base = OTHER; note = 2'-O-methylcytidine-3'-phosphate
  modified_base 9: mod_base = OTHER; note = 2'-O-methyladenosine-3'-phosphate
  modified_base 10: mod_base = OTHER; note = 2'-O-methylguanosine-3'-phosphate
  modified_base 11: mod_base = OTHER; note = 2'-O-methyluridine-3'-phosphate
  modified_base 12: mod_base = OTHER; note = 2'-O-methylcytidine-3'-phosphate
  modified_base 13: mod_base = OTHER; note = 2'-O-methyladenosine-3'-phosphate
  modified_base 14: mod_base = OTHER; note = 2'-deoxy-2'-fluoroguanosine-3'-phosphate
  modified_base 15: mod_base = OTHER; note = 2'-O-methyladenosine-3'-phosphate
  modified_base 16: mod_base = OTHER; note = 2'-deoxy-2'-fluoroadenosine-3'-phosphate
  modified_base 17: mod_base = OTHER; note = 2'-O-methyladenosine-3'-phosphate
  modified_base 18: mod_base = OTHER; note = 2'-O-methyladenosine-3'-phosphate
  modified_base 19: mod_base = OTHER; note = 2'-O-methyluridine-3'-phosphate
  modified_base 20: mod_base = OTHER; note = 2'-O-methyladenosine-3'-phosphate
  modified_base 21: mod_base = OTHER; note = 2'-O-methyladenosine-3'-phosphorothioate
  modified_base 22: mod_base = OTHER; note = 2'-O-methylcytidine-3'-phosphorothioate
  modified_base 23: mod_base = OTHER; note = 2'-O-methyladenosine
tatccagcagtcagaaaataaca

SEQ ID NO: 1226 - RNA, 23 nt, synthetic construct
  source 1..23: mol_type = other RNA
  modified_base 1: mod_base = OTHER; note = 2'-O-methyluridine-3'-phosphorothioate 5'-(E)-Vinylphosphonate
  modified_base 2: mod_base = OTHER; note = 2'-deoxy-2'-fluoroadenosine-3'-phosphorothioate
  modified_base 3: mod_base = OTHER; note = 2'-O-methyluridine-3'-phosphate
  modified_base 4: mod_base = OTHER; note = 2'-O-methylcytidine-3'-phosphate
  modified_base 5: mod_base = OTHER; note = 2'-O-methylcytidine-3'-phosphate
  modified_base 6: mod_base = OTHER; note = 2'-deoxy-2'-fluoroadenosine-3'-phosphate
  modified_base 7: mod_base = OTHER; note = 2'-O-methyladenosine-3'-phosphate
  modified_base 8: mod_base = OTHER; note = 2'-O-methylcytidine-3'-phosphate
  modified_base 9: mod_base = OTHER; note = 2'-O-methyladenosine-3'-phosphate
  modified_base 10: mod_base = OTHER; note = 2'-O-methylguanosine-3'-phosphate
  modified_base 11: mod_base = OTHER; note = 2'-O-methyluridine-3'-phosphate
  modified_base 12: mod_base = OTHER; note = 2'-O-methylcytidine-3'-phosphate
  modified_base 13: mod_base = OTHER; note = 2'-O-methyladenosine-3'-phosphate
  modified_base 14: mod_base = OTHER; note = 2'-deoxy-2'-fluoroguanosine-3'-phosphate
  modified_base 15: mod_base = OTHER; note = 2'-O-methyladenosine-3'-phosphate
  modified_base 16: mod_base = OTHER; note = 2'-deoxy-2'-fluoroadenosine-3'-phosphate
  modified_base 17: mod_base = OTHER; note = 2'-O-methyladenosine-3'-phosphate
  modified_base 18: mod_base = OTHER; note = 2'-O-methyladenosine-3'-phosphate
  modified_base 19: mod_base = OTHER; note = 2'-O-methyluridine-3'-phosphate
  modified_base 20: mod_base = OTHER; note = 2'-O-methyladenosine-3'-phosphate
  modified_base 21: mod_base = OTHER; note = 2'-O-methyladenosine-3'-phosphorothioate
  modified_base 22: mod_base = OTHER; note = 2'-O-methylcytidine-3'-phosphorothioate
  modified_base 23: mod_base = OTHER; note = 2'-O-methyladenosine
tatccaacagtcagaaaataaca

SEQ ID NO: 1227 - RNA, 23 nt, synthetic construct
  source 1..23: mol_type = other RNA
  modified_base 1: mod_base = OTHER; note = 2'-O-methyluridine-3'-phosphorothioate 5'-(E)-Vinylphosphonate
  modified_base 2: mod_base = OTHER; note = 2'-deoxy-2'-fluoroadenosine-3'-phosphorothioate
  modified_base 3: mod_base = OTHER; note = 2'-O-methyladenosine-3'-phosphate
  modified_base 4: mod_base = OTHER; note = 2'-O-methyluridine-3'-phosphate
  modified_base 5: mod_base = OTHER; note = 2'-O-methylcytidine-3'-phosphate
  modified_base 6: mod_base = OTHER; note = 2'-deoxy-2'-fluorocytidine-3'-phosphate
  modified_base 7: mod_base = OTHER; note = 2'-O-methyladenosine-3'-phosphate
  modified_base 8: mod_base = OTHER; note = 2'-O-methylguanosine-3'-phosphate
  modified_base 9: mod_base = OTHER; note = 2'-O-methylcytidine-3'-phosphate
  modified_base 10: mod_base = OTHER; note = 2'-O-methyladenosine-3'-phosphate
  modified_base 11: mod_base = OTHER; note = 2'-O-methylguanosine-3'-phosphate
  modified_base 12: mod_base = OTHER; note = 2'-O-methyluridine-3'-phosphate
  modified_base 13: mod_base = OTHER; note = 2'-O-methylcytidine-3'-phosphate
  modified_base 14: mod_base = OTHER; note = 2'-deoxy-2'-fluoroadenosine-3'-phosphate
  modified_base 15: mod_base = OTHER; note = 2'-O-methylguanosine-3'-phosphate
  modified_base 16: mod_base = OTHER; note = 2'-deoxy-2'-fluoroadenosine-3'-phosphate
  modified_base 17: mod_base = OTHER; note = 2'-O-methyladenosine-3'-phosphate
  modified_base 18: mod_base = OTHER; note = 2'-O-methyladenosine-3'-phosphate
  modified_base 19: mod_base = OTHER; note = 2'-O-methyladenosine-3'-phosphate
  modified_base 20: mod_base = OTHER; note = 2'-O-methyluridine-3'-phosphate
  modified_base 21: mod_base = OTHER; note = 2'-O-methyladenosine-3'-phosphorothioate
  modified_base 22: mod_base = OTHER; note = 2'-O-methyladenosine-3'-phosphorothioate
  modified_base 23: mod_base = OTHER; note = 2'-O-methylcytidine
taatccagcagtcagaaaataac

SEQ ID NO: 1228 - RNA, 23 nt, synthetic construct
  source 1..23: mol_type = other RNA
  modified_base 1: mod_base = OTHER; note = 2'-O-methyluridine-3'-phosphorothioate 5'-(E)-Vinylphosphonate
  modified_base 2: mod_base = OTHER; note = 2'-deoxy-2'-fluoroadenosine-3'-phosphorothioate
  modified_base 3: mod_base = OTHER; note = 2'-O-methyladenosine-3'-phosphate
  modified_base 4: mod_base = OTHER; note = 2'-O-methyluridine-3'-phosphate
  modified_base 5: mod_base = OTHER; note = 2'-O-methylcytidine-3'-phosphate
  modified_base 6: mod_base = OTHER; note = 2'-deoxy-2'-fluoroadenosine-3'-phosphate
  modified_base 7: mod_base = OTHER; note = 2'-O-methyladenosine-3'-phosphate
  modified_base 8: mod_base = OTHER; note = 2'-O-methylguanosine-3'-phosphate
  modified_base 9: mod_base = OTHER; note = 2'-O-methylcytidine-3'-phosphate
  modified_base 10: mod_base = OTHER; note = 2'-O-methyladenosine-3'-phosphate
  modified_base 11: mod_base = OTHER; note = 2'-O-methylguanosine-3'-phosphate
  modified_base 12: mod_base = OTHER; note = 2'-O-methyluridine-3'-phosphate
  modified_base 13: mod_base = OTHER; note = 2'-O-methylcytidine-3'-phosphate
  modified_base 14: mod_base = OTHER; note = 2'-deoxy-2'-fluoroadenosine-3'-phosphate
  modified_base 15: mod_base = OTHER; note = 2'-O-methylguanosine-3'-phosphate
  modified_base 16: mod_base = OTHER; note = 2'-deoxy-2'-fluoroadenosine-3'-phosphate
  modified_base 17: mod_base = OTHER; note = 2'-O-methyladenosine-3'-phosphate
  modified_base 18: mod_base = OTHER; note = 2'-O-methyladenosine-3'-phosphate
  modified_base 19: mod_base = OTHER; note = 2'-O-methyladenosine-3'-phosphate
  modified_base 20: mod_base = OTHER; note = 2'-O-methyluridine-3'-phosphate
  modified_base 21: mod_base = OTHER; note = 2'-O-methyladenosine-3'-phosphorothioate
  modified_base 22: mod_base = OTHER; note = 2'-O-methyladenosine-3'-phosphorothioate
  modified_base 23: mod_base = OTHER; note = 2'-O-methylcytidine
taatcaagcagtcagaaaataac

SEQ ID NO: 1229 - RNA, 23 nt, synthetic construct
  source 1..23: mol_type = other RNA
  modified_base 1: mod_base = OTHER; note = 2'-O-methyluridine-3'-phosphorothioate 5'-(E)-Vinylphosphonate
  modified_base 2: mod_base = OTHER; note = 2'-deoxy-2'-fluoroguanosine-3'-phosphorothioate
  modified_base 3: mod_base = OTHER; note = 2'-O-methyladenosine-3'-phosphate
  modified_base 4: mod_base = OTHER; note = 2'-O-methyladenosine-3'-phosphate
  modified_base 5: mod_base = OTHER; note = 2'-O-methyluridine-3'-phosphate
  modified_base 6: mod_base = OTHER; note = 2'-deoxy-2'-fluorocytidine-3'-phosphate
  modified_base 7: mod_base = OTHER; note = 2'-O-methylcytidine-3'-phosphate
  modified_base 8: mod_base = OTHER; note = 2'-O-methyladenosine-3'-phosphate
  modified_base 9: mod_base = OTHER; note = 2'-O-methylguanosine-3'-phosphate
  modified_base 10: mod_base = OTHER; note = 2'-O-methylcytidine-3'-phosphate
  modified_base 11: mod_base = OTHER; note = 2'-O-methyladenosine-3'-phosphate
  modified_base 12: mod_base = OTHER; note = 2'-O-methylguanosine-3'-phosphate
  modified_base 13: mod_base = OTHER; note = 2'-O-methyluridine-3'-phosphate
  modified_base 14: mod_base = OTHER; note = 2'-deoxy-2'-fluorocytidine-3'-phosphate
  modified_base 15: mod_base = OTHER; note = 2'-O-methyladenosine-3'-phosphate
  modified_base 16: mod_base = OTHER; note = 2'-deoxy-2'-fluoroguanosine-3'-phosphate
  modified_base 17: mod_base = OTHER; note = 2'-O-methyladenosine-3'-phosphate
  modified_base 18: mod_base = OTHER; note = 2'-O-methyladenosine-3'-phosphate
  modified_base 19: mod_base = OTHER; note = 2'-O-methyladenosine-3'-phosphate
  modified_base 20: mod_base = OTHER; note = 2'-O-methyladenosine-3'-phosphate
  modified_base 21: mod_base = OTHER; note = 2'-O-methyluridine-3'-phosphorothioate
  modified_base 22: mod_base = OTHER; note = 2'-O-methyladenosine-3'-phosphorothioate
  modified_base 23: mod_base = OTHER; note = 2'-O-methyladenosine
tgaatccagcagtcagaaaataa

SEQ ID NO: 1230 - RNA, 23 nt, synthetic construct
  source 1..23: mol_type = other RNA
  modified_base 1: mod_base = OTHER; note = 2'-O-methyluridine-3'-phosphorothioate 5'-(E)-Vinylphosphonate
  modified_base 2: mod_base = OTHER; note = 2'-deoxy-2'-fluoroguanosine-3'-phosphorothioate
  modified_base 3: mod_base = OTHER; note = 2'-O-methyladenosine-3'-phosphate
  modified_base 4: mod_base = OTHER; note = 2'-O-methyladenosine-3'-phosphate
  modified_base 5: mod_base = OTHER; note = 2'-O-methyluridine-3'-phosphate
  modified_base 6: mod_base = OTHER; note = 2'-deoxy-2'-fluorocytidine-3'-phosphate
  modified_base 7: mod_base = OTHER; note = 2'-O-methyladenosine-3'-phosphate
  modified_base 8: mod_base = OTHER; note = 2'-O-methyladenosine-3'-phosphate
  modified_base 9: mod_base = OTHER; note = 2'-O-methylguanosine-3'-phosphate
  modified_base 10: mod_base = OTHER; note = 2'-O-methylcytidine-3'-phosphate
  modified_base 11: mod_base = OTHER; note = 2'-O-methyladenosine-3'-phosphate
  modified_base 12: mod_base = OTHER; note = 2'-O-methylguanosine-3'-phosphate
  modified_base 13: mod_base = OTHER; note = 2'-O-methyluridine-3'-phosphate
  modified_base 14: mod_base = OTHER; note = 2'-deoxy-2'-fluorocytidine-3'-phosphate
  modified_base 15: mod_base = OTHER; note = 2'-O-methyladenosine-3'-phosphate
  modified_base 16: mod_base = OTHER; note = 2'-deoxy-2'-fluoroguanosine-3'-phosphate
  modified_base 17: mod_base = OTHER; note = 2'-O-methyladenosine-3'-phosphate
  modified_base 18: mod_base = OTHER; note = 2'-O-methyladenosine-3'-phosphate
  modified_base 19: mod_base = OTHER; note = 2'-O-methyladenosine-3'-phosphate
  modified_base 20: mod_base = OTHER; note = 2'-O-methyladenosine-3'-phosphate
  modified_base 21: mod_base = OTHER; note = 2'-O-methyluridine-3'-phosphorothioate
  modified_base 22: mod_base = OTHER; note = 2'-O-methyladenosine-3'-phosphorothioate
  modified_base 23: mod_base = OTHER; note = 2'-O-methyladenosine
tgaatcaagcagtcagaaaataa

SEQ ID NO: 1231 - RNA, 23 nt, synthetic construct
  source 1..23: mol_type = other RNA
  modified_base 1: mod_base = OTHER; note = 2'-O-methyluridine-3'-phosphorothioate 5'-(E)-Vinylphosphonate
  modified_base 2: mod_base = OTHER; note = 2'-deoxy-2'-fluorouridine-3'-phosphorothioate
  modified_base 3: mod_base = OTHER; note = 2'-O-methyladenosine-3'-phosphate
  modified_base 4: mod_base = OTHER; note = 2'-O-methylcytidine-3'-phosphate
  modified_base 5: mod_base = OTHER; note = 2'-O-methyladenosine-3'-phosphate
  modified_base 6: mod_base = OTHER; note = 2'-deoxy-2'-fluoroguanosine-3'-phosphate
  modified_base 7: mod_base = OTHER; note = 2'-O-methyladenosine-3'-phosphate
  modified_base 8: mod_base = OTHER; note = 2'-O-methyladenosine-3'-phosphate
  modified_base 9: mod_base = OTHER; note = 2'-O-methyluridine-3'-phosphate
  modified_base 10: mod_base = OTHER; note = 2'-O-methylcytidine-3'-phosphate
  modified_base 11: mod_base = OTHER; note = 2'-O-methylcytidine-3'-phosphate
  modified_base 12: mod_base = OTHER; note = 2'-O-methyladenosine-3'-phosphate
  modified_base 13: mod_base = OTHER; note = 2'-O-methylguanosine-3'-phosphate
  modified_base 14: mod_base = OTHER; note = 2'-deoxy-2'-fluorocytidine-3'-phosphate
  modified_base 15: mod_base = OTHER; note = 2'-O-methyladenosine-3'-phosphate
  modified_base 16: mod_base = OTHER; note = 2'-deoxy-2'-fluoroguanosine-3'-phosphate
  modified_base 17: mod_base = OTHER; note = 2'-O-methyluridine-3'-phosphate
  modified_base 18: mod_base = OTHER; note = 2'-O-methylcytidine-3'-phosphate
  modified_base 19: mod_base = OTHER; note = 2'-O-methyladenosine-3'-phosphate
  modified_base 20: mod_base = OTHER; note = 2'-O-methylguanosine-3'-phosphate
  modified_base 21: mod_base = OTHER; note = 2'-O-methyladenosine-3'-phosphorothioate
  modified_base 22: mod_base = OTHER; note = 2'-O-methyladenosine-3'-phosphorothioate
  modified_base 23: mod_base = OTHER; note = 2'-O-methyladenosine
ttacagaatccagcagtcagaaa

SEQ ID NO: 1232 - RNA, 23 nt, synthetic construct
  source 1..23: mol_type = other RNA
  modified_base 1: mod_base = OTHER; note = 2'-O-methyluridine-3'-phosphorothioate 5'-(E)-Vinylphosphonate
  modified_base 2: mod_base = OTHER; note = 2'-deoxy-2'-fluorocytidine-3'-phosphorothioate
  modified_base 3: mod_base = OTHER; note = 2'-O-methyladenosine-3'-phosphate
  modified_base 4: mod_base = OTHER; note = 2'-O-methyluridine-3'-phosphate
  modified_base 5: mod_base = OTHER; note = 2'-O-methyladenosine-3'-phosphate
  modified_base 6: mod_base = OTHER; note = 2'-deoxy-2'-fluoroguanosine-3'-phosphate
  modified_base 7: mod_base = OTHER; note = 2'-O-methylcytidine-3'-phosphate
  modified_base 8: mod_base = OTHER; note = 2'-O-methyluridine-3'-phosphate
  modified_base 9: mod_base = OTHER; note = 2'-O-methyladenosine-3'-phosphate
  modified_base 10: mod_base = OTHER; note = 2'-O-methyluridine-3'-phosphate
  modified_base 11: mod_base = OTHER; note = 2'-O-methylguanosine-3'-phosphate
  modified_base 12: mod_base = OTHER; note = 2'-O-methyluridine-3'-phosphate
  modified_base 13: mod_base = OTHER; note = 2'-O-methylcytidine-3'-phosphate
  modified_base 14: mod_base = OTHER; note = 2'-deoxy-2'-fluoroadenosine-3'-phosphate
  modified_base 15: mod_base = OTHER; note = 2'-O-methylcytidine-3'-phosphate
  modified_base 16: mod_base = OTHER; note = 2'-deoxy-2'-fluorocytidine-3'-phosphate
  modified_base 17: mod_base = OTHER; note = 2'-O-methyluridine-3'-phosphate
  modified_base 18: mod_base = OTHER; note = 2'-O-methyluridine-3'-phosphate
  modified_base 19: mod_base = OTHER; note = 2'-O-methyladenosine-3'-phosphate
  modified_base 20: mod_base = OTHER; note = 2'-O-methylcytidine-3'-phosphate
  modified_base 21: mod_base = OTHER; note = 2'-O-methyluridine-3'-phosphorothioate
  modified_base 22: mod_base = OTHER; note = 2'-O-methyladenosine-3'-phosphorothioate
  modified_base 23: mod_base = OTHER; note = 2'-O-methylcytidine
tcatagctatgtcaccttactac

SEQ ID NO: 1233 - RNA, 23 nt, synthetic construct
  source 1..23: mol_type = other RNA
  modified_base 1: mod_base = OTHER; note = 2'-O-methyluridine-3'-phosphorothioate 5'-(E)-Vinylphosphonate
  modified_base 2: mod_base = OTHER; note = 2'-deoxy-2'-fluorouridine-3'-phosphorothioate
  modified_base 3: mod_base = OTHER; note = 2'-O-methylcytidine-3'-phosphate
  modified_base 4: mod_base = OTHER; note = 2'-O-methyladenosine-3'-phosphate
  modified_base 5: mod_base = OTHER; note = 2'-O-methyluridine-3'-phosphate
  modified_base 6: mod_base = OTHER; note = 2'-deoxy-2'-fluoroadenosine-3'-phosphate
  modified_base 7: mod_base = OTHER; note = 2'-O-methylguanosine-3'-phosphate
  modified_base 8: mod_base = OTHER; note = 2'-O-methylcytidine-3'-phosphate
  modified_base 9: mod_base = OTHER; note = 2'-O-methyluridine-3'-phosphate
  modified_base 10: mod_base = OTHER; note = 2'-O-methyladenosine-3'-phosphate
  modified_base 11: mod_base = OTHER; note = 2'-O-methyluridine-3'-phosphate
  modified_base 12: mod_base = OTHER; note = 2'-O-methylguanosine-3'-phosphate
  modified_base 13: mod_base = OTHER; note = 2'-O-methyluridine-3'-phosphate
  modified_base 14: mod_base = OTHER; note = 2'-deoxy-2'-fluorocytidine-3'-phosphate
  modified_base 15: mod_base = OTHER; note = 2'-O-methyladenosine-3'-phosphate
  modified_base 16: mod_base = OTHER; note = 2'-deoxy-2'-fluorocytidine-3'-phosphate
  modified_base 17: mod_base = OTHER; note = 2'-O-methylcytidine-3'-phosphate
  modified_base 18: mod_base = OTHER; note = 2'-O-methyluridine-3'-phosphate
  modified_base 19: mod_base = OTHER; note = 2'-O-methyluridine-3'-phosphate
  modified_base 20: mod_base = OTHER; note = 2'-O-methyladenosine-3'-phosphate
  modified_base 21: mod_base = OTHER; note = 2'-O-methylcytidine-3'-phosphorothioate
  modified_base 22: mod_base = OTHER; note = 2'-O-methyluridine-3'-phosphorothioate
  modified_base 23: mod_base = OTHER; note = 2'-O-methyladenosine
ttcatagctatgtcaccttacta

SEQ ID NO: 1234 - RNA, 23 nt, synthetic construct
  source 1..23: mol_type = other RNA
  modified_base 1: mod_base = OTHER; note = 2'-O-methyluridine-3'-phosphorothioate 5'-(E)-Vinylphosphonate
  modified_base 2: mod_base = OTHER; note = 2'-deoxy-2'-fluorouridine-3'-phosphorothioate
  modified_base 3: mod_base = OTHER; note = 2'-O-methylcytidine-3'-phosphate
  modified_base 4: mod_base = OTHER; note = 2'-O-methyladenosine-3'-phosphate
  modified_base 5: mod_base = OTHER; note = 2'-O-methyluridine-3'-phosphate
  modified_base 6: mod_base = OTHER; note = 2'-deoxy-2'-fluoroadenosine-3'-phosphate
  modified_base 7: mod_base = OTHER; note = 2'-O-methyladenosine-3'-phosphate
  modified_base 8: mod_base = OTHER; note = 2'-O-methylcytidine-3'-phosphate
  modified_base 9: mod_base = OTHER; note = 2'-O-methyluridine-3'-phosphate
  modified_base 10: mod_base = OTHER; note = 2'-O-methyladenosine-3'-phosphate
  modified_base 11: mod_base = OTHER; note = 2'-O-methyluridine-3'-phosphate
  modified_base 12: mod_base = OTHER; note = 2'-O-methylguanosine-3'-phosphate
  modified_base 13: mod_base = OTHER; note = 2'-O-methyluridine-3'-phosphate
  modified_base 14: mod_base = OTHER; note = 2'-deoxy-2'-fluorocytidine-3'-phosphate
  modified_base 15: mod_base = OTHER; note = 2'-O-methyladenosine-3'-phosphate
  modified_base 16: mod_base = OTHER; note = 2'-deoxy-2'-fluorocytidine-3'-phosphate
  modified_base 17: mod_base = OTHER; note = 2'-O-methylcytidine-3'-phosphate
  modified_base 18: mod_base = OTHER; note = 2'-O-methyluridine-3'-phosphate
  modified_base 19: mod_base = OTHER; note = 2'-O-methyluridine-3'-phosphate
  modified_base 20: mod_base = OTHER; note = 2'-O-methyladenosine-3'-phosphate
  modified_base 21: mod_base = OTHER; note = 2'-O-methylcytidine-3'-phosphorothioate
  modified_base 22: mod_base = OTHER; note = 2'-O-methyluridine-3'-phosphorothioate
  modified_base 23: mod_base = OTHER; note = 2'-O-methyladenosine
ttcataactatgtcaccttacta

SEQ ID NO: 1235 - RNA, 23 nt, synthetic construct
  source 1..23: mol_type = other RNA
  modified_base 1: mod_base = OTHER; note = 2'-O-methyluridine-3'-phosphorothioate 5'-(E)-Vinylphosphonate
  modified_base 2: mod_base = OTHER; note = 2'-deoxy-2'-fluoroguanosine-3'-phosphorothioate
  modified_base 3: mod_base = OTHER; note = 2'-O-methyluridine-3'-phosphate
  modified_base 4: mod_base = OTHER; note = 2'-O-methylcytidine-3'-phosphate
  modified_base 5: mod_base = OTHER; note = 2'-O-methyladenosine-3'-phosphate
  modified_base 6: mod_base = OTHER; note = 2'-deoxy-2'-fluorouridine-3'-phosphate
  modified_base 7: mod_base = OTHER; note = 2'-O-methyladenosine-3'-phosphate
  modified_base 8: mod_base = OTHER; note = 2'-O-methylguanosine-3'-phosphate
  modified_base 9: mod_base = OTHER; note = 2'-O-methylcytidine-3'-phosphate
  modified_base 10: mod_base = OTHER; note = 2'-O-methyluridine-3'-phosphate
  modified_base 11: mod_base = OTHER; note = 2'-O-methyladenosine-3'-phosphate
  modified_base 12: mod_base = OTHER; note = 2'-O-methyluridine-3'-phosphate
  modified_base 13: mod_base = OTHER; note = 2'-O-methylguanosine-3'-phosphate
  modified_base 14: mod_base = OTHER; note = 2'-deoxy-2'-fluorouridine-3'-phosphate
  modified_base 15: mod_base = OTHER; note = 2'-O-methylcytidine-3'-phosphate
  modified_base 16: mod_base = OTHER; note = 2'-deoxy-2'-fluoroadenosine-3'-phosphate
  modified_base 17: mod_base = OTHER; note = 2'-O-methylcytidine-3'-phosphate
  modified_base 18: mod_base = OTHER; note = 2'-O-methylcytidine-3'-phosphate
  modified_base 19: mod_base = OTHER; note = 2'-O-methyluridine-3'-phosphate
  modified_base 20: mod_base = OTHER; note = 2'-O-methyluridine-3'-phosphate
  modified_base 21: mod_base = OTHER; note = 2'-O-methyladenosine-3'-phosphorothioate
  modified_base 22: mod_base = OTHER; note = 2'-O-methylcytidine-3'-phosphorothioate
  modified_base 23: mod_base = OTHER; note = 2'-O-methyluridine
tgtcatagctatgtcaccttact

SEQ ID NO: 1236 - RNA, 23 nt, synthetic construct
  source 1..23: mol_type = other RNA
  modified_base 1: mod_base = OTHER; note = 2'-O-methyluridine-3'-phosphorothioate 5'-(E)-Vinylphosphonate
  modified_base 2: mod_base = OTHER; note = 2'-deoxy-2'-fluoroadenosine-3'-phosphorothioate
  modified_base 3: mod_base = OTHER; note = 2'-O-methylguanosine-3'-phosphate
  modified_base 4: mod_base = OTHER; note = 2'-O-methyluridine-3'-phosphate
  modified_base 5: mod_base = OTHER; note = 2'-O-methyluridine-3'-phosphate
  modified_base 6: mod_base = OTHER; note = 2'-deoxy-2'-fluorouridine-3'-phosphate
  modified_base 7: mod_base = OTHER; note = 2'-O-methyladenosine-3'-phosphate
  modified_base 8: mod_base = OTHER; note = 2'-O-methyluridine-3'-phosphate
  modified_base 9: mod_base = OTHER; note = 2'-O-methyluridine-3'-phosphate
  modified_base 10: mod_base = OTHER; note = 2'-O-methyluridine-3'-phosphate
  modified_base 11: mod_base = OTHER; note = 2'-O-methyluridine-3'-phosphate
  modified_base 12: mod_base = OTHER; note = 2'-O-methyluridine-3'-phosphate
  modified_base 13: mod_base = OTHER; note = 2'-O-methyladenosine-3'-phosphate
  modified_base 14: mod_base = OTHER; note = 2'-deoxy-2'-fluoroadenosine-3'-phosphate
  modified_base 15: mod_base = OTHER; note = 2'-O-methylcytidine-3'-phosphate
  modified_base 16: mod_base = OTHER; note = 2'-deoxy-2'-fluoroadenosine-3'-phosphate
  modified_base 17: mod_base = OTHER; note = 2'-O-methyladenosine-3'-phosphate
  modified_base 18: mod_base = OTHER; note = 2'-O-methyladenosine-3'-phosphate
  modified_base 19: mod_base = OTHER; note = 2'-O-methyluridine-3'-phosphate
  modified_base 20: mod_base = OTHER; note = 2'-O-methylguanosine-3'-phosphate
  modified_base 21: mod_base = OTHER; note = 2'-O-methyluridine-3'-phosphorothioate
  modified_base 22: mod_base = OTHER; note = 2'-O-methylcytidine-3'-phosphorothioate
  modified_base 23: mod_base = OTHER; note = 2'-O-methyladenosine
tagtttatttttaacaaatgtca

SEQ ID NO: 1237 - RNA, 23 nt, synthetic construct
  source 1..23: mol_type = other RNA
  modified_base 1: mod_base = OTHER; note = 2'-O-methyluridine-3'-phosphate 5'phosphate
  modified_base 2: mod_base = OTHER; note = 2'-deoxy-2'-fluorouridine-3'-phosphate
  modified_base 3: mod_base = OTHER; note = 2'-O-methyluridine-3'-phosphate
  modified_base 4: mod_base = OTHER; note = 2'-O-methylcytidine-3'-phosphate
  modified_base 5: mod_base = OTHER; note = 2'-O-methyladenosine-3'-phosphate
  modified_base 6: mod_base = OTHER; note = 2'-deoxy-2'-fluorocytidine-3'-phosphate
  modified_base 7: mod_base = OTHER; note = 2'-O-methyladenosine-3'-phosphate
  modified_base 8: mod_base = OTHER; note = 2'-O-methyluridine-3'-phosphate
  modified_base 9: mod_base = OTHER; note = 2'-O-methyladenosine-3'-phosphate
  modified_base 10: mod_base = OTHER; note = 2'-O-methylguanosine-3'-phosphate
  modified_base 11: mod_base = OTHER; note = 2'-O-methyluridine-3'-phosphate
  modified_base 12: mod_base = OTHER; note = 2'-O-methylcytidine-3'-phosphate
  modified_base 13: mod_base = OTHER; note = 2'-O-methyladenosine-3'-phosphate
  modified_base 14: mod_base = OTHER; note = 2'-deoxy-2'-fluorouridine-3'-phosphate
  modified_base 15: mod_base = OTHER; note = 2'-O-methylcytidine-3'-phosphate
  modified_base 16: mod_base = OTHER; note = 2'-deoxy-2'-fluorocytidine-3'-phosphate
  modified_base 17: mod_base = OTHER; note = 2'-O-methyladenosine-3'-phosphate
  modified_base 18: mod_base = OTHER; note = 2'-O-methylguanosine-3'-phosphate
  modified_base 19: mod_base = OTHER; note = 2'-O-methyladenosine-3'-phosphate
  modified_base 20: mod_base = OTHER; note = 2'-O-methylguanosine-3'-phosphate
  modified_base 21: mod_base = OTHER; note = 2'-O-methylguanosine-3'-phosphate
  modified_base 22: mod_base = OTHER; note = 2'-O-methylcytidine-3'-phosphate
  modified_base 23: mod_base = OTHER; note = 2'-O-methyluridine
tttcacatagtcatccagaggct

SEQ ID NO: 1238 - RNA, 23 nt, synthetic construct
  source 1..23: mol_type = other RNA
  modified_base 1: mod_base = OTHER; note = 2'-O-methyluridine-3'-phosphate 5'phosphate
  modified_base 2: mod_base = OTHER; note = 2'-deoxy-2'-fluorouridine-3'-phosphate
  modified_base 3: mod_base = OTHER; note = 2'-O-methylguanosine-3'-phosphate
  modified_base 4: mod_base = OTHER; note = 2'-O-methylguanosine-3'-phosphate
  modified_base 5: mod_base = OTHER; note = 2'-O-methyladenosine-3'-phosphate
  modified_base 6: mod_base = OTHER; note = 2'-deoxy-2'-fluoroadenosine-3'-phosphate
  modified_base 7: mod_base = OTHER; note = 2'-O-methyladenosine-3'-phosphate
  modified_base 8: mod_base = OTHER; note = 2'-O-methyluridine-3'-phosphate
  modified_base 9: mod_base = OTHER; note = 2'-O-methyluridine-3'-phosphate
  modified_base 10: mod_base = OTHER; note = 2'-O-methyluridine-3'-phosphate
  modified_base 11: mod_base = OTHER; note = 2'-O-methylguanosine-3'-phosphate
  modified_base 12: mod_base = OTHER; note = 2'-O-methylguanosine-3'-phosphate
  modified_base 13: mod_base = OTHER; note = 2'-O-methyladenosine-3'-phosphate
  modified_base 14: mod_base = OTHER; note = 2'-deoxy-2'-fluoroadenosine-3'-phosphate
  modified_base 15: mod_base = OTHER; note = 2'-O-methylguanosine-3'-phosphate
  modified_base 16: mod_base = OTHER; note = 2'-deoxy-2'-fluoroguanosine-3'-phosphate
  modified_base 17: mod_base = OTHER; note = 2'-O-methyladenosine-3'-phosphate
  modified_base 18: mod_base = OTHER; note = 2'-O-methyladenosine-3'-phosphate
  modified_base 19: mod_base = OTHER; note = 2'-O-methyluridine-3'-phosphate
  modified_base 20: mod_base = OTHER; note = 2'-O-methylguanosine-3'-phosphate
  modified_base 21: mod_base = OTHER; note = 2'-O-methyluridine-3'-phosphate
  modified_base 22: mod_base = OTHER; note = 2'-O-methyladenosine-3'-phosphate
  modified_base 23: mod_base = OTHER; note = 2'-O-methyluridine
ttggaaatttggaaggaatgtat

SEQ ID NO: 1239 - RNA, 23 nt, synthetic construct
  source 1..23: mol_type = other RNA
  modified_base 1: mod_base = OTHER; note = 2'-O-methyluridine-3'-phosphate 5'phosphate
  modified_base 2: mod_base = OTHER; note = 2'-deoxy-2'-fluoroadenosine-3'-phosphate
  modified_base 3: mod_base = OTHER; note = 2'-O-methylguanosine-3'-phosphate
  modified_base 4: mod_base = OTHER; note = 2'-O-methyluridine-3'-phosphate
  modified_base 5: mod_base = OTHER; note = 2'-O-methyladenosine-3'-phosphate
  modified_base 6: mod_base = OTHER; note = 2'-deoxy-2'-fluoroadenosine-3'-phosphate
  modified_base 7: mod_base = OTHER; note = 2'-O-methyluridine-3'-phosphate
  modified_base 8: mod_base = OTHER; note = 2'-O-methyluridine-3'-phosphate
  modified_base 9: mod_base = OTHER; note = 2'-O-methylcytidine-3'-phosphate
  modified_base 10: mod_base = OTHER; note = 2'-O-methyluridine-3'-phosphate
  modified_base 11: mod_base = OTHER; note = 2'-O-methyluridine-3'-phosphate
  modified_base 12: mod_base = OTHER; note = 2'-O-methylcytidine-3'-phosphate
  modified_base 13: mod_base = OTHER; note = 2'-O-methyluridine-3'-phosphate
  modified_base 14: mod_base = OTHER; note = 2'-deoxy-2'-fluorouridine-3'-phosphate
  modified_base 15: mod_base = OTHER; note = 2'-O-methylcytidine-3'-phosphate
  modified_base 16: mod_base = OTHER; note = 2'-deoxy-2'-fluoroadenosine-3'-phosphate
  modified_base 17: mod_base = OTHER; note = 2'-O-methylguanosine-3'-phosphate
  modified_base 18: mod_base = OTHER; note = 2'-O-methylguanosine-3'-phosphate
  modified_base 19: mod_base = OTHER; note = 2'-O-methyluridine-3'-phosphate
  modified_base 20: mod_base = OTHER; note = 2'-O-methyluridine-3'-phosphate
  modified_base 21: mod_base = OTHER; note = 2'-O-methylcytidine-3'-phosphate
  modified_base 22: mod_base = OTHER; note = 2'-O-methyluridine-3'-phosphate
  modified_base 23: mod_base = OTHER; note = 2'-O-methyluridine
tagtaattcttcttcaggttctt

SEQ ID NO: 1240 - RNA, 23 nt, synthetic construct
  source 1..23: mol_type = other RNA
  modified_base 1: mod_base = OTHER; note = 2'-O-methyluridine-3'-phosphate 5'phosphate
  modified_base 2: mod_base = OTHER; note = 2'-deoxy-2'-fluorouridine-3'-phosphate
  modified_base 3: mod_base = OTHER; note = 2'-O-methyluridine-3'-phosphate
  modified_base 4: mod_base = OTHER; note = 2'-O-methylcytidine-3'-phosphate
  modified_base 5: mod_base = OTHER; note = 2'-O-methyladenosine-3'-phosphate
  modified_base 6: mod_base = OTHER; note = 2'-deoxy-2'-fluorouridine-3'-phosphate
  modified_base 7: mod_base = OTHER; note = 2'-O-methylcytidine-3'-phosphate
  modified_base 8: mod_base = OTHER; note = 2'-O-methylcytidine-3'-phosphate
  modified_base 9: mod_base = OTHER; note = 2'-O-methyladenosine-3'-phosphate
  modified_base 10: mod_base = OTHER; note = 2'-O-methyladenosine-3'-phosphate
  modified_base 11: mod_base = OTHER; note = 2'-O-methyladenosine-3'-phosphate
  modified_base 12: mod_base = OTHER; note = 2'-O-methyluridine-3'-phosphate
  modified_base 13: mod_base = OTHER; note = 2'-O-methyluridine-3'-phosphate
  modified_base 14: mod_base = OTHER; note = 2'-deoxy-2'-fluorouridine-3'-phosphate
  modified_base 15: mod_base = OTHER; note = 2'-O-methyluridine-3'-phosphate
  modified_base 16: mod_base = OTHER; note = 2'-deoxy-2'-fluorouridine-3'-phosphate
  modified_base 17: mod_base = OTHER; note = 2'-O-methylguanosine-3'-phosphate
  modified_base 18: mod_base = OTHER; note = 2'-O-methylcytidine-3'-phosphate
  modified_base 19: mod_base = OTHER; note = 2'-O-methyladenosine-3'-phosphate
  modified_base 20: mod_base = OTHER; note = 2'-O-methylguanosine-3'-phosphate
  modified_base 21: mod_base = OTHER; note = 2'-O-methylguanosine-3'-phosphate
  modified_base 22: mod_base = OTHER; note = 2'-O-methylguanosine-3'-phosphate
  modified_base 23: mod_base = OTHER; note = 2'-O-methylguanosine
tttcatccaaatttttgcagggg

SEQ ID NO: 1241 - RNA, 23 nt, synthetic construct
  source 1..23: mol_type = other RNA
  modified_base 1: mod_base = OTHER; note = 2'-O-methyluridine-3'-phosphate 5'phosphate
  modified_base 2: mod_base = OTHER; note = 2'-deoxy-2'-fluoroadenosine-3'-phosphate
  modified_base 3: mod_base = OTHER; note = 2'-O-methyladenosine-3'-phosphate
  modified_base 4: mod_base = OTHER; note = 2'-O-methylguanosine-3'-phosphate
  modified_base 5: mod_base = OTHER; note = 2'-O-methyladenosine-3'-phosphate
  modified_base 6: mod_base = OTHER; note = 2'-deoxy-2'-fluorocytidine-3'-phosphate
  modified_base 7: mod_base = OTHER; note = 2'-O-methyluridine-3'-phosphate
  modified_base 8: mod_base = OTHER; note = 2'-O-methylguanosine-3'-phosphate
  modified_base 9: mod_base = OTHER; note = 2'-O-methyladenosine-3'-phosphate
  modified_base 10: mod_base = OTHER; note = 2'-O-methylcytidine-3'-phosphate
  modified_base 11: mod_base = OTHER; note = 2'-O-methyladenosine-3'-phosphate
  modified_base 12: mod_base = OTHER; note = 2'-O-methylcytidine-3'-phosphate
  modified_base 13: mod_base = OTHER; note = 2'-O-methyluridine-3'-phosphate
  modified_base 14: mod_base = OTHER; note = 2'-deoxy-2'-fluorouridine-3'-phosphate
  modified_base 15: mod_base = OTHER; note = 2'-O-methylcytidine-3'-phosphate
  modified_base 16: mod_base = OTHER; note = 2'-deoxy-2'-fluorouridine-3'-phosphate
  modified_base 17: mod_base = OTHER; note = 2'-O-methyluridine-3'-phosphate
  modified_base 18: mod_base = OTHER; note = 2'-O-methyluridine-3'-phosphate
  modified_base 19: mod_base = OTHER; note = 2'-O-methylcytidine-3'-phosphate
  modified_base 20: mod_base = OTHER; note = 2'-O-methylcytidine-3'-phosphate
  modified_base 21: mod_base = OTHER; note = 2'-O-methyluridine-3'-phosphate
  modified_base 22: mod_base = OTHER; note = 2'-O-methylguanosine-3'-phosphate
  modified_base 23: mod_base = OTHER; note = 2'-O-methyluridine
taagactgacacttctttcctgt

SEQ ID NO: 1242 - RNA, 23 nt, synthetic construct
  source 1..23: mol_type = other RNA
  modified_base 1: mod_base = OTHER; note = 2'-O-methyluridine-3'-phosphate 5'phosphate
  modified_base 2: mod_base = OTHER; note = 2'-deoxy-2'-fluoroguanosine-3'-phosphate
  modified_base 3: mod_base = OTHER; note = 2'-O-methyladenosine-3'-phosphate
  modified_base 4: mod_base = OTHER; note = 2'-O-methyladenosine-3'-phosphate
  modified_base 5: mod_base = OTHER; note = 2'-O-methyladenosine-3'-phosphate
  modified_base 6: mod_base = OTHER; note = 2'-deoxy-2'-fluorocytidine-3'-phosphate
  modified_base 7: mod_base = OTHER; note = 2'-O-methyladenosine-3'-phosphate
  modified_base 8: mod_base = OTHER; note = 2'-O-methyluridine-3'-phosphate
  modified_base 9: mod_base = OTHER; note = 2'-O-methyluridine-3'-phosphate
  modified_base 10: mod_base = OTHER; note = 2'-O-methylcytidine-3'-phosphate
  modified_base 11: mod_base = OTHER; note = 2'-O-methylguanosine-3'-phosphate
  modified_base 12: mod_base = OTHER; note = 2'-O-methylguanosine-3'-phosphate
  modified_base 13: mod_base = OTHER; note = 2'-O-methyluridine-3'-phosphate
  modified_base 14: mod_base = OTHER; note = 2'-deoxy-2'-fluorocytidine-3'-phosphate
  modified_base 15: mod_base = OTHER; note = 2'-O-methylcytidine-3'-phosphate
  modified_base 16: mod_base = OTHER; note = 2'-deoxy-2'-fluoroguanosine-3'-phosphate
  modified_base 17: mod_base = OTHER; note = 2'-O-methylguanosine-3'-phosphate
  modified_base 18: mod_base = OTHER; note = 2'-O-methyluridine-3'-phosphate
  modified_base 19: mod_base = OTHER; note = 2'-O-methylcytidine-3'-phosphate
  modified_base 20: mod_base = OTHER; note = 2'-O-methyladenosine-3'-phosphate
  modified_base 21: mod_base = OTHER; note = 2'-O-methylguanosine-3'-phosphate
  modified_base 22: mod_base = OTHER; note = 2'-O-methylcytidine-3'-phosphate
  modified_base 23: mod_base = OTHER; note = 2'-O-methylguanosine
tgaaacattcggtccggtcagcg

SEQ ID NO: 1243 - RNA, 23 nt, synthetic construct
  source 1..23: mol_type = other RNA
  modified_base 1: mod_base = OTHER; note = 2'-O-methyluridine-3'-phosphate 5'phosphate
  modified_base 2: mod_base = OTHER; note = 2'-deoxy-2'-fluoroadenosine-3'-phosphate
  modified_base 3: mod_base = OTHER; note = 2'-O-methylguanosine-3'-phosphate
  modified_base 4: mod_base = OTHER; note = 2'-O-methyladenosine-3'-phosphate
  modified_base 5: mod_base = OTHER; note = 2'-O-methyladenosine-3'-phosphate
  modified_base 6: mod_base = OTHER; note = 2'-deoxy-2'-fluoroadenosine-3'-phosphate
  modified_base 7: mod_base = OTHER; note = 2'-O-methylcytidine-3'-phosphate
  modified_base 8: mod_base = OTHER; note = 2'-O-methyluridine-3'-phosphate
  modified_base 9: mod_base = OTHER; note = 2'-O-methylcytidine-3'-phosphate
  modified_base 10: mod_base = OTHER; note = 2'-O-methyladenosine-3'-phosphate
  modified_base 11: mod_base = OTHER; note = 2'-O-methyluridine-3'-phosphate
  modified_base 12: mod_base = OTHER; note = 2'-O-methyladenosine-3'-phosphate
  modified_base 13: mod_base = OTHER; note = 2'-O-methylguanosine-3'-phosphate
  modified_base 14: mod_base = OTHER; note = 2'-deoxy-2'-fluorocytidine-3'-phosphate
  modified_base 15: mod_base = OTHER; note = 2'-O-methylguanosine-3'-phosphate
  modified_base 16: mod_base = OTHER; note = 2'-deoxy-2'-fluoroadenosine-3'-phosphate
  modified_base 17: mod_base = OTHER; note = 2'-O-methyluridine-3'-phosphate
  modified_base 18: mod_base = OTHER; note = 2'-O-methyluridine-3'-phosphate
  modified_base 19: mod_base = OTHER; note = 2'-O-methylguanosine-3'-phosphate
  modified_base 20: mod_base = OTHER; note = 2'-O-methylcytidine-3'-phosphate
  modified_base 21: mod_base = OTHER; note = 2'-O-methyladenosine-3'-phosphate
  modified_base 22: mod_base = OTHER; note = 2'-O-methylcytidine-3'-phosphate
  modified_base 23: mod_base = OTHER; note = 2'-O-methyladenosine
tagaaactcatagcgattgcaca

SEQ ID NO: 1244 - RNA, 23 nt, synthetic construct
  source 1..23: mol_type = other RNA
  modified_base 1: mod_base = OTHER; note = 2'-O-methyluridine-3'-phosphate 5'phosphate
  modified_base 2: mod_base = OTHER; note = 2'-deoxy-2'-fluoroguanosine-3'-phosphate
  modified_base 3: mod_base = OTHER; note = 2'-O-methyladenosine-3'-phosphate
  modified_base 4: mod_base = OTHER; note = 2'-O-methyladenosine-3'-phosphate
  modified_base 5: mod_base = OTHER; note = 2'-O-methyladenosine-3'-phosphate
  modified_base 6: mod_base = OTHER; note = 2'-deoxy-2'-fluorocytidine-3'-phosphate
  modified_base 7: mod_base = OTHER; note = 2'-O-methyladenosine-3'-phosphate
  modified_base 8: mod_base = OTHER; note = 2'-O-methylcytidine-3'-phosphate
  modified_base 9: mod_base = OTHER; note = 2'-O-methylguanosine-3'-phosphate
  modified_base 10: mod_base = OTHER; note = 2'-O-methyladenosine-3'-phosphate
  modified_base 11: mod_base = OTHER; note = 2'-O-methyladenosine-3'-phosphate
  modified_base 12: mod_base = OTHER; note = 2'-O-methylcytidine-3'-phosphate
  modified_base 13: mod_base = OTHER; note = 2'-O-methyladenosine-3'-phosphate
  modified_base 14: mod_base = OTHER; note = 2'-deoxy-2'-fluorouridine-3'-phosphate
  modified_base 15: mod_base = OTHER; note = 2'-O-methyladenosine-3'-phosphate
  modified_base 16: mod_base = OTHER; note = 2'-deoxy-2'-fluoroguanosine-3'-phosphate
  modified_base 17: mod_base = OTHER; note = 2'-O-methyladenosine-3'-phosphate
  modified_base 18: mod_base = OTHER; note = 2'-O-methylcytidine-3'-phosphate
  modified_base 19: mod_base = OTHER; note = 2'-O-methyladenosine-3'-phosphate
  modified_base 20: mod_base = OTHER; note = 2'-O-methylcytidine-3'-phosphate
  modified_base 21: mod_base = OTHER; note = 2'-O-methylcytidine-3'-phosphate
  modified_base 22: mod_base = OTHER; note = 2'-O-methyladenosine-3'-phosphate
  modified_base 23: mod_base = OTHER; note = 2'-O-methylguanosine
tgaaacacgaacatagacaccag

SEQ ID NO: 1245 - RNA, 23 nt, synthetic construct
  source 1..23: mol_type = other RNA
  modified_base 1: mod_base = OTHER; note = 2'-O-methyluridine-3'-phosphate 5'phosphate
  modified_base 2: mod_base = OTHER; note = 2'-deoxy-2'-fluorouridine-3'-phosphate
  modified_base 3: mod_base = OTHER; note = 2'-O-methylguanosine-3'-phosphate
  modified_base 4: mod_base = OTHER; note = 2'-O-methyladenosine-3'-phosphate
  modified_base 5: mod_base = OTHER; note = 2'-O-methyladenosine-3'-phosphate
  modified_base 6: mod_base = OTHER; note = 2'-deoxy-2'-fluoroadenosine-3'-phosphate
  modified_base 7: mod_base = OTHER; note = 2'-O-methylcytidine-3'-phosphate
  modified_base 8: mod_base = OTHER; note = 2'-O-methyladenosine-3'-phosphate
  modified_base 9: mod_base = OTHER; note = 2'-O-methylcytidine-3'-phosphate
  modified_base 10: mod_base = OTHER; note = 2'-O-methylguanosine-3'-phosphate
  modified_base 11: mod_base = OTHER; note = 2'-O-methyladenosine-3'-phosphate
  modified_base 12: mod_base = OTHER; note = 2'-O-methyladenosine-3'-phosphate
  modified_base 13: mod_base = OTHER; note = 2'-O-methylcytidine-3'-phosphate
  modified_base 14: mod_base = OTHER; note = 2'-deoxy-2'-fluoroadenosine-3'-phosphate
  modified_base 15: mod_base = OTHER; note = 2'-O-methyluridine-3'-phosphate
  modified_base 16: mod_base = OTHER; note = 2'-deoxy-2'-fluoroadenosine-3'-phosphate
  modified_base 17: mod_base = OTHER; note = 2'-O-methylguanosine-3'-phosphate
  modified_base 18: mod_base = OTHER; note = 2'-O-methyladenosine-3'-phosphate
  modified_base 19: mod_base = OTHER; note = 2'-O-methylcytidine-3'-phosphate
  modified_base 20: mod_base = OTHER; note = 2'-O-methyladenosine-3'-phosphate
  modified_base 21: mod_base = OTHER; note = 2'-O-methylcytidine-3'-phosphate
  modified_base 22: mod_base = OTHER; note = 2'-O-methylcytidine-3'-phosphate
  modified_base 23: mod_base = OTHER; note = 2'-O-methyladenosine
ttgaaacacgaacatagacacca

SEQ ID NO: 1246 - RNA, 23 nt, synthetic construct
  source 1..23: mol_type = other RNA
  modified_base 1: mod_base = OTHER; note = 2'-O-methyluridine-3'-phosphate 5'phosphate
  modified_base 2: mod_base = OTHER; note = 2'-deoxy-2'-fluorouridine-3'-phosphate
  modified_base 3: mod_base = OTHER; note = 2'-O-methyluridine-3'-phosphate
  modified_base 4: mod_base = OTHER; note = 2'-O-methylguanosine-3'-phosphate
  modified_base 5: mod_base = OTHER; note = 2'-O-methyladenosine-3'-phosphate
  modified_base 6: mod_base = OTHER; note = 2'-deoxy-2'-fluoroadenosine-3'-phosphate
  modified_base 7: mod_base = OTHER; note = 2'-O-methyladenosine-3'-phosphate
  modified_base 8: mod_base = OTHER; note = 2'-O-methylcytidine-3'-phosphate
  modified_base 9: mod_base = OTHER; note = 2'-O-methyladenosine-3'-phosphate
  modified_base 10: mod_base = OTHER; note = 2'-O-methylcytidine-3'-phosphate
  modified_base 11: mod_base = OTHER; note = 2'-O-methylguanosine-3'-phosphate
  modified_base 12: mod_base = OTHER; note = 2'-O-methyladenosine-3'-phosphate
  modified_base 13: mod_base = OTHER; note = 2'-O-methyladenosine-3'-phosphate
  modified_base 14: mod_base = OTHER; note = 2'-deoxy-2'-fluorocytidine-3'-phosphate
  modified_base 15: mod_base = OTHER; note = 2'-O-methyladenosine-3'-phosphate
  modified_base 16: mod_base = OTHER; note = 2'-deoxy-2'-fluorouridine-3'-phosphate
  modified_base 17: mod_base = OTHER; note = 2'-O-methyladenosine-3'-phosphate
  modified_base 18: mod_base = OTHER; note = 2'-O-methylguanosine-3'-phosphate
  modified_base 19: mod_base = OTHER; note = 2'-O-methyladenosine-3'-phosphate
  modified_base 20: mod_base = OTHER; note = 2'-O-methylcytidine-3'-phosphate
  modified_base 21: mod_base = OTHER; note = 2'-O-methyladenosine-3'-phosphate
  modified_base 22: mod_base = OTHER; note = 2'-O-methylcytidine-3'-phosphate
  modified_base 23: mod_base = OTHER; note = 2'-O-methylcytidine
tttgaaacacgaacatagacacc

SEQ ID NO: 1247 - RNA, 23 nt, synthetic construct
  source 1..23: mol_type = other RNA
  modified_base 1: mod_base = OTHER; note = 2'-O-methyluridine-3'-phosphate 5'phosphate
  modified_base 2: mod_base = OTHER; note = 2'-deoxy-2'-fluorouridine-3'-phosphate
  modified_base 3: mod_base = OTHER; note = 2'-O-methyluridine-3'-phosphate
  modified_base 4: mod_base = OTHER; note = 2'-O-methyladenosine-3'-phosphate
  modified_base 5: mod_base = OTHER; note = 2'-O-methyladenosine-3'-phosphate
  modified_base 6: mod_base = OTHER; note = 2'-deoxy-2'-fluorouridine-3'-phosphate
  modified_base 7: mod_base = OTHER; note = 2'-O-methyluridine-3'-phosphate
  modified_base 8: mod_base = OTHER; note = 2'-O-methyladenosine-3'-phosphate
  modified_base 9: mod_base = OTHER; note = 2'-O-methyluridine-3'-phosphate
  modified_base 10: mod_base = OTHER; note = 2'-O-methyluridine-3'-phosphate
  modified_base 11: mod_base = OTHER; note = 2'-O-methyluridine-3'-phosphate
  modified_base 12: mod_base = OTHER; note = 2'-O-methylcytidine-3'-phosphate
  modified_base 13: mod_base = OTHER; note = 2'-O-methyluridine-3'-phosphate
  modified_base 14: mod_base = OTHER; note = 2'-deoxy-2'-fluorocytidine-3'-phosphate
  modified_base 15: mod_base = OTHER; note = 2'-O-methyladenosine-3'-phosphate
  modified_base 16: mod_base = OTHER; note = 2'-deoxy-2'-fluorouridine-3'-phosphate
  modified_base 17: mod_base = OTHER; note = 2'-O-methylcytidine-3'-phosphate
  modified_base 18: mod_base = OTHER; note = 2'-O-methyladenosine-3'-phosphate
  modified_base 19: mod_base = OTHER; note = 2'-O-methylcytidine-3'-phosphate
  modified_base 20: mod_base = OTHER; note = 2'-O-methyluridine-3'-phosphate
  modified_base 21: mod_base = OTHER; note = 2'-O-methylcytidine-3'-phosphate
  modified_base 22: mod_base = OTHER; note = 2'-O-methylcytidine-3'-phosphate
  modified_base 23: mod_base = OTHER; note = 2'-O-methylcytidine
tttaattatttctcatcactccc

SEQ ID NO: 1248 - RNA, 23 nt, synthetic construct
  source 1..23: mol_type = other RNA
  modified_base 1: mod_base = OTHER; note = 2'-O-methyluridine-3'-phosphate 5'phosphate
  modified_base 2: mod_base = OTHER; note = 2'-deoxy-2'-fluorocytidine-3'-phosphate
  modified_base 3: mod_base = OTHER; note = 2'-O-methyladenosine-3'-phosphate
  modified_base 4: mod_base = OTHER; note = 2'-O-methyladenosine-3'-phosphate
  modified_base 5: mod_base = OTHER; note = 2'-O-methyluridine-3'-phosphate
  modified_base 6: mod_base = OTHER; note = 2'-deoxy-2'-fluorouridine-3'-phosphate
  modified_base 7: mod_base = OTHER; note = 2'-O-methyladenosine-3'-phosphate
  modified_base 8: mod_base = OTHER; note = 2'-O-methyladenosine-3'-phosphate
  modified_base 9: mod_base = OTHER; note = 2'-O-methyluridine-3'-phosphate
  modified_base 10: mod_base = OTHER; note = 2'-O-methyluridine-3'-phosphate
  modified_base 11: mod_base = OTHER; note = 2'-O-methyladenosine-3'-phosphate
  modified_base 12: mod_base = OTHER; note = 2'-O-methyluridine-3'-phosphate
  modified_base 13: mod_base = OTHER; note = 2'-O-methyluridine-3'-phosphate
  modified_base 14: mod_base = OTHER; note = 2'-deoxy-2'-fluorouridine-3'-phosphate
  modified_base 15: mod_base = OTHER; note = 2'-O-methylcytidine-3'-phosphate
  modified_base 16: mod_base = OTHER; note = 2'-deoxy-2'-fluorouridine-3'-phosphate
  modified_base 17: mod_base = OTHER; note = 2'-O-methylcytidine-3'-phosphate
  modified_base 18: mod_base = OTHER; note = 2'-O-methyladenosine-3'-phosphate
  modified_base 19: mod_base = OTHER; note = 2'-O-methyluridine-3'-phosphate
  modified_base 20: mod_base = OTHER; note = 2'-O-methylcytidine-3'-phosphate
  modified_base 21: mod_base = OTHER; note = 2'-O-methyladenosine-3'-phosphate
  modified_base 22: mod_base = OTHER; note = 2'-O-methylcytidine-3'-phosphate
  modified_base 23: mod_base = OTHER; note = 2'-O-methyluridine
tcaattaattatttctcatcact

SEQ ID NO: 1249 - RNA, 23 nt, synthetic construct
  source 1..23: mol_type = other RNA
  modified_base 1: mod_base = OTHER; note = 2'-O-methyluridine-3'-phosphate 5'phosphate
  modified_base 2: mod_base = OTHER; note = 2'-deoxy-2'-fluorouridine-3'-phosphate
  modified_base 3: mod_base = OTHER; note = 2'-O-methylcytidine-3'-phosphate
  modified_base 4: mod_base = OTHER; note = 2'-O-methylcytidine-3'-phosphate
  modified_base 5: mod_base = OTHER; note = 2'-O-methyladenosine-3'-phosphate
  modified_base 6: mod_base = OTHER; note = 2'-deoxy-2'-fluoroadenosine-3'-phosphate
  modified_base 7: mod_base = OTHER; note = 2'-O-methyluridine-3'-phosphate
  modified_base 8: mod_base = OTHER; note = 2'-O-methyluridine-3'-phosphate
  modified_base 9: mod_base = OTHER; note = 2'-O-methyladenosine-3'-phosphate
  modified_base 10: mod_base = OTHER; note = 2'-O-methyladenosine-3'-phosphate
  modified_base 11: mod_base = OTHER; note = 2'-O-methyluridine-3'-phosphate
  modified_base 12: mod_base = OTHER; note = 2'-O-methyluridine-3'-phosphate
  modified_base 13: mod_base = OTHER; note = 2'-O-methyladenosine-3'-phosphate
  modified_base 14: mod_base = OTHER; note = 2'-deoxy-2'-fluorouridine-3'-phosphate
  modified_base 15: mod_base = OTHER; note = 2'-O-methyluridine-3'-phosphate
  modified_base 16: mod_base = OTHER; note = 2'-deoxy-2'-fluorouridine-3'-phosphate
  modified_base 17: mod_base = OTHER; note = 2'-O-methylcytidine-3'-phosphate
  modified_base 18: mod_base = OTHER; note = 2'-O-methyluridine-3'-phosphate
  modified_base 19: mod_base = OTHER; note = 2'-O-methylcytidine-3'-phosphate
  modified_base 20: mod_base = OTHER; note = 2'-O-methyladenosine-3'-phosphate
  modified_base 21: mod_base = OTHER; note = 2'-O-methyluridine-3'-phosphate
  modified_base 22: mod_base = OTHER; note = 2'-O-methylcytidine-3'-phosphate
  modified_base 23: mod_base = OTHER; note = 2'-O-methyladenosine
ttccaattaattatttctcatca

SEQ ID NO: 1250 - RNA, 23 nt, synthetic construct
  source 1..23: mol_type = other RNA
  modified_base 1: mod_base = OTHER; note = 2'-O-methyluridine-3'-phosphate 5'phosphate
  modified_base 2: mod_base = OTHER; note = 2'-deoxy-2'-fluorouridine-3'-phosphate
  modified_base 3: mod_base = OTHER; note = 2'-O-methylguanosine-3'-phosphate
  modified_base 4: mod_base = OTHER; note = 2'-O-methyluridine-3'-phosphate
  modified_base 5: mod_base = OTHER; note = 2'-O-methyladenosine-3'-phosphate
  modified_base 6: mod_base = OTHER; note = 2'-deoxy-2'-fluoroadenosine-3'-phosphate
  modified_base 7: mod_base = OTHER; note = 2'-O-methyladenosine-3'-phosphate
  modified_base 8: mod_base = OTHER; note = 2'-O-methyladenosine-3'-phosphate
  modified_base 9: mod_base = OTHER; note = 2'-O-methyluridine-3'-phosphate
  modified_base 10: mod_base = OTHER; note = 2'-O-methylguanosine-3'-phosphate
  modified_base 11: mod_base = OTHER; note = 2'-O-methyluridine-3'-phosphate
  modified_base 12: mod_base = OTHER; note = 2'-O-methyladenosine-3'-phosphate
  modified_base 13: mod_base = OTHER; note = 2'-O-methyluridine-3'-phosphate
  modified_base 14: mod_base = OTHER; note = 2'-deoxy-2'-fluorouridine-3'-phosphate
  modified_base 15: mod_base = OTHER; note = 2'-O-methyluridine-3'-phosphate
  modified_base 16: mod_base = OTHER; note = 2'-deoxy-2'-fluoroguanosine-3'-phosphate
  modified_base 17: mod_base = OTHER; note = 2'-O-methyluridine-3'-phosphate
  modified_base 18: mod_base = OTHER; note = 2'-O-methylcytidine-3'-phosphate
  modified_base 19: mod_base = OTHER; note = 2'-O-methylcytidine-3'-phosphate
  modified_base 20: mod_base = OTHER; note = 2'-O-methyluridine-3'-phosphate
  modified_base 21: mod_base = OTHER; note = 2'-O-methyluridine-3'-phosphate
  modified_base 22: mod_base = OTHER; note = 2'-O-methylcytidine-3'-phosphate
  modified_base 23: mod_base = OTHER; note = 2'-O-methyluridine
ttgtaaaatgtatttgtccttct

SEQ ID NO: 1251 - RNA, 23 nt, synthetic construct
  source 1..23: mol_type = other RNA
  modified_base 1: mod_base = OTHER; note = 2'-O-methyluridine-3'-phosphorothioate
  modified_base 2: mod_base = OTHER; note = 2'-deoxy-2'-fluorouridine-3'-phosphorothioate
  modified_base 3: mod_base = OTHER; note = 2'-O-methyluridine-3'-phosphate
  modified_base 4: mod_base = OTHER; note = 2'-O-methylcytidine-3'-phosphate
  modified_base 5: mod_base = OTHER; note = 2'-O-methyladenosine-3'-phosphate
  modified_base 6: mod_base = OTHER; note = 2'-deoxy-2'-fluorocytidine-3'-phosphate
  modified_base 7: mod_base = OTHER; note = 2'-O-methyladenosine-3'-phosphate
  modified_base 8: mod_base = OTHER; note = 2'-O-methyluridine-3'-phosphate
  modified_base 9: mod_base = OTHER; note = 2'-O-methyladenosine-3'-phosphate
  modified_base 10: mod_base = OTHER; note = 2'-O-methylguanosine-3'-phosphate
  modified_base 11: mod_base = OTHER; note = 2'-O-methyluridine-3'-phosphate
  modified_base 12: mod_base = OTHER; note = 2'-O-methylcytidine-3'-phosphate
  modified_base 13: mod_base = OTHER; note = 2'-O-methyladenosine-3'-phosphate
  modified_base 14: mod_base = OTHER; note = 2'-deoxy-2'-fluorouridine-3'-phosphate
  modified_base 15: mod_base = OTHER; note = 2'-O-methylcytidine-3'-phosphate
  modified_base 16: mod_base = OTHER; note = 2'-deoxy-2'-fluorocytidine-3'-phosphate
  modified_base 17: mod_base = OTHER; note = 2'-O-methyladenosine-3'-phosphate
  modified_base 18: mod_base = OTHER; note = 2'-O-methylguanosine-3'-phosphate
  modified_base 19: mod_base = OTHER; note = 2'-O-methyladenosine-3'-phosphate
  modified_base 20: mod_base = OTHER; note = 2'-O-methylguanosine-3'-phosphate
  modified_base 21: mod_base = OTHER; note = 2'-O-methylguanosine-3'-phosphorothioate
  modified_base 22: mod_base = OTHER; note = 2'-O-methylcytidine-3'-phosphorothioate
  modified_base 23: mod_base = OTHER; note = 2'-O-methyluridine
tttcacatagtcatccagaggct

SEQ ID NO: 1252 - RNA, 23 nt, synthetic construct
  source 1..23: mol_type = other RNA
  modified_base 1: mod_base = OTHER; note = 2'-O-methyluridine-3'-phosphorothioate
  modified_base 2: mod_base = OTHER; note = 2'-deoxy-2'-fluorouridine-3'-phosphorothioate
  modified_base 3: mod_base = OTHER; note = 2'-O-methylguanosine-3'-phosphate
  modified_base 4: mod_base = OTHER; note = 2'-O-methylguanosine-3'-phosphate
  modified_base 5: mod_base = OTHER; note = 2'-O-methyladenosine-3'-phosphate
  modified_base 6: mod_base = OTHER; note = 2'-deoxy-2'-fluoroadenosine-3'-phosphate
  modified_base 7: mod_base = OTHER; note = 2'-O-methyladenosine-3'-phosphate
  modified_base 8: mod_base = OTHER; note = 2'-O-methyluridine-3'-phosphate
  modified_base 9: mod_base = OTHER; note = 2'-O-methyluridine-3'-phosphate
  modified_base 10: mod_base = OTHER; note = 2'-O-methyluridine-3'-phosphate
  modified_base 11: mod_base = OTHER; note = 2'-O-methylguanosine-3'-phosphate
  modified_base 12: mod_base = OTHER; note = 2'-O-methylguanosine-3'-phosphate
  modified_base 13: mod_base = OTHER; note = 2'-O-methyladenosine-3'-phosphate
  modified_base 14: mod_base = OTHER; note = 2'-deoxy-2'-fluoroadenosine-3'-phosphate
  modified_base 15: mod_base = OTHER; note = 2'-O-methylguanosine-3'-phosphate
  modified_base 16: mod_base = OTHER; note = 2'-deoxy-2'-fluoroguanosine-3'-phosphate
  modified_base 17: mod_base = OTHER; note = 2'-O-methyladenosine-3'-phosphate
  modified_base 18: mod_base = OTHER; note = 2'-O-methyladenosine-3'-phosphate
  modified_base 19: mod_base = OTHER; note = 2'-O-methyluridine-3'-phosphate
  modified_base 20: mod_base = OTHER; note = 2'-O-methylguanosine-3'-phosphate
  modified_base 21: mod_base = OTHER; note = 2'-O-methyluridine-3'-phosphorothioate
  modified_base 22: mod_base = OTHER; note = 2'-O-methyladenosine-3'-phosphorothioate
  modified_base 23: mod_base = OTHER; note = 2'-O-methyluridine
ttggaaatttggaaggaatgtat

SEQ ID NO: 1253 - RNA, 23 nt, synthetic construct
  source 1..23: mol_type = other RNA
  modified_base 1: mod_base = OTHER; note = 2'-O-methyluridine-3'-phosphorothioate
  modified_base 2: mod_base = OTHER; note = 2'-deoxy-2'-fluoroadenosine-3'-phosphorothioate
  modified_base 3: mod_base = OTHER; note = 2'-O-methylguanosine-3'-phosphate
  modified_base 4: mod_base = OTHER; note = 2'-O-methyluridine-3'-phosphate
  modified_base 5: mod_base = OTHER; note = 2'-O-methyladenosine-3'-phosphate
  modified_base 6: mod_base = OTHER; note = 2'-deoxy-2'-fluoroadenosine-3'-phosphate
  modified_base 7: mod_base = OTHER; note = 2'-O-methyluridine-3'-phosphate
  modified_base 8: mod_base = OTHER; note = 2'-O-methyluridine-3'-phosphate
  modified_base 9: mod_base = OTHER; note = 2'-O-methylcytidine-3'-phosphate
  modified_base 10: mod_base = OTHER; note = 2'-O-methyluridine-3'-phosphate
  modified_base 11: mod_base = OTHER; note = 2'-O-methyluridine-3'-phosphate
  modified_base 12: mod_base = OTHER; note = 2'-O-methylcytidine-3'-phosphate
  modified_base 13: mod_base = OTHER; note = 2'-O-methyluridine-3'-phosphate
  modified_base 14: mod_base = OTHER; note = 2'-deoxy-2'-fluorouridine-3'-phosphate
  modified_base 15: mod_base = OTHER; note = 2'-O-methylcytidine-3'-phosphate
  modified_base 16: mod_base = OTHER; note = 2'-deoxy-2'-fluoroadenosine-3'-phosphate
  modified_base 17: mod_base = OTHER; note = 2'-O-methylguanosine-3'-phosphate
  modified_base 18: mod_base = OTHER; note = 2'-O-methylguanosine-3'-phosphate
  modified_base 19: mod_base = OTHER; note = 2'-O-methyluridine-3'-phosphate
  modified_base 20: mod_base = OTHER; note = 2'-O-methyluridine-3'-phosphate
  modified_base 21: mod_base = OTHER; note = 2'-O-methylcytidine-3'-phosphorothioate
  modified_base 22: mod_base = OTHER; note = 2'-O-methyluridine-3'-phosphorothioate
  modified_base 23: mod_base = OTHER; note = 2'-O-methyluridine
tagtaattcttcttcaggttctt

SEQ ID NO: 1254 - RNA, 23 nt, synthetic construct
  source 1..23: mol_type = other RNA
  modified_base 1: mod_base = OTHER; note = 2'-O-methyluridine-3'-phosphorothioate
  modified_base 2: mod_base = OTHER; note = 2'-deoxy-2'-fluorouridine-3'-phosphorothioate
  modified_base 3: mod_base = OTHER; note = 2'-O-methyluridine-3'-phosphate
  modified_base 4: mod_base = OTHER; note = 2'-O-methylcytidine-3'-phosphate
  modified_base 5: mod_base = OTHER; note = 2'-O-methyladenosine-3'-phosphate
  modified_base 6: mod_base = OTHER; note = 2'-deoxy-2'-fluorouridine-3'-phosphate
  modified_base 7: mod_base = OTHER; note = 2'-O-methyladenosine-3'-phosphate
  modified_base 8: mod_base = OTHER; note = 2'-O-methylcytidine-3'-phosphate
  modified_base 9: mod_base = OTHER; note = 2'-O-methyladenosine-3'-phosphate
  modified_base 10: mod_base = OTHER; note = 2'-O-methyladenosine-3'-phosphate
  modified_base 11: mod_base = OTHER; note = 2'-O-methyladenosine-3'-phosphate
  modified_base 12: mod_base = OTHER; note = 2'-O-methyluridine-3'-phosphate
  modified_base 13: mod_base = OTHER; note = 2'-O-methyluridine-3'-phosphate
  modified_base 14: mod_base = OTHER; note = 2'-deoxy-2'-fluorouridine-3'-phosphate
  modified_base 15: mod_base = OTHER; note = 2'-O-methyluridine-3'-phosphate
  modified_base 16: mod_base = OTHER; note = 2'-deoxy-2'-fluorouridine-3'-phosphate
  modified_base 17: mod_base = OTHER; note = 2'-O-methylguanosine-3'-phosphate
  modified_base 18: mod_base = OTHER; note = 2'-O-methylcytidine-3'-phosphate
  modified_base 19: mod_base = OTHER; note = 2'-O-methyladenosine-3'-phosphate
  modified_base 20: mod_base = OTHER; note = 2'-O-methylguanosine-3'-phosphate
  modified_base 21: mod_base = OTHER; note = 2'-O-methylguanosine-3'-phosphorothioate
  modified_base 22: mod_base = OTHER; note = 2'-O-methylguanosine-3'-phosphorothioate
  modified_base 23: mod_base = OTHER; note = 2'-O-methylguanosine
tttcatacaaatttttgcagggg

SEQ ID NO: 1255 - RNA, 23 nt, synthetic construct
  source 1..23: mol_type = other RNA
  modified_base 1: mod_base = OTHER; note = 2'-O-methyluridine-3'-phosphorothioate
  modified_base 2: mod_base = OTHER; note = 2'-deoxy-2'-fluoroadenosine-3'-phosphorothioate
  modified_base 3: mod_base = OTHER; note = 2'-O-methyladenosine-3'-phosphate
  modified_base 4: mod_base = OTHER; note = 2'-O-methylguanosine-3'-phosphate
  modified_base 5: mod_base = OTHER; note = 2'-O-methyladenosine-3'-phosphate
  modified_base 6: mod_base = OTHER; note = 2'-deoxy-2'-fluorocytidine-3'-phosphate
  modified_base 7: mod_base = OTHER; note = 2'-O-methyluridine-3'-phosphate
  modified_base 8: mod_base = OTHER; note = 2'-O-methylguanosine-3'-phosphate
  modified_base 9: mod_base = OTHER; note = 2'-O-methyladenosine-3'-phosphate
  modified_base 10: mod_base = OTHER; note = 2'-O-methylcytidine-3'-phosphate
  modified_base 11: mod_base = OTHER; note = 2'-O-methyladenosine-3'-phosphate
  modified_base 12: mod_base = OTHER; note = 2'-O-methylcytidine-3'-phosphate
  modified_base 13: mod_base = OTHER; note = 2'-O-methyluridine-3'-phosphate
  modified_base 14: mod_base = OTHER; note = 2'-deoxy-2'-fluorouridine-3'-phosphate
  modified_base 15: mod_base = OTHER; note = 2'-O-methylcytidine-3'-phosphate
  modified_base 16: mod_base = OTHER; note = 2'-deoxy-2'-fluorouridine-3'-phosphate
  modified_base 17: mod_base = OTHER; note = 2'-O-methyluridine-3'-phosphate
  modified_base 18: mod_base = OTHER; note = 2'-O-methyluridine-3'-phosphate
  modified_base 19: mod_base = OTHER; note = 2'-O-methylcytidine-3'-phosphate
  modified_base 20: mod_base = OTHER; note = 2'-O-methylcytidine-3'-phosphate
  modified_base 21: mod_base = OTHER; note = 2'-O-methyluridine-3'-phosphorothioate
  modified_base 22: mod_base = OTHER; note = 2'-O-methylguanosine-3'-phosphorothioate
  modified_base 23: mod_base = OTHER; note = 2'-O-methyluridine
taagactgacacttctttcctgt

SEQ ID NO: 1256 - RNA, 23 nt, synthetic construct
  source 1..23: mol_type = other RNA
  modified_base 1: mod_base = OTHER; note = 2'-O-methyluridine-3'-phosphorothioate
  modified_base 2: mod_base = OTHER; note = 2'-deoxy-2'-fluoroguanosine-3'-phosphorothioate
  modified_base 3: mod_base = OTHER; note = 2'-O-methyladenosine-3'-phosphate
  modified_base 4: mod_base = OTHER; note = 2'-O-methyladenosine-3'-phosphate
  modified_base 5: mod_base = OTHER; note = 2'-O-methyladenosine-3'-phosphate
  modified_base 6: mod_base = OTHER; note = 2'-deoxy-2'-fluorocytidine-3'-phosphate
  modified_base 7: mod_base = OTHER; note = 2'-O-methyladenosine-3'-phosphate
  modified_base 8: mod_base = OTHER; note = 2'-O-methyluridine-3'-phosphate
  modified_base 9: mod_base = OTHER; note = 2'-O-methyluridine-3'-phosphate
  modified_base 10: mod_base = OTHER; note = 2'-O-methylcytidine-3'-phosphate
  modified_base 11: mod_base = OTHER; note = 2'-O-methylguanosine-3'-phosphate
  modified_base 12: mod_base = OTHER; note = 2'-O-methylguanosine-3'-phosphate
  modified_base 13: mod_base = OTHER; note = 2'-O-methyluridine-3'-phosphate
  modified_base 14: mod_base = OTHER; note = 2'-deoxy-2'-fluorocytidine-3'-phosphate
  modified_base 15: mod_base = OTHER; note = 2'-O-methylcytidine-3'-phosphate
  modified_base 16: mod_base = OTHER; note = 2'-deoxy-2'-fluoroguanosine-3'-phosphate
  modified_base 17: mod_base = OTHER; note = 2'-O-methylguanosine-3'-phosphate
  modified_base 18: mod_base = OTHER; note = 2'-O-methyluridine-3'-phosphate
  modified_base 19: mod_base = OTHER; note = 2'-O-methylcytidine-3'-phosphate
  modified_base 20: mod_base = OTHER; note = 2'-O-methyladenosine-3'-phosphate
  modified_base 21: mod_base = OTHER; note = 2'-O-methylguanosine-3'-phosphorothioate
  modified_base 22: mod_base = OTHER; note = 2'-O-methylcytidine-3'-phosphorothioate
  modified_base 23: mod_base = OTHER; note = 2'-O-methylguanosine
tgaaacattcggtccggtcagcg

SEQ ID NO: 1257 - RNA, 23 nt, synthetic construct
  source 1..23: mol_type = other RNA
  modified_base 1: mod_base = OTHER; note = 2'-O-methyluridine-3'-phosphorothioate
  modified_base 2: mod_base = OTHER; note = 2'-deoxy-2'-fluoroadenosine-3'-phosphorothioate
  modified_base 3: mod_base = OTHER; note = 2'-O-methylguanosine-3'-phosphate
  modified_base 4: mod_base = OTHER; note = 2'-O-methyladenosine-3'-phosphate
  modified_base 5: mod_base = OTHER; note = 2'-O-methyladenosine-3'-phosphate
  modified_base 6: mod_base = OTHER; note = 2'-deoxy-2'-fluoroadenosine-3'-phosphate
  modified_base 7: mod_base = OTHER; note = 2'-O-methylcytidine-3'-phosphate
  modified_base 8: mod_base = OTHER; note = 2'-O-methyluridine-3'-phosphate
  modified_base 9: mod_base = OTHER; note = 2'-O-methylcytidine-3'-phosphate
  modified_base 10: mod_base = OTHER; note = 2'-O-methyladenosine-3'-phosphate
  modified_base 11: mod_base = OTHER; note = 2'-O-methyluridine-3'-phosphate
  modified_base 12: mod_base = OTHER; note = 2'-O-methyladenosine-3'-phosphate
  modified_base 13: mod_base = OTHER; note = 2'-O-methylguanosine-3'-phosphate
  modified_base 14: mod_base = OTHER; note = 2'-deoxy-2'-fluorocytidine-3'-phosphate
  modified_base 15: mod_base = OTHER; note = 2'-O-methylguanosine-3'-phosphate
  modified_base 16: mod_base = OTHER; note = 2'-deoxy-2'-fluoroadenosine-3'-phosphate
  modified_base 17: mod_base = OTHER; note = 2'-O-methyluridine-3'-phosphate
  modified_base 18: mod_base = OTHER; note = 2'-O-methyluridine-3'-phosphate
  modified_base 19: mod_base = OTHER; note = 2'-O-methylguanosine-3'-phosphate
  modified_base 20: mod_base = OTHER; note = 2'-O-methylcytidine-3'-phosphate
  modified_base 21: mod_base = OTHER; note = 2'-O-methyladenosine-3'-phosphorothioate
  modified_base 22: mod_base = OTHER; note = 2'-O-methylcytidine-3'-phosphorothioate
  modified_base 23: mod_base = OTHER; note = 2'-O-methyladenosine
tagaaactcatagcgattgcaca

SEQ ID NO: 1258 - RNA, 23 nt, synthetic construct
  source 1..23: mol_type = other RNA
  modified_base 1: mod_base = OTHER; note = 2'-O-methyluridine-3'-phosphorothioate
  modified_base 2: mod_base = OTHER; note = 2'-deoxy-2'-fluoroguanosine-3'-phosphorothioate
  modified_base 3: mod_base = OTHER; note = 2'-O-methyladenosine-3'-phosphate
  modified_base 4: mod_base = OTHER; note = 2'-O-methyladenosine-3'-phosphate
  modified_base 5: mod_base = OTHER; note = 2'-O-methyladenosine-3'-phosphate
  modified_base 6: mod_base = OTHER; note = 2'-deoxy-2'-fluorocytidine-3'-phosphate
  modified_base 7: mod_base = OTHER; note = 2'-O-methyladenosine-3'-phosphate
  modified_base 8: mod_base = OTHER; note = 2'-O-methylcytidine-3'-phosphate
  modified_base 9: mod_base = OTHER; note = 2'-O-methylguanosine-3'-phosphate
  modified_base 10: mod_base = OTHER; note = 2'-O-methyladenosine-3'-phosphate
  modified_base 11: mod_base = OTHER; note = 2'-O-methyladenosine-3'-phosphate
  modified_base 12: mod_base = OTHER; note = 2'-O-methylcytidine-3'-phosphate
  modified_base 13: mod_base = OTHER; note = 2'-O-methyladenosine-3'-phosphate
  modified_base 14: mod_base = OTHER; note = 2'-deoxy-2'-fluorouridine-3'-phosphate
  modified_base 15: mod_base = OTHER; note = 2'-O-methyladenosine-3'-phosphate
  modified_base 16: mod_base = OTHER; note = 2'-deoxy-2'-fluoroguanosine-3'-phosphate
  modified_base 17: mod_base = OTHER; note = 2'-O-methyladenosine-3'-phosphate
  modified_base 18: mod_base = OTHER; note = 2'-O-methylcytidine-3'-phosphate
  modified_base 19: mod_base = OTHER; note = 2'-O-methyladenosine-3'-phosphate
  modified_base 20: mod_base = OTHER; note = 2'-O-methylcytidine-3'-phosphate
  modified_base 21: mod_base = OTHER; note = 2'-O-methylcytidine-3'-phosphorothioate
  modified_base 22: mod_base = OTHER; note = 2'-O-methyladenosine-3'-phosphorothioate
  modified_base 23: mod_base = OTHER; note = 2'-O-methylguanosine
tgaaacacgaacatagacaccag

SEQ ID NO: 1259 - RNA, 23 nt, synthetic construct
  source 1..23: mol_type = other RNA
  modified_base 1: mod_base = OTHER; note = 2'-O-methyluridine-3'-phosphorothioate
  modified_base 2: mod_base = OTHER; note = 2'-deoxy-2'-fluorouridine-3'-phosphorothioate
  modified_base 3: mod_base = OTHER; note = 2'-O-methylguanosine-3'-phosphate
  modified_base 4: mod_base = OTHER; note = 2'-O-methyladenosine-3'-phosphate
  modified_base 5: mod_base = OTHER; note = 2'-O-methyladenosine-3'-phosphate
  modified_base 6: mod_base = OTHER; note = 2'-deoxy-2'-fluoroadenosine-3'-phosphate
  modified_base 7: mod_base = OTHER; note = 2'-O-methylcytidine-3'-phosphate
  modified_base 8: mod_base = OTHER; note = 2'-O-methyladenosine-3'-phosphate
  modified_base 9: mod_base = OTHER; note = 2'-O-methylcytidine-3'-phosphate
  modified_base 10: mod_base = OTHER; note = 2'-O-methylguanosine-3'-phosphate
  modified_base 11: mod_base = OTHER; note = 2'-O-methyladenosine-3'-phosphate
  modified_base 12: mod_base = OTHER; note = 2'-O-methyladenosine-3'-phosphate
  modified_base 13: mod_base = OTHER; note = 2'-O-methylcytidine-3'-phosphate
  modified_base 14: mod_base = OTHER; note = 2'-deoxy-2'-fluoroadenosine-3'-phosphate
  modified_base 15: mod_base = OTHER; note = 2'-O-methyluridine-3'-phosphate
  modified_base 16: mod_base = OTHER; note = 2'-deoxy-2'-fluoroadenosine-3'-phosphate
  modified_base 17: mod_base = OTHER; note = 2'-O-methylguanosine-3'-phosphate
  modified_base 18: mod_base = OTHER; note = 2'-O-methyladenosine-3'-phosphate
  modified_base 19: mod_base = OTHER; note = 2'-O-methylcytidine-3'-phosphate
  modified_base 20: mod_base = OTHER; note = 2'-O-methyladenosine-3'-phosphate
  modified_base 21: mod_base = OTHER; note = 2'-O-methylcytidine-3'-phosphorothioate
  modified_base 22: mod_base = OTHER; note = 2'-O-methylcytidine-3'-phosphorothioate
  modified_base 23: mod_base = OTHER; note = 2'-O-methyladenosine
ttgaaacacgaacatagacacca

SEQ ID NO: 1260 - RNA, 23 nt, synthetic construct
  source 1..23: mol_type = other RNA
  modified_base 1: mod_base = OTHER; note = 2'-O-methyluridine-3'-phosphorothioate
  modified_base 2: mod_base = OTHER; note = 2'-deoxy-2'-fluorouridine-3'-phosphorothioate
  modified_base 3: mod_base = OTHER; note = 2'-O-methyluridine-3'-phosphate
  modified_base 4: mod_base = OTHER; note = 2'-O-methylguanosine-3'-phosphate
  modified_base 5: mod_base = OTHER; note = 2'-O-methyladenosine-3'-phosphate
  modified_base 6: mod_base = OTHER; note = 2'-deoxy-2'-fluoroadenosine-3'-phosphate
  modified_base 7: mod_base = OTHER; note = 2'-O-methyladenosine-3'-phosphate
  modified_base 8: mod_base = OTHER; note = 2'-O-methylcytidine-3'-phosphate
  modified_base 9: mod_base = OTHER; note = 2'-O-methyladenosine-3'-phosphate
  modified_base 10: mod_base = OTHER; note = 2'-O-methylcytidine-3'-phosphate
  modified_base 11: mod_base = OTHER; note = 2'-O-methylguanosine-3'-phosphate
  modified_base 12: mod_base = OTHER; note = 2'-O-methyladenosine-3'-phosphate
  modified_base 13: mod_base = OTHER; note = 2'-O-methyladenosine-3'-phosphate
  modified_base 14: mod_base = OTHER; note = 2'-deoxy-2'-fluorocytidine-3'-phosphate
  modified_base 15: mod_base = OTHER; note = 2'-O-methyladenosine-3'-phosphate
  modified_base 16: mod_base = OTHER; note = 2'-deoxy-2'-fluorouridine-3'-phosphate
  modified_base 17: mod_base = OTHER; note = 2'-O-methyladenosine-3'-phosphate
  modified_base 18: mod_base = OTHER; note = 2'-O-methylguanosine-3'-phosphate
  modified_base 19: mod_base = OTHER; note = 2'-O-methyladenosine-3'-phosphate
  modified_base 20: mod_base = OTHER; note = 2'-O-methylcytidine-3'-phosphate
  modified_base 21: mod_base = OTHER; note = 2'-O-methyladenosine-3'-phosphorothioate
  modified_base 22: mod_base = OTHER; note = 2'-O-methylcytidine-3'-phosphorothioate
  modified_base 23: mod_base = OTHER; note = 2'-O-methylcytidine
tttgaaacacgaacatagacacc

SEQ ID NO: 1261 - RNA, 23 nt, synthetic construct
  source 1..23: mol_type = other RNA
  modified_base 1: mod_base = OTHER; note = 2'-O-methyluridine-3'-phosphorothioate
  modified_base 2: mod_base = OTHER; note = 2'-deoxy-2'-fluorouridine-3'-phosphorothioate
  modified_base 3: mod_base = OTHER; note = 2'-O-methyluridine-3'-phosphate
  modified_base 4: mod_base = OTHER; note = 2'-O-methyladenosine-3'-phosphate
  modified_base 5: mod_base = OTHER; note = 2'-O-methyladenosine-3'-phosphate
  modified_base 6: mod_base = OTHER; note = 2'-deoxy-2'-fluorouridine-3'-phosphate
  modified_base 7: mod_base = OTHER; note = 2'-O-methyluridine-3'-phosphate
  modified_base 8: mod_base = OTHER; note = 2'-O-methyladenosine-3'-phosphate
  modified_base 9: mod_base = OTHER; note = 2'-O-methyluridine-3'-phosphate
  modified_base 10: mod_base = OTHER; note = 2'-O-methyluridine-3'-phosphate
  modified_base 11: mod_base = OTHER; note = 2'-O-methyluridine-3'-phosphate
  modified_base 12: mod_base = OTHER; note = 2'-O-methylcytidine-3'-phosphate
  modified_base 13: mod_base = OTHER; note = 2'-O-methyluridine-3'-phosphate
  modified_base 14: mod_base = OTHER; note = 2'-deoxy-2'-fluorocytidine-3'-phosphate
  modified_base 15: mod_base = OTHER; note = 2'-O-methyladenosine-3'-phosphate
  modified_base 16: mod_base = OTHER; note = 2'-deoxy-2'-fluorouridine-3'-phosphate
  modified_base 17: mod_base = OTHER; note = 2'-O-methylcytidine-3'-phosphate
  modified_base 18: mod_base = OTHER; note = 2'-O-methyladenosine-3'-phosphate
  modified_base 19: mod_base = OTHER; note = 2'-O-methylcytidine-3'-phosphate
  modified_base 20: mod_base = OTHER; note = 2'-O-methyluridine-3'-phosphate
  modified_base 21: mod_base = OTHER; note = 2'-O-methylcytidine-3'-phosphorothioate
  modified_base 22: mod_base = OTHER; note = 2'-O-methylcytidine-3'-phosphorothioate
  modified_base 23: mod_base = OTHER; note = 2'-O-methylcytidine
tttaattatttctcatcactccc

SEQ ID NO: 1262 - RNA, 23 nt, synthetic construct
  source 1..23: mol_type = other RNA
  modified_base 1: mod_base = OTHER; note = 2'-O-methyluridine-3'-phosphorothioate
  modified_base 2: mod_base = OTHER; note = 2'-deoxy-2'-fluorocytidine-3'-phosphorothioate
  modified_base 3: mod_base = OTHER; note = 2'-O-methyladenosine-3'-phosphate
  modified_base 4: mod_base = OTHER; note = 2'-O-methyladenosine-3'-phosphate
  modified_base 5: mod_base = OTHER; note = 2'-O-methyluridine-3'-phosphate
  modified_base 6: mod_base = OTHER; note = 2'-deoxy-2'-fluorouridine-3'-phosphate
  modified_base 7: mod_base = OTHER; note = 2'-O-methyladenosine-3'-phosphate
  modified_base 8: mod_base = OTHER; note = 2'-O-methyladenosine-3'-phosphate
  modified_base 9: mod_base = OTHER; note = 2'-O-methyluridine-3'-phosphate
  modified_base 10: mod_base = OTHER; note = 2'-O-methyluridine-3'-phosphate
  modified_base 11: mod_base = OTHER; note = 2'-O-methyladenosine-3'-phosphate
  modified_base 12: mod_base = OTHER; note = 2'-O-methyluridine-3'-phosphate
  modified_base 13: mod_base = OTHER; note = 2'-O-methyluridine-3'-phosphate
  modified_base 14: mod_base = OTHER; note = 2'-deoxy-2'-fluorouridine-3'-phosphate
  modified_base 15: mod_base = OTHER; note = 2'-O-methylcytidine-3'-phosphate
  modified_base 16: mod_base = OTHER; note = 2'-deoxy-2'-fluorouridine-3'-phosphate
  modified_base 17: mod_base = OTHER; note = 2'-O-methylcytidine-3'-phosphate
  modified_base 18: mod_base = OTHER; note = 2'-O-methyladenosine-3'-phosphate
  modified_base 19: mod_base = OTHER; note = 2'-O-methyluridine-3'-phosphate
  modified_base 20: mod_base = OTHER; note = 2'-O-methylcytidine-3'-phosphate
  modified_base 21: mod_base = OTHER; note = 2'-O-methyladenosine-3'-phosphorothioate
  modified_base 22: mod_base = OTHER; note = 2'-O-methylcytidine-3'-phosphorothioate
  modified_base 23: mod_base = OTHER; note = 2'-O-methyluridine
tcaattaattatttctcatcact

SEQ ID NO: 1263 - RNA, 23 nt, synthetic construct
  source 1..23: mol_type = other RNA
  modified_base 1: mod_base = OTHER; note = 2'-O-methyluridine-3'-phosphorothioate
  modified_base 2: mod_base = OTHER; note = 2'-deoxy-2'-fluorouridine-3'-phosphorothioate
  modified_base 3: mod_base = OTHER; note = 2'-O-methylcytidine-3'-phosphate
  modified_base 4: mod_base = OTHER; note = 2'-O-methylcytidine-3'-phosphate
  modified_base 5: mod_base = OTHER; note = 2'-O-methyladenosine-3'-phosphate
  modified_base 6: mod_base = OTHER; note = 2'-deoxy-2'-fluoroadenosine-3'-phosphate
  modified_base 7: mod_base = OTHER; note = 2'-O-methyluridine-3'-phosphate
  modified_base 8: mod_base = OTHER; note = 2'-O-methyluridine-3'-phosphate
  modified_base 9: mod_base = OTHER; note = 2'-O-methyladenosine-3'-phosphate
  modified_base 10: mod_base = OTHER; note = 2'-O-methyladenosine-3'-phosphate
  modified_base 11: mod_base = OTHER; note = 2'-O-methyluridine-3'-phosphate
  modified_base 12: mod_base = OTHER; note = 2'-O-methyluridine-3'-phosphate
  modified_base 13: mod_base = OTHER; note = 2'-O-methyladenosine-3'-phosphate
  modified_base 14: mod_base = OTHER; note = 2'-deoxy-2'-fluorouridine-3'-phosphate
  modified_base 15: mod_base = OTHER; note = 2'-O-methyluridine-3'-phosphate
  modified_base 16: mod_base = OTHER; note = 2'-deoxy-2'-fluorouridine-3'-phosphate
  modified_base 17: mod_base = OTHER; note = 2'-O-methylcytidine-3'-phosphate
  modified_base 18: mod_base = OTHER; note = 2'-O-methyluridine-3'-phosphate
  modified_base 19: mod_base = OTHER; note = 2'-O-methylcytidine-3'-phosphate
  modified_base 20: mod_base = OTHER; note = 2'-O-methyladenosine-3'-phosphate
  modified_base 21: mod_base = OTHER; note = 2'-O-methyluridine-3'-phosphorothioate
  modified_base 22: mod_base = OTHER; note = 2'-O-methylcytidine-3'-phosphorothioate
  modified_base 23: mod_base = OTHER; note = 2'-O-methyladenosine
ttccaattaattatttctcatca

SEQ ID NO: 1264 - RNA, 23 nt, synthetic construct
  source 1..23: mol_type = other RNA
  modified_base 1: mod_base = OTHER; note = 2'-O-methyluridine-3'-phosphorothioate
  modified_base 2: mod_base = OTHER; note = 2'-deoxy-2'-fluorouridine-3'-phosphorothioate
  modified_base 3: mod_base = OTHER; note = 2'-O-methylguanosine-3'-phosphate
  modified_base 4: mod_base = OTHER; note = 2'-O-methyluridine-3'-phosphate
  modified_base 5: mod_base = OTHER; note = 2'-O-methyladenosine-3'-phosphate
  modified_base 6: mod_base = OTHER; note = 2'-deoxy-2'-fluoroadenosine-3'-phosphate
  modified_base 7: mod_base = OTHER; note = 2'-O-methyladenosine-3'-phosphate
  modified_base 8: mod_base = OTHER; note = 2'-O-methyladenosine-3'-phosphate
  modified_base 9: mod_base = OTHER; note = 2'-O-methyluridine-3'-phosphate
  modified_base 10: mod_base = OTHER; note = 2'-O-methylguanosine-3'-phosphate
  modified_base 11: mod_base = OTHER; note = 2'-O-methyluridine-3'-phosphate
  modified_base 12: mod_base = OTHER; note = 2'-O-methyladenosine-3'-phosphate
  modified_base 13: mod_base = OTHER; note = 2'-O-methyluridine-3'-phosphate
  modified_base 14: mod_base = OTHER; note = 2'-deoxy-2'-fluorouridine-3'-phosphate
  modified_base 15: mod_base = OTHER; note = 2'-O-methyluridine-3'-phosphate
  modified_base 16: mod_base = OTHER; note = 2'-deoxy-2'-fluoroguanosine-3'-phosphate
  modified_base 17: mod_base = OTHER; note = 2'-O-methyluridine-3'-phosphate
  modified_base 18: mod_base = OTHER; note = 2'-O-methylcytidine-3'-phosphate
  modified_base 19: mod_base = OTHER; note = 2'-O-methylcytidine-3'-phosphate
  modified_base 20: mod_base = OTHER; note = 2'-O-methyluridine-3'-phosphate
  modified_base 21: mod_base = OTHER; note = 2'-O-methyluridine-3'-phosphorothioate
  modified_base 22: mod_base = OTHER; note = 2'-O-methylcytidine-3'-phosphorothioate
  modified_base 23: mod_base = OTHER; note = 2'-O-methyluridine
ttgtaaaatgtatttgtccttct

SEQ ID NO: 1265 - RNA, 21 nt, synthetic construct
  source 1..21: mol_type = other RNA
ggacccactttctgggcacta

SEQ ID NO: 1266 - RNA, 21 nt, synthetic construct
  source 1..21: mol_type = other RNA
gacccactttctgggcactga

SEQ ID NO: 1267 - RNA, 21 nt, synthetic construct
  source 1..21: mol_type = other RNA
acccactttctgggcactgca

SEQ ID NO: 1268 - RNA, 21 nt, synthetic construct
  source 1..21: mol_type = other RNA
cagtcccaaaatggaacataa

SEQ ID NO: 1269 - RNA, 21 nt, synthetic construct
  source 1..21: mol_type = other RNA
agtcccaaaatggaacataaa

SEQ ID NO: 1270 - RNA, 21 nt, synthetic construct
  source 1..21: mol_type = other RNA
gtcccaaaatggaacataaga

SEQ ID NO: 1271 - RNA, 21 nt, synthetic construct
  source 1..21: mol_type = other RNA
tcccaaaatggaacataagga

SEQ ID NO: 1272 - RNA, 21 nt, synthetic construct
  source 1..21: mol_type = other RNA
cccaaaatggaacataaggaa

SEQ ID NO: 1273 - RNA, 21 nt, synthetic construct
  source 1..21: mol_type = other RNA
ccaaaatggaacataaggaaa

SEQ ID NO: 1274 - RNA, 21 nt, synthetic construct
  source 1..21: mol_type = other RNA
caaaatggaacataaggaaga

SEQ ID NO: 1275 - RNA, 21 nt, synthetic construct
  source 1..21: mol_type = other RNA
aaaatggaacataaggaagta

SEQ ID NO: 1276 - RNA, 21 nt, synthetic construct
  source 1..21: mol_type = other RNA
aaatggaacataaggaagtga

SEQ ID NO: 1277 - RNA, 21 nt, synthetic construct
  source 1..21: mol_type = other RNA
aatggaacataaggaagtgga

SEQ ID NO: 1278 - RNA, 21 nt, synthetic construct
  source 1..21: mol_type = other RNA
atggaacataaggaagtggta

SEQ ID NO: 1279 - RNA, 21 nt, synthetic construct
  source 1..21: mol_type = other RNA
tggaacataaggaagtggtta

SEQ ID NO: 1280 - RNA, 21 nt, synthetic construct
  source 1..21: mol_type = other RNA
cctctggatgactatgtgaaa

SEQ ID NO: 1281 - RNA, 21 nt, synthetic construct
  source 1..21: mol_type = other RNA
taagaagcagctgggagcaga

SEQ ID NO: 1282 - RNA, 21 nt, synthetic construct
  source 1..21: mol_type = other RNA
agcagctgggagcaggaagta

SEQ ID NO: 1283 - RNA, 21 nt, synthetic construct
  source 1..21: mol_type = other RNA
agctgggagcaggaagtataa

SEQ ID NO: 1284 - RNA, 21 nt, synthetic construct
  source 1..21: mol_type = other RNA
ctgggagcaggaagtatagaa

SEQ ID NO: 1285 - RNA, 21 nt, synthetic construct
  source 1..21: mol_type = other RNA
tgggagcaggaagtatagaaa

SEQ ID NO: 1286 - RNA, 21 nt, synthetic construct
  source 1..21: mol_type = other RNA
gggagcaggaagtatagaaga

SEQ ID NO: 1287 - RNA, 21 nt, synthetic construct
  source 1..21: mol_type = other RNA
ggagcaggaagtatagaagaa

SEQ ID NO: 1288 - RNA, 21 nt, synthetic construct
  source 1..21: mol_type = other RNA
gagcaggaagtatagaagaaa

SEQ ID NO: 1289 - RNA, 21 nt, synthetic construct
  source 1..21: mol_type = other RNA
agcaggaagtatagaagaata

SEQ ID NO: 1290 - RNA, 21 nt, synthetic construct
  source 1..21: mol_type = other RNA
gcaggaagtatagaagaatga

SEQ ID NO: 1291 - RNA, 21 nt, synthetic construct
  source 1..21: mol_type = other RNA
caggaagtatagaagaatgta

SEQ ID NO: 1292 - RNA, 21 nt, synthetic construct
  source 1..21: mol_type = other RNA
aggaagtatagaagaatgtga

SEQ ID NO: 1293 - RNA, 21 nt, synthetic construct
  source 1..21: mol_type = other RNA
ggaagtatagaagaatgtgca

SEQ ID NO: 1294 - RNA, 21 nt, synthetic construct
  source 1..21: mol_type = other RNA
gaagtatagaagaatgtgcaa

SEQ ID NO: 1295 - RNA, 21 nt, synthetic construct
  source 1..21: mol_type = other RNA
aagtatagaagaatgtgcaga

SEQ ID NO: 1296 - RNA, 21 nt, synthetic construct
  source 1..21: mol_type = other RNA
agtatagaagaatgtgcagca

SEQ ID NO: 1297 - RNA, 21 nt, synthetic construct
  source 1..21: mol_type = other RNA
gtatagaagaatgtgcagcaa

SEQ ID NO: 1298 - RNA, 21 nt, synthetic construct
  source 1..21: mol_type = other RNA
tatagaagaatgtgcagcaaa

SEQ ID NO: 1299 - RNA, 21 nt, synthetic construct
  source 1..21: mol_type = other RNA
tccaatatcacagtaaagaga

SEQ ID NO: 1300 - RNA, 21 nt, synthetic construct
  source 1..21: mol_type = other RNA
ccaatatcacagtaaagagca

SEQ ID NO: 1301 - RNA, 21 nt, synthetic construct
  source 1..21: mol_type = other RNA
caatatcacagtaaagagcaa

SEQ ID NO: 1302 - RNA, 21 nt, synthetic construct
  source 1..21: mol_type = other RNA
aatatcacagtaaagagcaaa

SEQ ID NO: 1303 - RNA, 21 nt, synthetic construct
  source 1..21: mol_type = other RNA
atatcacagtaaagagcaaca

SEQ ID NO: 1304 - RNA, 21 nt, synthetic construct
  source 1..21: mol_type = other RNA
tatcacagtaaagagcaacaa

SEQ ID NO: 1305 - RNA, 21 nt, synthetic construct
  source 1..21: mol_type = other RNA
atcacagtaaagagcaacaaa

SEQ ID NO: 1306 - RNA, 21 nt, synthetic construct
  source 1..21: mol_type = other RNA
tcacagtaaagagcaacaata

SEQ ID NO: 1307 - RNA, 21 nt, synthetic construct
  source 1..21: mol_type = other RNA
cacagtaaagagcaacaatga

SEQ ID NO: 1308 - RNA, 21 nt, synthetic construct
  source 1..21: mol_type = other RNA
acagtaaagagcaacaatgta

SEQ ID NO: 1309 - RNA, 21 nt, synthetic construct
  source 1..21: mol_type = other RNA
cagtaaagagcaacaatgtga

SEQ ID NO: 1310 - RNA, 21 nt, synthetic construct
  source 1..21: mol_type = other RNA
agtaaagagcaacaatgtgta

SEQ ID NO: 1311 - RNA, 21 nt, synthetic construct
  source 1..21: mol_type = other RNA
ggatgagagatgtagttttaa

SEQ ID NO: 1312 - RNA, 21 nt, synthetic construct
  source 1..21: mol_type = other RNA
gatgagagatgtagttttata

SEQ ID NO: 1313 - RNA, 21 nt, synthetic construct
  source 1..21: mol_type = other RNA
atgagagatgtagttttatta

SEQ ID NO: 1314 - RNA, 21 nt, synthetic construct
  source 1..21: mol_type = other RNA
tgagagatgtagttttattta

SEQ ID NO: 1315 - RNA, 21 nt, synthetic construct
  source 1..21: mol_type = other RNA
gagagatgtagttttatttga

SEQ ID NO: 1316 - RNA, 21 nt, synthetic construct
  source 1..21: mol_type = other RNA
agagatgtagttttatttgaa

SEQ ID NO: 1317 - RNA, 21 nt, synthetic construct
  source 1..21: mol_type = other RNA
gagatgtagttttatttgaaa

SEQ ID NO: 1318 - RNA, 21 nt, synthetic construct
  source 1..21: mol_type = other RNA
agatgtagttttatttgaaaa

SEQ ID NO: 1319 - RNA, 21 nt, synthetic construct
  source 1..21: mol_type = other RNA
gatgtagttttatttgaaaaa

SEQ ID NO: 1320 - RNA, 21 nt, synthetic construct
  source 1..21: mol_type = other RNA
atgtagttttatttgaaaaga

SEQ ID NO: 1321 - RNA, 21 nt, synthetic construct
  source 1..21: mol_type = other RNA
tgtagttttatttgaaaagaa

SEQ ID NO: 1322 - RNA, 21 nt, synthetic construct
  source 1..21: mol_type = other RNA
gtagttttatttgaaaagaaa

SEQ ID NO: 1323 - RNA, 21 nt, synthetic construct
  source 1..21: mol_type = other RNA
tgaaaagaaagtgtatctcta

SEQ ID NO: 1324 - RNA, 21 nt, synthetic construct
  source 1..21: mol_type = other RNA
gaaaagaaagtgtatctctca

SEQ ID NO: 1325 - RNA, 21 nt, synthetic construct
  source 1..21: mol_type = other RNA
aaaagaaagtgtatctctcaa

SEQ ID NO: 1326 - RNA, 21 nt, synthetic construct
  source 1..21: mol_type = other RNA
aaagaaagtgtatctctcaga

SEQ ID NO: 1327 - RNA, 21 nt, synthetic construct
  source 1..21: mol_type = other RNA
aagaaagtgtatctctcagaa

SEQ ID NO: 1328 - RNA, 21 nt, synthetic construct
  source 1..21: mol_type = other RNA
agaaagtgtatctctcagaga

SEQ ID NO: 1329 - RNA, 21 nt, synthetic construct
  source 1..21: mol_type = other RNA
gaaagtgtatctctcagagta

SEQ ID NO: 1330 - RNA, 21 nt, synthetic construct
  source 1..21: mol_type = other RNA
aaagtgtatctctcagagtga

SEQ ID NO: 1331 - RNA, 21 nt, synthetic construct
  source 1..21: mol_type = other RNA
aagtgtatctctcagagtgca

SEQ ID NO: 1332 - RNA, 21 nt, synthetic construct
  source 1..21: mol_type = other RNA
agtgtatctctcagagtgcaa

SEQ ID NO: 1333 - RNA, 21 nt, synthetic construct
  source 1..21: mol_type = other RNA
gtgtatctctcagagtgcaaa

SEQ ID NO: 1334 - RNA, 21 nt, synthetic construct
  source 1..21: mol_type = other RNA
tgtatctctcagagtgcaaga

SEQ ID NO: 1335 - RNA, 21 nt, synthetic construct
  source 1..21: mol_type = other RNA
gtatctctcagagtgcaagaa

SEQ ID NO: 1336 - RNA, 21 nt, synthetic construct
  source 1..21: mol_type = other RNA
atctctcagagtgcaagacta

SEQ ID NO: 1337 - RNA, 21 nt, synthetic construct
  source 1..21: mol_type = other RNA
acagagggacgatgtccaaaa

SEQ ID NO: 1338 - RNA, 21 nt, synthetic construct
  source 1..21: mol_type = other RNA
cagagggacgatgtccaaaaa

SEQ ID NO: 1339 - RNA, 21 nt, synthetic construct
  source 1..21: mol_type = other RNA
agagggacgatgtccaaaaca

SEQ ID NO: 1340 - RNA, 21 nt, synthetic construct
  source 1..21: mol_type = other RNA
gagggacgatgtccaaaacaa

SEQ ID NO: 1341 - RNA, 21 nt, synthetic construct
  source 1..21: mol_type = other RNA
agggacgatgtccaaaacaaa

SEQ ID NO: 1342 - RNA, 21 nt, synthetic construct
  source 1..21: mol_type = other RNA
gggacgatgtccaaaacaaaa

SEQ ID NO: 1343 - RNA, 21 nt, synthetic construct
  source 1..21: mol_type = other RNA
ggacgatgtccaaaacaaaaa

SEQ ID NO: 1344 - RNA, 21 nt, synthetic construct
  source 1..21: mol_type = other RNA
gacgatgtccaaaacaaaaaa

SEQ ID NO: 1345 - RNA, 21 nt, synthetic construct
  source 1..21: mol_type = other RNA
acgatgtccaaaacaaaaaaa

SEQ ID NO: 1346 - RNA, 21 nt, synthetic construct
  source 1..21: mol_type = other RNA
cgatgtccaaaacaaaaaata

SEQ ID NO: 1347 - RNA, 21 nt, synthetic construct
  source 1..21: mol_type = other RNA
gatgtccaaaacaaaaaatga

SEQ ID NO: 1348 - RNA, 21 nt, synthetic construct
  source 1..21: mol_type = other RNA
atgtccaaaacaaaaaatgga

SEQ ID NO: 1349 - RNA, 21 nt, synthetic construct
  source 1..21: mol_type = other RNA
cacagacctagattctcacca

SEQ ID NO: 1350 - RNA, 21 nt, synthetic construct
  source 1..21: mol_type = other RNA
acagacctagattctcaccta

SEQ ID NO: 1351 - RNA, 21 nt, synthetic construct
  source 1..21: mol_type = other RNA
cagacctagattctcacctga

SEQ ID NO: 1352 - RNA, 21 nt, synthetic construct
  source 1..21: mol_type = other RNA
gacctagattctcacctgcta

SEQ ID NO: 1353 - RNA, 21 nt, synthetic construct
  source 1..21: mol_type = other RNA
acctagattctcacctgctaa

SEQ ID NO: 1354 - RNA, 21 nt, synthetic construct
  source 1..21: mol_type = other RNA
cctagattctcacctgctaca

SEQ ID NO: 1355 - RNA, 21 nt, synthetic construct
  source 1..21: mol_type = other RNA
ctcagagggactggaggagaa

SEQ ID NO: 1356 - RNA, 21 nt, synthetic construct
  source 1..21: mol_type = other RNA
tcagagggactggaggagaaa

SEQ ID NO: 1357 - RNA, 21 nt, synthetic construct
  source 1..21: mol_type = other RNA
cagagggactggaggagaaca

SEQ ID NO: 1358 - RNA, 21 nt, synthetic construct
  source 1..21: mol_type = other RNA
agagggactggaggagaacta

SEQ ID NO: 1359 - RNA, 21 nt, synthetic construct
  source 1..21: mol_type = other RNA
gagggactggaggagaactaa

SEQ ID NO: 1360 - RNA, 21 nt, synthetic construct
  source 1..21: mol_type = other RNA
agggactggaggagaactaca

SEQ ID NO: 1361 - RNA, 21 nt, synthetic construct
  source 1..21: mol_type = other RNA
gggactggaggagaactacta

SEQ ID NO: 1362 - RNA, 21 nt, synthetic construct
  source 1..21: mol_type = other RNA
ggactggaggagaactactga

SEQ ID NO: 1363 - RNA, 21 nt, synthetic construct
  source 1..21: mol_type = other RNA
actggaggagaactactgcaa

SEQ ID NO: 1364 - RNA, 21 nt, synthetic construct
  source 1..21: mol_type = other RNA
ctggaggagaactactgcaga

SEQ ID NO: 1365 - RNA, 21 nt, synthetic construct
  source 1..21: mol_type = other RNA
tggaggagaactactgcagga

SEQ ID NO: 1366 - RNA, 21 nt, synthetic construct
  source 1..21: mol_type = other RNA
gaggagaactactgcaggaaa

SEQ ID NO: 1367 - RNA, 21 nt, synthetic construct
  source 1..21: mol_type = other RNA
aatccagacaacgatccgcaa

SEQ ID NO: 1368 - RNA, 21 nt, synthetic construct
  source 1..21: mol_type = other RNA
tccagacaacgatccgcagga

SEQ ID NO: 1369 - RNA, 21 nt, synthetic construct
  source 1..21: mol_type = other RNA
tgctatactactgatccagaa

SEQ ID NO: 1370 - RNA, 21 nt, synthetic construct
  source 1..21: mol_type = other RNA
gctatactactgatccagaaa

SEQ ID NO: 1371 - RNA, 21 nt, synthetic construct
  source 1..21: mol_type = other RNA
ctatactactgatccagaaaa

SEQ ID NO: 1372 - RNA, 21 nt, synthetic construct
  source 1..21: mol_type = other RNA
tatactactgatccagaaaaa

SEQ ID NO: 1373 - RNA, 21 nt, synthetic construct
  source 1..21: mol_type = other RNA
atactactgatccagaaaaga

SEQ ID NO: 1374 - RNA, 21 nt, synthetic construct
  source 1..21: mol_type = other RNA
tactactgatccagaaaagaa

SEQ ID NO: 1375 - RNA, 21 nt, synthetic construct
  source 1..21: mol_type = other RNA
actactgatccagaaaagaga

SEQ ID NO: 1376 - RNA, 21 nt, synthetic construct
  source 1..21: mol_type = other RNA
ctactgatccagaaaagagaa

SEQ ID NO: 1377 - RNA, 21 nt, synthetic construct
  source 1..21: mol_type = other RNA
tactgatccagaaaagagata

SEQ ID NO: 1378 - RNA, 21 nt, synthetic construct
  source 1..21: mol_type = other RNA
actgatccagaaaagagataa

SEQ ID NO: 1379 - RNA, 21 nt, synthetic construct
  source 1..21: mol_type = other RNA
ctgatccagaaaagagatata

SEQ ID NO: 1380 - RNA, 21 nt, synthetic construct
  source 1..21: mol_type = other RNA
tgatccagaaaagagatatga

SEQ ID NO: 1381 - RNA, 21 nt, synthetic construct
  source 1..21: mol_type = other RNA
gatccagaaaagagatatgaa

SEQ ID NO: 1382 - RNA, 21 nt, synthetic construct
  source 1..21: mol_type = other RNA
atccagaaaagagatatgaca

SEQ ID NO: 1383 - RNA, 21 nt, synthetic construct
  source 1..21: mol_type = other RNA
tccagaaaagagatatgacta

SEQ ID NO: 1384 - RNA, 21 nt, synthetic construct
  source 1..21: mol_type = other RNA
ccagaaaagagatatgactaa

SEQ ID NO: 1385 - RNA, 21 nt, synthetic construct
  source 1..21: mol_type = other RNA
cagaaaagagatatgactaca

SEQ ID NO: 1386 - RNA, 21 nt, synthetic construct
  source 1..21: mol_type = other RNA
agaaaagagatatgactacta

SEQ ID NO: 1387 - RNA, 21 nt, synthetic construct
  source 1..21: mol_type = other RNA
gaaaagagatatgactactga

SEQ ID NO: 1388 - RNA, 21 nt, synthetic construct
  source 1..21: mol_type = other RNA
aaaagagatatgactactgca

SEQ ID NO: 1389 - RNA, 21 nt, synthetic construct
  source 1..21: mol_type = other RNA
tatgactactgcgacattcta

SEQ ID NO: 1390 - RNA, 21 nt, synthetic construct
  source 1..21: mol_type = other RNA
atgactactgcgacattctta

SEQ ID NO: 1391 - RNA, 21 nt, synthetic construct
  source 1..21: mol_type = other RNA
tgactactgcgacattcttga

SEQ ID NO: 1392 - RNA, 21 nt, synthetic construct
  source 1..21: mol_type = other RNA
gactactgcgacattcttgaa

SEQ ID NO: 1393 - RNA, 21 nt, synthetic construct
  source 1..21: mol_type = other RNA
ctactgcgacattcttgagta

SEQ ID NO: 1394 - RNA, 21 nt, synthetic construct
  source 1..21: mol_type = other RNA
tactgcgacattcttgagtga

SEQ ID NO: 1395 - RNA, 21 nt, synthetic construct
  source 1..21: mol_type = other RNA
actgcgacattcttgagtgta

SEQ ID NO: 1396 - RNA, 21 nt, synthetic construct
  source 1..21: mol_type = other RNA
ctgcgacattcttgagtgtga

SEQ ID NO: 1397 - RNA, 21 nt, synthetic construct
  source 1..21: mol_type = other RNA
tgcgacattcttgagtgtgaa

SEQ ID NO: 1398 - RNA, 21 nt, synthetic construct
  source 1..21: mol_type = other RNA
gcgacattcttgagtgtgaaa

SEQ ID NO: 1399 - RNA, 21 nt, synthetic construct
  source 1..21: mol_type = other RNA
cgacattcttgagtgtgaaga

SEQ ID NO: 1400 - RNA, 21 nt, synthetic construct
  source 1..21: mol_type = other RNA
gacattcttgagtgtgaagaa

SEQ ID NO: 1401 - RNA, 21 nt, synthetic construct
  source 1..21: mol_type = other RNA
acattcttgagtgtgaagaga

SEQ ID NO: 1402 - RNA, 21 nt, synthetic construct
  source 1..21: mol_type = other RNA
attcttgagtgtgaagaggaa

SEQ ID NO: 1403 - RNA, 21 nt, synthetic construct
  source 1..21: mol_type = other RNA
ttcttgagtgtgaagaggaaa

SEQ ID NO: 1404 - RNA, 21 nt, synthetic construct
  source 1..21: mol_type = other RNA
tcttgagtgtgaagaggaata

SEQ ID NO: 1405 - RNA, 21 nt, synthetic construct
  source 1..21: mol_type = other RNA
cttgagtgtgaagaggaatga

SEQ ID NO: 1406 - RNA, 21 nt, synthetic construct
  source 1..21: mol_type = other RNA
ttgagtgtgaagaggaatgta

SEQ ID NO: 1407 - RNA, 21 nt, synthetic construct
  source 1..21: mol_type = other RNA
tgagtgtgaagaggaatgtaa

SEQ ID NO: 1408 - RNA, 21 nt, synthetic construct
  source 1..21: mol_type = other RNA
gagtgtgaagaggaatgtata

SEQ ID NO: 1409 - RNA, 21 nt, synthetic construct
  source 1..21: mol_type = other RNA
agtgtgaagaggaatgtatga

SEQ ID NO: 1410 - RNA, 21 nt, synthetic construct
  source 1..21: mol_type = other RNA
gtgtgaagaggaatgtatgca

SEQ ID NO: 1411 - RNA, 21 nt, synthetic construct
  source 1..21: mol_type = other RNA
tgtgaagaggaatgtatgcaa

SEQ ID NO: 1412 - RNA, 21 nt, synthetic construct
  source 1..21: mol_type = other RNA
gtgaagaggaatgtatgcata

SEQ ID NO: 1413 - RNA, 21 nt, synthetic construct
  source 1..21: mol_type = other RNA
tgaagaggaatgtatgcatta

SEQ ID NO: 1414 - RNA, 21 nt, synthetic construct
  source 1..21: mol_type = other RNA
gaagaggaatgtatgcattga

SEQ ID NO: 1415 - RNA, 21 nt, synthetic construct
  source 1..21: mol_type = other RNA
aagaggaatgtatgcattgca

SEQ ID NO: 1416 - RNA, 21 nt, synthetic construct
  source 1..21: mol_type = other RNA
agaggaatgtatgcattgcaa

SEQ ID NO: 1417 - RNA, 21 nt, synthetic construct
  source 1..21: mol_type = other RNA
gaggaatgtatgcattgcaga

SEQ ID NO: 1418 - RNA, 21 nt, synthetic construct
  source 1..21: mol_type = other RNA
ggaatgtatgcattgcagtga

SEQ ID NO: 1419 - RNA, 21 nt, synthetic construct
  source 1..21: mol_type = other RNA
gaatgtatgcattgcagtgga

SEQ ID NO: 1420 - RNA, 21 nt, synthetic construct
  source 1..21: mol_type = other RNA
aatgtatgcattgcagtggaa

SEQ ID NO: 1421 - RNA, 21 nt, synthetic construct
  source 1..21: mol_type = other RNA
atgtatgcattgcagtggaga

SEQ ID NO: 1422 - RNA, 21 nt, synthetic construct
  source 1..21: mol_type = other RNA
tgtatgcattgcagtggagaa

SEQ ID NO: 1423 - RNA, 21 nt, synthetic construct
  source 1..21: mol_type = other RNA
gtatgcattgcagtggagaaa

SEQ ID NO: 1424 - RNA, 21 nt, synthetic construct
  source 1..21: mol_type = other RNA
tatgcattgcagtggagaaaa

SEQ ID NO: 1425 - RNA, 21 nt, synthetic construct
  source 1..21: mol_type = other RNA
atgcattgcagtggagaaaaa

SEQ ID NO: 1426 - RNA, 21 nt, synthetic construct
  source 1..21: mol_type = other RNA
tgcattgcagtggagaaaaca

SEQ ID NO: 1427 - RNA, 21 nt, synthetic construct
  source 1..21: mol_type = other RNA
gcattgcagtggagaaaacta

SEQ ID NO: 1428 - RNA, 21 nt, synthetic construct
  source 1..21: mol_type = other RNA
cattgcagtggagaaaactaa

SEQ ID NO: 1429 - RNA, 21 nt, synthetic construct
  source 1..21: mol_type = other RNA
attgcagtggagaaaactata

SEQ ID NO: 1430 - RNA, 21 nt, synthetic construct
  source 1..21: mol_type = other RNA
ttgcagtggagaaaactatga

SEQ ID NO: 1431 - RNA, 21 nt, synthetic construct
  source 1..21: mol_type = other RNA
tgcagtggagaaaactatgaa

SEQ ID NO: 1432 - RNA, 21 nt, synthetic construct
  source 1..21: mol_type = other RNA
acggcaaaatttccaagacca

SEQ ID NO: 1433 - RNA, 21 nt, synthetic construct
  source 1..21: mol_type = other RNA
cggcaaaatttccaagaccaa

SEQ ID NO: 1434 - RNA, 21 nt, synthetic construct
  source 1..21: mol_type = other RNA
ggcaaaatttccaagaccata

SEQ ID NO: 1435 - RNA, 21 nt, synthetic construct
  source 1..21: mol_type = other RNA
gcaaaatttccaagaccatga

SEQ ID NO: 1436 - RNA, 21 nt, synthetic construct
  source 1..21: mol_type = other RNA
caaaatttccaagaccatgta

SEQ ID NO: 1437 - RNA, 21 nt, synthetic construct
  source 1..21: mol_type = other RNA
aaaatttccaagaccatgtca

SEQ ID NO: 1438 - RNA, 21 nt, synthetic construct
  source 1..21: mol_type = other RNA
aaatttccaagaccatgtcta

SEQ ID NO: 1439 - RNA, 21 nt, synthetic construct
  source 1..21: mol_type = other RNA
aatttccaagaccatgtctga

SEQ ID NO: 1440 - RNA, 21 nt, synthetic construct
  source 1..21: mol_type = other RNA
atttccaagaccatgtctgga

SEQ ID NO: 1441 - RNA, 21 nt, synthetic construct
  source 1..21: mol_type = other RNA
tttccaagaccatgtctggaa

SEQ ID NO: 1442 - RNA, 21 nt, synthetic construct
  source 1..21: mol_type = other RNA
aatgccaggcctgggactcta

SEQ ID NO: 1443 - RNA, 21 nt, synthetic construct
  source 1..21: mol_type = other RNA
gccaggcctgggactctcaga

SEQ ID NO: 1444 - RNA, 21 nt, synthetic construct
  source 1..21: mol_type = other RNA
ccaggcctgggactctcagaa

SEQ ID NO: 1445 - RNA, 21 nt, synthetic construct
  source 1..21: mol_type = other RNA
agcccacacgctcatggataa

SEQ ID NO: 1446 - RNA, 21 nt, synthetic construct
  source 1..21: mol_type = other RNA
ccacacgctcatggatacata

SEQ ID NO: 1447 - RNA, 21 nt, synthetic construct
  source 1..21: mol_type = other RNA
cacacgctcatggatacatta

SEQ ID NO: 1448 - RNA, 21 nt, synthetic construct
  source 1..21: mol_type = other RNA
acgctcatggatacattccta

SEQ ID NO: 1449 - RNA, 21 nt, synthetic construct
  source 1..21: mol_type = other RNA
cgctcatggatacattcctta

SEQ ID NO: 1450 - RNA, 21 nt, synthetic construct
  source 1..21: mol_type = other RNA
gctcatggatacattccttca

SEQ ID NO: 1451 - RNA, 21 nt, synthetic construct
  source 1..21: mol_type = other RNA
ctcatggatacattccttcca

SEQ ID NO: 1452 - RNA, 21 nt, synthetic construct
  source 1..21: mol_type = other RNA
tcatggatacattccttccaa

SEQ ID NO: 1453 - RNA, 21 nt, synthetic construct
  source 1..21: mol_type = other RNA
catggatacattccttccaaa

SEQ ID NO: 1454 - RNA, 21 nt, synthetic construct
  source 1..21: mol_type = other RNA
atggatacattccttccaaaa

SEQ ID NO: 1455 - RNA, 21 nt, synthetic construct
  source 1..21: mol_type = other RNA
tggatacattccttccaaata

SEQ ID NO: 1456 - RNA, 21 nt, synthetic construct
  source 1..21: mol_type = other RNA
ggatacattccttccaaatta

SEQ ID NO: 1457 - RNA, 21 nt, synthetic construct
  source 1..21: mol_type = other RNA
gatacattccttccaaattta

SEQ ID NO: 1458 - RNA, 21 nt, synthetic construct
  source 1..21: mol_type = other RNA
atacattccttccaaatttca

SEQ ID NO: 1459 - RNA, 21 nt, synthetic construct
  source 1..21: mol_type = other RNA
tacattccttccaaatttcca

SEQ ID NO: 1460 - RNA, 21 nt, synthetic construct
  source 1..21: mol_type = other RNA
acattccttccaaatttccaa

SEQ ID NO: 1461 - RNA, 21 nt, synthetic construct
  source 1..21: mol_type = other RNA
cattccttccaaatttccaaa

SEQ ID NO: 1462 - RNA, 21 nt, synthetic construct
  source 1..21: mol_type = other RNA
attccttccaaatttccaaaa

SEQ ID NO: 1463 - RNA, 21 nt, synthetic construct
  source 1..21: mol_type = other RNA
ttccttccaaatttccaaaca

SEQ ID NO: 1464 - RNA, 21 nt, synthetic construct
  source 1..21: mol_type = other RNA
tccttccaaatttccaaacaa

SEQ ID NO: 1465 - RNA, 21 nt, synthetic construct
  source 1..21: mol_type = other RNA
ccttccaaatttccaaacaaa

SEQ ID NO: 1466 - RNA, 21 nt, synthetic construct
  source 1..21: mol_type = other RNA
cttccaaatttccaaacaaga

SEQ ID NO: 1467 - RNA, 21 nt, synthetic construct
  source 1..21: mol_type = other RNA
ttccaaatttccaaacaagaa

SEQ ID NO: 1468 - RNA, 21 nt, synthetic construct
  source 1..21: mol_type = other RNA
tccaaatttccaaacaagaaa

SEQ ID NO: 1469 - RNA, 21 nt, synthetic construct
  source 1..21: mol_type = other RNA
ccaaatttccaaacaagaaca

SEQ ID NO: 1470 - RNA, 21 nt, synthetic construct
  source 1..21: mol_type = other RNA
caaatttccaaacaagaacca

SEQ ID NO: 1471 - RNA, 21 nt, synthetic construct
  source 1..21: mol_type = other RNA
aaatttccaaacaagaaccta

SEQ ID NO: 1472 - RNA, 21 nt, synthetic construct
  source 1..21: mol_type = other RNA
aatttccaaacaagaacctga

SEQ ID NO: 1473 - RNA, 21 nt, synthetic construct
  source 1..21: mol_type = other RNA
atttccaaacaagaacctgaa

SEQ ID NO: 1474 - RNA, 21 nt, synthetic construct
  source 1..21: mol_type = other RNA
tttccaaacaagaacctgaaa

SEQ ID NO: 1475 - RNA, 21 nt, synthetic construct
  source 1..21: mol_type = other RNA
ttccaaacaagaacctgaaga

SEQ ID NO: 1476 - RNA, 21 nt, synthetic construct
  source 1..21: mol_type = other RNA
tccaaacaagaacctgaagaa

SEQ ID NO: 1477 - RNA, 21 nt, synthetic construct
  source 1..21: mol_type = other RNA
ccaaacaagaacctgaagaaa

SEQ ID NO: 1478 - RNA, 21 nt, synthetic construct
  source 1..21: mol_type = other RNA
caaacaagaacctgaagaaga

SEQ ID NO: 1479 - RNA, 21 nt, synthetic construct
  source 1..21: mol_type = other RNA
aaacaagaacctgaagaagaa

SEQ ID NO: 1480 - RNA, 21 nt, synthetic construct
  source 1..21: mol_type = other RNA
aacaagaacctgaagaagaaa

SEQ ID NO: 1481 - RNA, 21 nt, synthetic construct
  source 1..21: mol_type = other RNA
acaagaacctgaagaagaata

SEQ ID NO: 1482 - RNA, 21 nt, synthetic construct
  source 1..21: mol_type = other RNA
caagaacctgaagaagaatta

SEQ ID NO: 1483 - RNA, 21 nt, synthetic construct
  source 1..21: mol_type = other RNA
aagaacctgaagaagaattaa

SEQ ID NO: 1484 - RNA, 21 nt, synthetic construct
  source 1..21: mol_type = other RNA
agaacctgaagaagaattaca

SEQ ID NO: 1485 - RNA, 21 nt, synthetic construct
  source 1..21: mol_type = other RNA
gaacctgaagaagaattacta

SEQ ID NO: 1486 - RNA, 21 nt, synthetic construct
  source 1..21: mol_type = other RNA
aacctgaagaagaattactga

SEQ ID NO: 1487 - RNA, 21 nt, synthetic construct
  source 1..21: mol_type = other RNA
acctgaagaagaattactgta

SEQ ID NO: 1488 - RNA, 21 nt, synthetic construct
  source 1..21: mol_type = other RNA
cctgaagaagaattactgtca

SEQ ID NO: 1489 - RNA, 21 nt, synthetic construct
  source 1..21: mol_type = other RNA
ctgaagaagaattactgtcga

SEQ ID NO: 1490 - RNA, 21 nt, synthetic construct
  source 1..21: mol_type = other RNA
tgaagaagaattactgtcgta

SEQ ID NO: 1491 - RNA, 21 nt, synthetic construct
  source 1..21: mol_type = other RNA
gaagaagaattactgtcgtaa

SEQ ID NO: 1492 - RNA, 21 nt, synthetic construct
  source 1..21: mol_type = other RNA
aagaagaattactgtcgtaaa

SEQ ID NO: 1493 - RNA, 21 nt, synthetic construct
  source 1..21: mol_type = other RNA
agggagctgcggccttggtga

SEQ ID NO: 1494 - RNA, 21 nt, synthetic construct
  source 1..21: mol_type = other RNA
ggagctgcggccttggtgtta

SEQ ID NO: 1495 - RNA, 21 nt, synthetic construct
  source 1..21: mol_type = other RNA
gagctgcggccttggtgttta

SEQ ID NO: 1496 - RNA, 21 nt, synthetic construct
  source 1..21: mol_type = other RNA
agctgcggccttggtgtttca

SEQ ID NO: 1497 - RNA, 21 nt, synthetic construct
  source 1..21: mol_type = other RNA
tgcggccttggtgtttcacca

SEQ ID NO: 1498 - RNA, 21 nt, synthetic construct
  source 1..21: mol_type = other RNA
cggccttggtgtttcaccaca

SEQ ID NO: 1499 - RNA, 21 nt, synthetic construct
  source 1..21: mol_type = other RNA
ggccttggtgtttcaccacca

SEQ ID NO: 1500 - RNA, 21 nt, synthetic construct
  source 1..21: mol_type = other RNA
gccttggtgtttcaccaccga

SEQ ID NO: 1501 - RNA, 21 nt, synthetic construct
  source 1..21: mol_type = other RNA
caacaagcgctgggaacttta

SEQ ID NO: 1502 - RNA, 21 nt, synthetic construct
  source 1..21: mol_type = other RNA
aacaagcgctgggaactttga

SEQ ID NO: 1503 - RNA, 21 nt, synthetic construct
  source 1..21: mol_type = other RNA
gctgcacaacacctccaccaa

SEQ ID NO: 1504 - RNA, 21 nt, synthetic construct
  source 1..21: mol_type = other RNA
ctgcacaacacctccaccata

SEQ ID NO: 1505 - RNA, 21 nt, synthetic construct
  source 1..21: mol_type = other RNA
tgcacaacacctccaccatca

SEQ ID NO: 1506 - RNA, 21 nt, synthetic construct
  source 1..21: mol_type = other RNA
gcacaacacctccaccatcta

SEQ ID NO: 1507 - RNA, 21 nt, synthetic construct
  source 1..21: mol_type = other RNA
cacaacacctccaccatctta

SEQ ID NO: 1508 - RNA, 21 nt, synthetic construct
  source 1..21: mol_type = other RNA
acaacacctccaccatcttca

SEQ ID NO: 1509 - RNA, 21 nt, synthetic construct
  source 1..21: mol_type = other RNA
caacacctccaccatcttcta

SEQ ID NO: 1510 - RNA, 21 nt, synthetic construct
  source 1..21: mol_type = other RNA
cacctccaccatcttctggta

SEQ ID NO: 1511 - RNA, 21 nt, synthetic construct
  source 1..21: mol_type = other RNA
acctccaccatcttctggtca

SEQ ID NO: 1512 - RNA, 21 nt, synthetic construct
  source 1..21: mol_type = other RNA
cctccaccatcttctggtcca

SEQ ID NO: 1513 - RNA, 21 nt, synthetic construct
  source 1..21: mol_type = other RNA
ctccaccatcttctggtccca

SEQ ID NO: 1514 - RNA, 21 nt, synthetic construct
  source 1..21: mol_type = other RNA
tccaccatcttctggtcccaa

SEQ ID NO: 1515 - RNA, 21 nt, synthetic construct
  source 1..21: mol_type = other RNA
ccaccatcttctggtcccaca

SEQ ID NO: 1516 - RNA, 21 nt, synthetic construct
  source 1..21: mol_type = other RNA
caccatcttctggtcccacca

SEQ ID NO: 1517 - RNA, 21 nt, synthetic construct
  source 1..21: mol_type = other RNA
catcttctggtcccacctaca

SEQ ID NO: 1518 - RNA, 21 nt, synthetic construct
  source 1..21: mol_type = other RNA
ttctggtcccacctaccagta

SEQ ID NO: 1519 - RNA, 21 nt, synthetic construct
  source 1..21: mol_type = other RNA
tctggtcccacctaccagtga

SEQ ID NO: 1520 - RNA, 21 nt, synthetic construct
  source 1..21: mol_type = other RNA
ctggtcccacctaccagtgta

SEQ ID NO: 1521 - RNA, 21 nt, synthetic construct
  source 1..21: mol_type = other RNA
tggtcccacctaccagtgtca

SEQ ID NO: 1522 - RNA, 21 nt, synthetic construct
  source 1..21: mol_type = other RNA
cccacctaccagtgtctgaaa

SEQ ID NO: 1523 - RNA, 21 nt, synthetic construct
  source 1..21: mol_type = other RNA
ccacctaccagtgtctgaaga

SEQ ID NO: 1524 - RNA, 21 nt, synthetic construct
  source 1..21: mol_type = other RNA
acctaccagtgtctgaaggga

SEQ ID NO: 1525 - RNA, 21 nt, synthetic construct
  source 1..21: mol_type = other RNA
cctaccagtgtctgaagggaa

SEQ ID NO: 1526 - RNA, 21 nt, synthetic construct
  source 1..21: mol_type = other RNA
ctaccagtgtctgaagggaaa

SEQ ID NO: 1527 - RNA, 21 nt, synthetic construct
  source 1..21: mol_type = other RNA
taccagtgtctgaagggaaca

SEQ ID NO: 1528 - RNA, 21 nt, synthetic construct
  source 1..21: mol_type = other RNA
gtgtctgaagggaacaggtga

SEQ ID NO: 1529 - RNA, 21 nt, synthetic construct
  source 1..21: mol_type = other RNA
gtctgaagggaacaggtgaaa

SEQ ID NO: 1530 - RNA, 21 nt, synthetic construct
  source 1..21: mol_type = other RNA
tctgaagggaacaggtgaaaa

SEQ ID NO: 1531 - RNA, 21 nt, synthetic construct
  source 1..21: mol_type = other RNA
ctgaagggaacaggtgaaaaa

SEQ ID NO: 1532 - RNA, 21 nt, synthetic construct
  source 1..21: mol_type = other RNA
tgaagggaacaggtgaaaaca

SEQ ID NO: 1533 - RNA, 21 nt, synthetic construct
  source 1..21: mol_type = other RNA
gaagggaacaggtgaaaacta

SEQ ID NO: 1534 - RNA, 21 nt, synthetic construct
  source 1..21: mol_type = other RNA
aagggaacaggtgaaaactaa

SEQ ID NO: 1535 - RNA, 21 nt, synthetic construct
  source 1..21: mol_type = other RNA
agggaacaggtgaaaactata

SEQ ID NO: 1536 - RNA, 21 nt, synthetic construct
  source 1..21: mol_type = other RNA
gggaacaggtgaaaactatca

SEQ ID NO: 1537 - RNA, 21 nt, synthetic construct
  source 1..21: mol_type = other RNA
ggaacaggtgaaaactatcga

SEQ ID NO: 1538 - RNA, 21 nt, synthetic construct
  source 1..21: mol_type = other RNA
gaacaggtgaaaactatcgca

SEQ ID NO: 1539 - RNA, 21 nt, synthetic construct
  source 1..21: mol_type = other RNA
gtgaaaactatcgcgggaata

SEQ ID NO: 1540 - RNA, 21 nt, synthetic construct
  source 1..21: mol_type = other RNA
gaaaactatcgcgggaatgta

SEQ ID NO: 1541 - RNA, 21 nt, synthetic construct
  source 1..21: mol_type = other RNA
aaaactatcgcgggaatgtga

SEQ ID NO: 1542 - RNA, 21 nt, synthetic construct
  source 1..21: mol_type = other RNA
tatcgcgggaatgtggctgta

SEQ ID NO: 1543 - RNA, 21 nt, synthetic construct
  source 1..21: mol_type = other RNA
atcgcgggaatgtggctgtta

SEQ ID NO: 1544 - RNA, 21 nt, synthetic construct
  source 1..21: mol_type = other RNA
tcgcgggaatgtggctgttaa

SEQ ID NO: 1545 - RNA, 21 nt, synthetic construct
  source 1..21: mol_type = other RNA
cgcgggaatgtggctgttaca

SEQ ID NO: 1546 - RNA, 21 nt, synthetic construct
  source 1..21: mol_type = other RNA
gggaatgtggctgttaccgta

SEQ ID NO: 1547 - RNA, 21 nt, synthetic construct
  source 1..21: mol_type = other RNA
gaatgtggctgttaccgtgta

SEQ ID NO: 1548 - RNA, 21 nt, synthetic construct
  source 1..21: mol_type = other RNA
aatgtggctgttaccgtgtca

SEQ ID NO: 1549 - RNA, 21 nt, synthetic construct
  source 1..21: mol_type = other RNA
ccgtgtccgggcacacctgta

SEQ ID NO: 1550 - RNA, 21 nt, synthetic construct
  source 1..21: mol_type = other RNA
tccgggcacacctgtcagcaa

SEQ ID NO: 1551 - RNA, 21 nt, synthetic construct
  source 1..21: mol_type = other RNA
cgggcacacctgtcagcacta

SEQ ID NO: 1552 - RNA, 21 nt, synthetic construct
  source 1..21: mol_type = other RNA
gcacacctgtcagcactggaa

SEQ ID NO: 1553 - RNA, 21 nt, synthetic construct
  source 1..21: mol_type = other RNA
cacacctgtcagcactggaga

SEQ ID NO: 1554 - RNA, 21 nt, synthetic construct
  source 1..21: mol_type = other RNA
acacctgtcagcactggagta

SEQ ID NO: 1555 - RNA, 21 nt, synthetic construct
  source 1..21: mol_type = other RNA
cctgtcagcactggagtgcaa

SEQ ID NO: 1556 - RNA, 21 nt, synthetic construct
  source 1..21: mol_type = other RNA
tgtcagcactggagtgcacaa

SEQ ID NO: 1557 - RNA, 21 nt, synthetic construct
  source 1..21: mol_type = other RNA
tcagcactggagtgcacagaa

SEQ ID NO: 1558 - RNA, 21 nt, synthetic construct
  source 1..21: mol_type = other RNA
cagcactggagtgcacagaca

SEQ ID NO: 1559 - RNA, 21 nt, synthetic construct
  source 1..21: mol_type = other RNA
agcactggagtgcacagacca

SEQ ID NO: 1560 - RNA, 21 nt, synthetic construct
  source 1..21: mol_type = other RNA
ctcacacacataacaggacaa

SEQ ID NO: 1561 - RNA, 21 nt, synthetic construct
  source 1..21: mol_type = other RNA
cacacacataacaggacacca

SEQ ID NO: 1562 - RNA, 21 nt, synthetic construct
  source 1..21: mol_type = other RNA
acacacataacaggacaccaa

SEQ ID NO: 1563 - RNA, 21 nt, synthetic construct
  source 1..21: mol_type = other RNA
cacacataacaggacaccaga

SEQ ID NO: 1564 - RNA, 21 nt, synthetic construct
  source 1..21: mol_type = other RNA
acacataacaggacaccagaa

SEQ ID NO: 1565 - RNA, 21 nt, synthetic construct
  source 1..21: mol_type = other RNA
cacataacaggacaccagaaa

SEQ ID NO: 1566 - RNA, 21 nt, synthetic construct
  source 1..21: mol_type = other RNA
acataacaggacaccagaaaa

SEQ ID NO: 1567 - RNA, 21 nt, synthetic construct
  source 1..21: mol_type = other RNA
cataacaggacaccagaaaaa

SEQ ID NO: 1568 - RNA, 21 nt, synthetic construct
  source 1..21: mol_type = other RNA
ataacaggacaccagaaaaca

SEQ ID NO: 1569 - RNA, 21 nt, synthetic construct
  source 1..21: mol_type = other RNA
taacaggacaccagaaaacta

SEQ ID NO: 1570 - RNA, 21 nt, synthetic construct
  source 1..21: mol_type = other RNA
aacaggacaccagaaaactta

SEQ ID NO: 1571 - RNA, 21 nt, synthetic construct
  source 1..21: mol_type = other RNA
cctgcaaaaatttggatgaaa

SEQ ID NO: 1572 - RNA, 21 nt, synthetic construct
  source 1..21: mol_type = other RNA
ctgcaaaaatttggatgaaaa

SEQ ID NO: 1573 - RNA, 21 nt, synthetic construct
  source 1..21: mol_type = other RNA
tgcaaaaatttggatgaaaaa

SEQ ID NO: 1574 - RNA, 21 nt, synthetic construct
  source 1..21: mol_type = other RNA
gcaaaaatttggatgaaaaca

SEQ ID NO: 1575 - RNA, 21 nt, synthetic construct
  source 1..21: mol_type = other RNA
caaaaatttggatgaaaacta

SEQ ID NO: 1576 - RNA, 21 nt, synthetic construct
  source 1..21: mol_type = other RNA
aaaaatttggatgaaaactaa

SEQ ID NO: 1577 - RNA, 21 nt, synthetic construct
  source 1..21: mol_type = other RNA
aaaatttggatgaaaactaca

SEQ ID NO: 1578 - RNA, 21 nt, synthetic construct
  source 1..21: mol_type = other RNA
aaatttggatgaaaactacta

SEQ ID NO: 1579 - RNA, 21 nt, synthetic construct
  source 1..21: mol_type = other RNA
aatttggatgaaaactactga

SEQ ID NO: 1580 - RNA, 21 nt, synthetic construct
  source 1..21: mol_type = other RNA
atttggatgaaaactactgca

SEQ ID NO: 1581 - RNA, 21 nt, synthetic construct
  source 1..21: mol_type = other RNA
tttggatgaaaactactgcca

SEQ ID NO: 1582 - RNA, 21 nt, synthetic construct
  source 1..21: mol_type = other RNA
ttggatgaaaactactgccga

SEQ ID NO: 1583 - RNA, 21 nt, synthetic construct
  source 1..21: mol_type = other RNA
tggatgaaaactactgccgca

SEQ ID NO: 1584 - RNA, 21 nt, synthetic construct
  source 1..21: mol_type = other RNA
ggatgaaaactactgccgcaa

SEQ ID NO: 1585 - RNA, 21 nt, synthetic construct
  source 1..21: mol_type = other RNA
gatgaaaactactgccgcaaa

SEQ ID NO: 1586 - RNA, 21 nt, synthetic construct
  source 1..21: mol_type = other RNA
atgaaaactactgccgcaata

SEQ ID NO: 1587 - RNA, 21 nt, synthetic construct
  source 1..21: mol_type = other RNA
tgaaaactactgccgcaatca

SEQ ID NO: 1588 - RNA, 21 nt, synthetic construct
  source 1..21: mol_type = other RNA
gaaaactactgccgcaatcca

SEQ ID NO: 1589 - RNA, 21 nt, synthetic construct
  source 1..21: mol_type = other RNA
aaaactactgccgcaatccta

SEQ ID NO: 1590 - RNA, 21 nt, synthetic construct
  source 1..21: mol_type = other RNA
aaactactgccgcaatcctga

SEQ ID NO: 1591 - RNA, 21 nt, synthetic construct
  source 1..21: mol_type = other RNA
aactactgccgcaatcctgaa

SEQ ID NO: 1592 - RNA, 21 nt, synthetic construct
  source 1..21: mol_type = other RNA
tactgccgcaatcctgacgga

SEQ ID NO: 1593 - RNA, 21 nt, synthetic construct
  source 1..21: mol_type = other RNA
actgccgcaatcctgacggaa

SEQ ID NO: 1594 - RNA, 21 nt, synthetic construct
  source 1..21: mol_type = other RNA
ctgccgcaatcctgacggaaa

SEQ ID NO: 1595 - RNA, 21 nt, synthetic construct
  source 1..21: mol_type = other RNA
tgccgcaatcctgacggaaaa

SEQ ID NO: 1596 - RNA, 21 nt, synthetic construct
  source 1..21: mol_type = other RNA
gccgcaatcctgacggaaaaa

SEQ ID NO: 1597 - RNA, 21 nt, synthetic construct
  source 1..21: mol_type = other RNA
ccgcaatcctgacggaaaaaa

SEQ ID NO: 1598 - RNA, 21 nt, synthetic construct
  source 1..21: mol_type = other RNA
cgcaatcctgacggaaaaaga

SEQ ID NO: 1599 - RNA, 21 nt, synthetic construct
  source 1..21: mol_type = other RNA
gcaatcctgacggaaaaagga

SEQ ID NO: 1600 - RNA, 21 nt, synthetic construct
  source 1..21: mol_type = other RNA
caatcctgacggaaaaaggga

SEQ ID NO: 1601 - RNA, 21 nt, synthetic construct
  source 1..21: mol_type = other RNA
aatcctgacggaaaaagggca

SEQ ID NO: 1602 - RNA, 21 nt, synthetic construct
  source 1..21: mol_type = other RNA
atcctgacggaaaaagggcca

SEQ ID NO: 1603 - RNA, 21 nt, synthetic construct
  source 1..21: mol_type = other RNA
catggtgccatacaaccaaca

SEQ ID NO: 1604 - RNA, 21 nt, synthetic construct
  source 1..21: mol_type = other RNA
tggtgccatacaaccaacaga

SEQ ID NO: 1605 - RNA, 21 nt, synthetic construct
  source 1..21: mol_type = other RNA
gtgccatacaaccaacagcca

SEQ ID NO: 1606 - RNA, 21 nt, synthetic construct
  source 1..21: mol_type = other RNA
gccatacaaccaacagccaaa

SEQ ID NO: 1607 - RNA, 21 nt, synthetic construct
  source 1..21: mol_type = other RNA
ccatacaaccaacagccaaga

SEQ ID NO: 1608 - RNA, 21 nt, synthetic construct
  source 1..21: mol_type = other RNA
catacaaccaacagccaagta

SEQ ID NO: 1609 - RNA, 21 nt, synthetic construct
  source 1..21: mol_type = other RNA
atacaaccaacagccaagtga

SEQ ID NO: 1610 - RNA, 21 nt, synthetic construct
  source 1..21: mol_type = other RNA
tacaaccaacagccaagtgca

SEQ ID NO: 1611 - RNA, 21 nt, synthetic construct
  source 1..21: mol_type = other RNA
acaaccaacagccaagtgcga

SEQ ID NO: 1612 - RNA, 21 nt, synthetic construct
  source 1..21: mol_type = other RNA
gccaagtgcggtgggagtaca

SEQ ID NO: 1613 - RNA, 21 nt, synthetic construct
  source 1..21: mol_type = other RNA
aagtgcggtgggagtactgta

SEQ ID NO: 1614 - RNA, 21 nt, synthetic construct
  source 1..21: mol_type = other RNA
agtgcggtgggagtactgtaa

SEQ ID NO: 1615 - RNA, 21 nt, synthetic construct
  source 1..21: mol_type = other RNA
gtgcggtgggagtactgtaaa

SEQ ID NO: 1616 - RNA, 21 nt, synthetic construct
  source 1..21: mol_type = other RNA
tgcggtgggagtactgtaaga

SEQ ID NO: 1617 - RNA, 21 nt, synthetic construct
  source 1..21: mol_type = other RNA
gcggtgggagtactgtaagaa

SEQ ID NO: 1618 - RNA, 21 nt, synthetic construct
  source 1..21: mol_type = other RNA
cggtgggagtactgtaagata

SEQ ID NO: 1619 - RNA, 21 nt, synthetic construct
  source 1..21: mol_type = other RNA
ggtgggagtactgtaagataa

SEQ ID NO: 1620 - RNA, 21 nt, synthetic construct
  source 1..21: mol_type = other RNA
gtgggagtactgtaagataca

SEQ ID NO: 1621 - RNA, 21 nt, synthetic construct
  source 1..21: mol_type = other RNA
tgggagtactgtaagatacca

SEQ ID NO: 1622 - RNA, 21 nt, synthetic construct
  source 1..21: mol_type = other RNA
ggagtactgtaagataccgta

SEQ ID NO: 1623 - RNA, 21 nt, synthetic construct
  source 1..21: mol_type = other RNA
gagtactgtaagataccgtca

SEQ ID NO: 1624 - RNA, 21 nt, synthetic construct
  source 1..21: mol_type = other RNA
agtactgtaagataccgtcca

SEQ ID NO: 1625 - RNA, 21 nt, synthetic construct
  source 1..21: mol_type = other RNA
actgtaagataccgtcctgta

SEQ ID NO: 1626 - RNA, 21 nt, synthetic construct
  source 1..21: mol_type = other RNA
ctgtaagataccgtcctgtga

SEQ ID NO: 1627 - RNA, 21 nt, synthetic construct
  source 1..21: mol_type = other RNA
gtaagataccgtcctgtgaca

SEQ ID NO: 1628 - RNA, 21 nt, synthetic construct
  source 1..21: mol_type = other RNA
ttggctcccacagcaccacca

SEQ ID NO: 1629 - RNA, 21 nt, synthetic construct
  source 1..21: mol_type = other RNA
ggctcccacagcaccacctga

SEQ ID NO: 1630 - RNA, 21 nt, synthetic construct
  source 1..21: mol_type = other RNA
gctcccacagcaccacctgaa

SEQ ID NO: 1631 - RNA, 21 nt, synthetic construct
  source 1..21: mol_type = other RNA
acagcaccacctgagctaaca

SEQ ID NO: 1632 - RNA, 21 nt, synthetic construct
  source 1..21: mol_type = other RNA
cagcaccacctgagctaacca

SEQ ID NO: 1633 - RNA, 21 nt, synthetic construct
  source 1..21: mol_type = other RNA
catggtgatggacagagctaa

SEQ ID NO: 1634 - RNA, 21 nt, synthetic construct
  source 1..21: mol_type = other RNA
gacagagctaccgaggcacaa

SEQ ID NO: 1635 - RNA, 21 nt, synthetic construct
  source 1..21: mol_type = other RNA
acagagctaccgaggcacata

SEQ ID NO: 1636 - RNA, 21 nt, synthetic construct
  source 1..21: mol_type = other RNA
cagagctaccgaggcacatca

SEQ ID NO: 1637 - RNA, 21 nt, synthetic construct
  source 1..21: mol_type = other RNA
gagctaccgaggcacatccta

SEQ ID NO: 1638 - RNA, 21 nt, synthetic construct
  source 1..21: mol_type = other RNA
accgaggcacatcctccacca

SEQ ID NO: 1639 - RNA, 21 nt, synthetic construct
  source 1..21: mol_type = other RNA
cgaggcacatcctccaccaca

SEQ ID NO: 1640 - RNA, 21 nt, synthetic construct
  source 1..21: mol_type = other RNA
aggcacatcctccaccaccaa

SEQ ID NO: 1641 - RNA, 21 nt, synthetic construct
  source 1..21: mol_type = other RNA
gcacatcctccaccaccacca

SEQ ID NO: 1642 - RNA, 21 nt, synthetic construct
  source 1..21: mol_type = other RNA
catcctccaccaccaccacaa

SEQ ID NO: 1643 - RNA, 21 nt, synthetic construct
  source 1..21: mol_type = other RNA
atcctccaccaccaccacaga

SEQ ID NO: 1644 - RNA, 21 nt, synthetic construct
  source 1..21: mol_type = other RNA
tcctccaccaccaccacagga

SEQ ID NO: 1645 - RNA, 21 nt, synthetic construct
  source 1..21: mol_type = other RNA
cctccaccaccaccacaggaa

SEQ ID NO: 1646 - RNA, 21 nt, synthetic construct
  source 1..21: mol_type = other RNA
ctccaccaccaccacaggaaa

SEQ ID NO: 1647 - RNA, 21 nt, synthetic construct
  source 1..21: mol_type = other RNA
tccaccaccaccacaggaaaa

SEQ ID NO: 1648 - RNA, 21 nt, synthetic construct
  source 1..21: mol_type = other RNA
ccaccaccaccacaggaaaga

SEQ ID NO: 1649 - RNA, 21 nt, synthetic construct
  source 1..21: mol_type = other RNA
caccaccaccacaggaaagaa

SEQ ID NO: 1650 - RNA, 21 nt, synthetic construct
  source 1..21: mol_type = other RNA
accaccaccacaggaaagaaa

SEQ ID NO: 1651 - RNA, 21 nt, synthetic construct
  source 1..21: mol_type = other RNA
ccaccaccacaggaaagaaga

SEQ ID NO: 1652 - RNA, 21 nt, synthetic construct
  source 1..21: mol_type = other RNA
caccaccacaggaaagaagta

SEQ ID NO: 1653 - RNA, 21 nt, synthetic construct
  source 1..21: mol_type = other RNA
ccaccacaggaaagaagtgta

SEQ ID NO: 1654 - RNA, 21 nt, synthetic construct
  source 1..21: mol_type = other RNA
caccacaggaaagaagtgtca

SEQ ID NO: 1655 - RNA, 21 nt, synthetic construct
  source 1..21: mol_type = other RNA
accacaggaaagaagtgtcaa

SEQ ID NO: 1656 - RNA, 21 nt, synthetic construct
  source 1..21: mol_type = other RNA
ccacaggaaagaagtgtcaga

SEQ ID NO: 1657 - RNA, 21 nt, synthetic construct
  source 1..21: mol_type = other RNA
cacaggaaagaagtgtcagta

SEQ ID NO: 1658 - RNA, 21 nt, synthetic construct
  source 1..21: mol_type = other RNA
acaggaaagaagtgtcagtca

SEQ ID NO: 1659 - RNA, 21 nt, synthetic construct
  source 1..21: mol_type = other RNA
caggaaagaagtgtcagtcta

SEQ ID NO: 1660 - RNA, 21 nt, synthetic construct
  source 1..21: mol_type = other RNA
aggaaagaagtgtcagtctta

SEQ ID NO: 1661 - RNA, 21 nt, synthetic construct
  source 1..21: mol_type = other RNA
ggaaagaagtgtcagtcttga

SEQ ID NO: 1662 - RNA, 21 nt, synthetic construct
  source 1..21: mol_type = other RNA
gaaagaagtgtcagtcttgga

SEQ ID NO: 1663 - RNA, 21 nt, synthetic construct
  source 1..21: mol_type = other RNA
aaagaagtgtcagtcttggta

SEQ ID NO: 1664 - RNA, 21 nt, synthetic construct
  source 1..21: mol_type = other RNA
agaagtgtcagtcttggtcaa

SEQ ID NO: 1665 - RNA, 21 nt, synthetic construct
  source 1..21: mol_type = other RNA
gaagtgtcagtcttggtcata

SEQ ID NO: 1666 - RNA, 21 nt, synthetic construct
  source 1..21: mol_type = other RNA
aagtgtcagtcttggtcatca

SEQ ID NO: 1667 - RNA, 21 nt, synthetic construct
  source 1..21: mol_type = other RNA
agtgtcagtcttggtcatcta

SEQ ID NO: 1668 - RNA, 21 nt, synthetic construct
  source 1..21: mol_type = other RNA
gtgtcagtcttggtcatctaa

SEQ ID NO: 1669 - RNA, 21 nt, synthetic construct
  source 1..21: mol_type = other RNA
tgtcagtcttggtcatctata

SEQ ID NO: 1670 - RNA, 21 nt, synthetic construct
  source 1..21: mol_type = other RNA
gtcagtcttggtcatctatga

SEQ ID NO: 1671 - RNA, 21 nt, synthetic construct
  source 1..21: mol_type = other RNA
tcagtcttggtcatctatgaa

SEQ ID NO: 1672 - RNA, 21 nt, synthetic construct
  source 1..21: mol_type = other RNA
cagtcttggtcatctatgaca

SEQ ID NO: 1673 - RNA, 21 nt, synthetic construct
  source 1..21: mol_type = other RNA
agtcttggtcatctatgacaa

SEQ ID NO: 1674 - RNA, 21 nt, synthetic construct
  source 1..21: mol_type = other RNA
ggaatccagatgccgataaaa

SEQ ID NO: 1675 - RNA, 21 nt, synthetic construct
  source 1..21: mol_type = other RNA
gaatccagatgccgataaaga

SEQ ID NO: 1676 - RNA, 21 nt, synthetic construct
  source 1..21: mol_type = other RNA
ggtgggagtactgcaacctga

SEQ ID NO: 1677 - RNA, 21 nt, synthetic construct
  source 1..21: mol_type = other RNA
gtgggagtactgcaacctgaa

SEQ ID NO: 1678 - RNA, 21 nt, synthetic construct
  source 1..21: mol_type = other RNA
tgggagtactgcaacctgaaa

SEQ ID NO: 1679 - RNA, 21 nt, synthetic construct
  source 1..21: mol_type = other RNA
gggagtactgcaacctgaaaa

SEQ ID NO: 1680 - RNA, 21 nt, synthetic construct
  source 1..21: mol_type = other RNA
ggagtactgcaacctgaaaaa

SEQ ID NO: 1681 - RNA, 21 nt, synthetic construct
  source 1..21: mol_type = other RNA
gagtactgcaacctgaaaaaa

SEQ ID NO: 1682 - RNA, 21 nt, synthetic construct
  source 1..21: mol_type = other RNA
agtactgcaacctgaaaaaaa

SEQ ID NO: 1683 - RNA, 21 nt, synthetic construct
  source 1..21: mol_type = other RNA
gtactgcaacctgaaaaaata

SEQ ID NO: 1684 - RNA, 21 nt, synthetic construct
  source 1..21: mol_type = other RNA
tactgcaacctgaaaaaatga

SEQ ID NO: 1685 - RNA, 21 nt, synthetic construct
  source 1..21: mol_type = other RNA
actgcaacctgaaaaaatgca

SEQ ID NO: 1686 - RNA, 21 nt, synthetic construct
  source 1..21: mol_type = other RNA
ctgcaacctgaaaaaatgcta

SEQ ID NO: 1687 - RNA, 21 nt, synthetic construct
  source 1..21: mol_type = other RNA
tgcaacctgaaaaaatgctca

SEQ ID NO: 1688 - RNA, 21 nt, synthetic construct
  source 1..21: mol_type = other RNA
gcaacctgaaaaaatgctcaa

SEQ ID NO: 1689 - RNA, 21 nt, synthetic construct
  source 1..21: mol_type = other RNA
caacctgaaaaaatgctcaga

SEQ ID NO: 1690 - RNA, 21 nt, synthetic construct
  source 1..21: mol_type = other RNA
aacctgaaaaaatgctcagga

SEQ ID NO: 1691 - RNA, 21 nt, synthetic construct
  source 1..21: mol_type = other RNA
acctgaaaaaatgctcaggaa

SEQ ID NO: 1692 - RNA, 21 nt, synthetic construct
  source 1..21: mol_type = other RNA
cctgaaaaaatgctcaggaaa

SEQ ID NO: 1693 - RNA, 21 nt, synthetic construct
  source 1..21: mol_type = other RNA
ctgaaaaaatgctcaggaaca

SEQ ID NO: 1694 - RNA, 21 nt, synthetic construct
  source 1..21: mol_type = other RNA
tgaaaaaatgctcaggaacaa

SEQ ID NO: 1695 - RNA, 21 nt, synthetic construct
  source 1..21: mol_type = other RNA
gaaaaaatgctcaggaacaga

SEQ ID NO: 1696 - RNA, 21 nt, synthetic construct
  source 1..21: mol_type = other RNA
aaaaaatgctcaggaacagaa

SEQ ID NO: 1697 - RNA, 21 nt, synthetic construct
  source 1..21: mol_type = other RNA
aaaaatgctcaggaacagaaa

SEQ ID NO: 1698 - RNA, 21 nt, synthetic construct
  source 1..21: mol_type = other RNA
aaaatgctcaggaacagaaga

SEQ ID NO: 1699 - RNA, 21 nt, synthetic construct
  source 1..21: mol_type = other RNA
aaatgctcaggaacagaagca

SEQ ID NO: 1700 - RNA, 21 nt, synthetic construct
  source 1..21: mol_type = other RNA
gcacctccgcctgttgtccta

SEQ ID NO: 1701 - RNA, 21 nt, synthetic construct
  source 1..21: mol_type = other RNA
cacctccgcctgttgtcctga

SEQ ID NO: 1702 - RNA, 21 nt, synthetic construct
  source 1..21: mol_type = other RNA
cctccgcctgttgtcctgcta

SEQ ID NO: 1703 - RNA, 21 nt, synthetic construct
  source 1..21: mol_type = other RNA
ctccgcctgttgtcctgctta

SEQ ID NO: 1704 - RNA, 21 nt, synthetic construct
  source 1..21: mol_type = other RNA
tccgcctgttgtcctgcttca

SEQ ID NO: 1705 - RNA, 21 nt, synthetic construct
  source 1..21: mol_type = other RNA
ccgcctgttgtcctgcttcca

SEQ ID NO: 1706 - RNA, 21 nt, synthetic construct
  source 1..21: mol_type = other RNA
cgcctgttgtcctgcttccaa

SEQ ID NO: 1707 - RNA, 21 nt, synthetic construct
  source 1..21: mol_type = other RNA
ccgaagaagactgtatgttta

SEQ ID NO: 1708 - RNA, 21 nt, synthetic construct
  source 1..21: mol_type = other RNA
cgaagaagactgtatgtttga

SEQ ID NO: 1709 - RNA, 21 nt, synthetic construct
  source 1..21: mol_type = other RNA
gaagaagactgtatgtttgga

SEQ ID NO: 1710 - RNA, 21 nt, synthetic construct
  source 1..21: mol_type = other RNA
aagaagactgtatgtttggga

SEQ ID NO: 1711 - RNA, 21 nt, synthetic construct
  source 1..21: mol_type = other RNA
gcgaccactgttactgggaca

SEQ ID NO: 1712 - RNA, 21 nt, synthetic construct
  source 1..21: mol_type = other RNA
ctgggacgccatgccaggaca

SEQ ID NO: 1713 - RNA, 21 nt, synthetic construct
  source 1..21: mol_type = other RNA
tgggacgccatgccaggacta

SEQ ID NO: 1714 - RNA, 21 nt, synthetic construct
  source 1..21: mol_type = other RNA
catagacacagcattttcaca

SEQ ID NO: 1715 - RNA, 21 nt, synthetic construct
  source 1..21: mol_type = other RNA
atagacacagcattttcacta

SEQ ID NO: 1716 - RNA, 21 nt, synthetic construct
  source 1..21: mol_type = other RNA
tagacacagcattttcactca

SEQ ID NO: 1717 - RNA, 21 nt, synthetic construct
  source 1..21: mol_type = other RNA
agacacagcattttcactcca

SEQ ID NO: 1718 - RNA, 21 nt, synthetic construct
  source 1..21: mol_type = other RNA
gacacagcattttcactccaa

SEQ ID NO: 1719 - RNA, 21 nt, synthetic construct
  source 1..21: mol_type = other RNA
acacagcattttcactccaga

SEQ ID NO: 1720 - RNA, 21 nt, synthetic construct
  source 1..21: mol_type = other RNA
cacagcattttcactccagaa

SEQ ID NO: 1721 - RNA, 21 nt, synthetic construct
  source 1..21: mol_type = other RNA
acagcattttcactccagaga

SEQ ID NO: 1722 - RNA, 21 nt, synthetic construct
  source 1..21: mol_type = other RNA
cagcattttcactccagagaa

SEQ ID NO: 1723 - RNA, 21 nt, synthetic construct
  source 1..21: mol_type = other RNA
agcattttcactccagagaca

SEQ ID NO: 1724 - RNA, 21 nt, synthetic construct
  source 1..21: mol_type = other RNA
gcattttcactccagagacaa

SEQ ID NO: 1725 - RNA, 21 nt, synthetic construct
  source 1..21: mol_type = other RNA
cattttcactccagagacaaa

SEQ ID NO: 1726 - RNA, 21 nt, synthetic construct
  source 1..21: mol_type = other RNA
attttcactccagagacaaaa

SEQ ID NO: 1727 - RNA, 21 nt, synthetic construct
  source 1..21: mol_type = other RNA
ttttcactccagagacaaata

SEQ ID NO: 1728 - RNA, 21 nt, synthetic construct
  source 1..21: mol_type = other RNA
tttcactccagagacaaatca

SEQ ID NO: 1729 - RNA, 21 nt, synthetic construct
  source 1..21: mol_type = other RNA
ttcactccagagacaaatcca

SEQ ID NO: 1730 - RNA, 21 nt, synthetic construct
  source 1..21: mol_type = other RNA
tcactccagagacaaatccaa

SEQ ID NO: 1731 - RNA, 21 nt, synthetic construct
  source 1..21: mol_type = other RNA
acgggcgggtctggaaaaaaa

SEQ ID NO: 1732 - RNA, 21 nt, synthetic construct
  source 1..21: mol_type = other RNA
cgggcgggtctggaaaaaaaa

SEQ ID NO: 1733 - RNA, 21 nt, synthetic construct
  source 1..21: mol_type = other RNA
gggcgggtctggaaaaaaata

SEQ ID NO: 1734 - RNA, 21 nt, synthetic construct
  source 1..21: mol_type = other RNA
ggcgggtctggaaaaaaatta

SEQ ID NO: 1735 - RNA, 21 nt, synthetic construct
  source 1..21: mol_type = other RNA
gcgggtctggaaaaaaattaa

SEQ ID NO: 1736 - RNA, 21 nt, synthetic construct
  source 1..21: mol_type = other RNA
cgggtctggaaaaaaattaca

SEQ ID NO: 1737 - RNA, 21 nt, synthetic construct
  source 1..21: mol_type = other RNA
gggtctggaaaaaaattacta

SEQ ID NO: 1738 - RNA, 21 nt, synthetic construct
  source 1..21: mol_type = other RNA
ggtctggaaaaaaattactga

SEQ ID NO: 1739 - RNA, 21 nt, synthetic construct
  source 1..21: mol_type = other RNA
gtctggaaaaaaattactgca

SEQ ID NO: 1740 - RNA, 21 nt, synthetic construct
  source 1..21: mol_type = other RNA
tctggaaaaaaattactgcca

SEQ ID NO: 1741 - RNA, 21 nt, synthetic construct
  source 1..21: mol_type = other RNA
ctggaaaaaaattactgccga

SEQ ID NO: 1742 - RNA, 21 nt, synthetic construct
  source 1..21: mol_type = other RNA
tggaaaaaaattactgccgta

SEQ ID NO: 1743 - RNA, 21 nt, synthetic construct
  source 1..21: mol_type = other RNA
cgtaaccctgatggtgatgta

SEQ ID NO: 1744 - RNA, 21 nt, synthetic construct
  source 1..21: mol_type = other RNA
aaccctgatggtgatgtagga

SEQ ID NO: 1745 - RNA, 21 nt, synthetic construct
  source 1..21: mol_type = other RNA
ccctgatggtgatgtaggtga

SEQ ID NO: 1746 - RNA, 21 nt, synthetic construct
  source 1..21: mol_type = other RNA
cctgatggtgatgtaggtgga

SEQ ID NO: 1747 - RNA, 21 nt, synthetic construct
  source 1..21: mol_type = other RNA
taggtggtccctggtgctaca

SEQ ID NO: 1748 - RNA, 21 nt, synthetic construct
  source 1..21: mol_type = other RNA
aggtggtccctggtgctacaa

SEQ ID NO: 1749 - RNA, 21 nt, synthetic construct
  source 1..21: mol_type = other RNA
gtggtccctggtgctacacga

SEQ ID NO: 1750 - RNA, 21 nt, synthetic construct
  source 1..21: mol_type = other RNA
ctggtgctacacgacaaatca

SEQ ID NO: 1751 - RNA, 21 nt, synthetic construct
  source 1..21: mol_type = other RNA
ggtgctacacgacaaatccaa

SEQ ID NO: 1752 - RNA, 21 nt, synthetic construct
  source 1..21: mol_type = other RNA
gtgctacacgacaaatccaaa

SEQ ID NO: 1753 - RNA, 21 nt, synthetic construct
  source 1..21: mol_type = other RNA
tgctacacgacaaatccaaga

SEQ ID NO: 1754 - RNA, 21 nt, synthetic construct
  source 1..21: mol_type = other RNA
gctacacgacaaatccaagaa

SEQ ID NO: 1755 - RNA, 21 nt, synthetic construct
  source 1..21: mol_type = other RNA
ctacacgacaaatccaagaaa

SEQ ID NO: 1756 - RNA, 21 nt, synthetic construct
  source 1..21: mol_type = other RNA
tacacgacaaatccaagaaaa

SEQ ID NO: 1757 - RNA, 21 nt, synthetic construct
  source 1..21: mol_type = other RNA
acacgacaaatccaagaaaaa

SEQ ID NO: 1758 - RNA, 21 nt, synthetic construct
  source 1..21: mol_type = other RNA
cacgacaaatccaagaaaaca

SEQ ID NO: 1759 - RNA, 21 nt, synthetic construct
  source 1..21: mol_type = other RNA
acgacaaatccaagaaaacta

SEQ ID NO: 1760 - RNA, 21 nt, synthetic construct
  source 1..21: mol_type = other RNA
cgacaaatccaagaaaactta

SEQ ID NO: 1761 - RNA, 21 nt, synthetic construct
  source 1..21: mol_type = other RNA
gacaaatccaagaaaacttta

SEQ ID NO: 1762 - RNA, 21 nt, synthetic construct
  source 1..21: mol_type = other RNA
acaaatccaagaaaactttaa

SEQ ID NO: 1763 - RNA, 21 nt, synthetic construct
  source 1..21: mol_type = other RNA
caaatccaagaaaactttaca

SEQ ID NO: 1764 - RNA, 21 nt, synthetic construct
  source 1..21: mol_type = other RNA
aaatccaagaaaactttacga

SEQ ID NO: 1765 - RNA, 21 nt, synthetic construct
  source 1..21: mol_type = other RNA
aatccaagaaaactttacgaa

SEQ ID NO: 1766 - RNA, 21 nt, synthetic construct
  source 1..21: mol_type = other RNA
atccaagaaaactttacgaca

SEQ ID NO: 1767 - RNA, 21 nt, synthetic construct
  source 1..21: mol_type = other RNA
tccaagaaaactttacgacta

SEQ ID NO: 1768 - RNA, 21 nt, synthetic construct
  source 1..21: mol_type = other RNA
ccaagaaaactttacgactaa

SEQ ID NO: 1769 - RNA, 21 nt, synthetic construct
  source 1..21: mol_type = other RNA
aagaaaactttacgactacta

SEQ ID NO: 1770 - RNA, 21 nt, synthetic construct
  source 1..21: mol_type = other RNA
agaaaactttacgactactga

SEQ ID NO: 1771 - RNA, 21 nt, synthetic construct
  source 1..21: mol_type = other RNA
gaaaactttacgactactgta

SEQ ID NO: 1772 - RNA, 21 nt, synthetic construct
  source 1..21: mol_type = other RNA
aaaactttacgactactgtga

SEQ ID NO: 1773 - RNA, 21 nt, synthetic construct
  source 1..21: mol_type = other RNA
aaactttacgactactgtgaa

SEQ ID NO: 1774 - RNA, 21 nt, synthetic construct
  source 1..21: mol_type = other RNA
aactttacgactactgtgata

SEQ ID NO: 1775 - RNA, 21 nt, synthetic construct
  source 1..21: mol_type = other RNA
actttacgactactgtgatga

SEQ ID NO: 1776 - RNA, 21 nt, synthetic construct
  source 1..21: mol_type = other RNA
ctttacgactactgtgatgta

SEQ ID NO: 1777 - RNA, 21 nt, synthetic construct
  source 1..21: mol_type = other RNA
tttacgactactgtgatgtca

SEQ ID NO: 1778 - RNA, 21 nt, synthetic construct
  source 1..21: mol_type = other RNA
gactactgtgatgtccctcaa

SEQ ID NO: 1779 - RNA, 21 nt, synthetic construct
  source 1..21: mol_type = other RNA
ctgtgatgtccctcagtgtga

SEQ ID NO: 1780 - RNA, 21 nt, synthetic construct
  source 1..21: mol_type = other RNA
atgtccctcagtgtgcggcca

SEQ ID NO: 1781 - RNA, 21 nt, synthetic construct
  source 1..21: mol_type = other RNA
aagaaatgtcctggaagggta

SEQ ID NO: 1782 - RNA, 21 nt, synthetic construct
  source 1..21: mol_type = other RNA
gccctggcaagtcagtcttaa

SEQ ID NO: 1783 - RNA, 21 nt, synthetic construct
  source 1..21: mol_type = other RNA
cctggcaagtcagtcttagaa

SEQ ID NO: 1784 - RNA, 21 nt, synthetic construct
  source 1..21: mol_type = other RNA
ctggcaagtcagtcttagaaa

SEQ ID NO: 1785 - RNA, 21 nt, synthetic construct
  source 1..21: mol_type = other RNA
tggcaagtcagtcttagaaca

SEQ ID NO: 1786 - RNA, 21 nt, synthetic construct
  source 1..21: mol_type = other RNA
ggcaagtcagtcttagaacaa

SEQ ID NO: 1787 - RNA, 21 nt, synthetic construct
  source 1..21: mol_type = other RNA
gcaagtcagtcttagaacaaa

SEQ ID NO: 1788 - RNA, 21 nt, synthetic construct
  source 1..21: mol_type = other RNA
caagtcagtcttagaacaaga

SEQ ID NO: 1789 - RNA, 21 nt, synthetic construct
  source 1..21: mol_type = other RNA
aagtcagtcttagaacaagga

SEQ ID NO: 1790 - RNA, 21 nt, synthetic construct
  source 1..21: mol_type = other RNA
agtcagtcttagaacaaggta

SEQ ID NO: 1791 - RNA, 21 nt, synthetic construct
  source 1..21: mol_type = other RNA
gtcagtcttagaacaaggtta

SEQ ID NO: 1792 - RNA, 21 nt, synthetic construct
  source 1..21: mol_type = other RNA
tcagtcttagaacaaggttta

SEQ ID NO: 1793 - RNA, 21 nt, synthetic construct
  source 1..21: mol_type = other RNA
cagtcttagaacaaggtttga

SEQ ID NO: 1794 - RNA, 21 nt, synthetic construct
  source 1..21: mol_type = other RNA
agtcttagaacaaggtttgga

SEQ ID NO: 1795 - RNA, 21 nt, synthetic construct
  source 1..21: mol_type = other RNA
gtcttagaacaaggtttggaa

SEQ ID NO: 1796 - RNA, 21 nt, synthetic construct
  source 1..21: mol_type = other RNA
tcttagaacaaggtttggaaa

SEQ ID NO: 1797 - RNA, 21 nt, synthetic construct
  source 1..21: mol_type = other RNA
cttagaacaaggtttggaata

SEQ ID NO: 1798 - RNA, 21 nt, synthetic construct
  source 1..21: mol_type = other RNA
ttagaacaaggtttggaatga

SEQ ID NO: 1799 - RNA, 21 nt, synthetic construct
  source 1..21: mol_type = other RNA
tagaacaaggtttggaatgca

SEQ ID NO: 1800 - RNA, 21 nt, synthetic construct
  source 1..21: mol_type = other RNA
agaacaaggtttggaatgcaa

SEQ ID NO: 1801 - RNA, 21 nt, synthetic construct
  source 1..21: mol_type = other RNA
gaacaaggtttggaatgcaca

SEQ ID NO: 1802 - RNA, 21 nt, synthetic construct
  source 1..21: mol_type = other RNA
aacaaggtttggaatgcacta

SEQ ID NO: 1803 - RNA, 21 nt, synthetic construct
  source 1..21: mol_type = other RNA
acaaggtttggaatgcactta

SEQ ID NO: 1804 - RNA, 21 nt, synthetic construct
  source 1..21: mol_type = other RNA
caaggtttggaatgcacttca

SEQ ID NO: 1805 - RNA, 21 nt, synthetic construct
  source 1..21: mol_type = other RNA
aaggtttggaatgcacttcta

SEQ ID NO: 1806 - RNA, 21 nt, synthetic construct
  source 1..21: mol_type = other RNA
aggtttggaatgcacttctga

SEQ ID NO: 1807 - RNA, 21 nt, synthetic construct
  source 1..21: mol_type = other RNA
ggtttggaatgcacttctgta

SEQ ID NO: 1808 - RNA, 21 nt, synthetic construct
  source 1..21: mol_type = other RNA
ttggaatgcacttctgtggaa

SEQ ID NO: 1809 - RNA, 21 nt, synthetic construct
  source 1..21: mol_type = other RNA
tggaatgcacttctgtggaga

SEQ ID NO: 1810 - RNA, 21 nt, synthetic construct
  source 1..21: mol_type = other RNA
gaatgcacttctgtggaggca

SEQ ID NO: 1811 - RNA, 21 nt, synthetic construct
  source 1..21: mol_type = other RNA
ctgtggaggcaccttgatata

SEQ ID NO: 1812 - RNA, 21 nt, synthetic construct
  source 1..21: mol_type = other RNA
tgtggaggcaccttgatatca

SEQ ID NO: 1813 - RNA, 21 nt, synthetic construct
  source 1..21: mol_type = other RNA
gtggaggcaccttgatatcca

SEQ ID NO: 1814 - RNA, 21 nt, synthetic construct
  source 1..21: mol_type = other RNA
ttgactgctgcccactgctta

SEQ ID NO: 1815 - RNA, 21 nt, synthetic construct
  source 1..21: mol_type = other RNA
ggacccactttctgggcacta

SEQ ID NO: 1816 - RNA, 21 nt, synthetic construct
  source 1..21: mol_type = other RNA
gacccactttctgggcactga

SEQ ID NO: 1817 - RNA, 21 nt, synthetic construct
  source 1..21: mol_type = other RNA
acccactttctgggcactgca

SEQ ID NO: 1818 - RNA, 21 nt, synthetic construct
  source 1..21: mol_type = other RNA
cagtcccaaaatggaacataa

SEQ ID NO: 1819 - RNA, 21 nt, synthetic construct
  source 1..21: mol_type = other RNA
agtcccaaaatggaacataaa

SEQ ID NO: 1820 - RNA, 21 nt, synthetic construct
  source 1..21: mol_type = other RNA
gtcccaaaatggaacataaga

SEQ ID NO: 1821 - RNA, 21 nt, synthetic construct
  source 1..21: mol_type = other RNA
tcccaaaatggaacataagga

SEQ ID NO: 1822 - RNA, 21 nt, synthetic construct
  source 1..21: mol_type = other RNA
cccaaaatggaacataaggaa

SEQ ID NO: 1823 - RNA, 21 nt, synthetic construct
  source 1..21: mol_type = other RNA
ccaaaatggaacataaggaaa

SEQ ID NO: 1824 - RNA, 21 nt, synthetic construct
  source 1..21: mol_type = other RNA
caaaatggaacataaggaaga

SEQ ID NO: 1825 - RNA, 21 nt, synthetic construct
  source 1..21: mol_type = other RNA
aaaatggaacataaggaagta

SEQ ID NO: 1826 - RNA, 21 nt, synthetic construct
  source 1..21: mol_type = other RNA
aaatggaacataaggaagtga

SEQ ID NO: 1827 - RNA, 21 nt, synthetic construct
  source 1..21: mol_type = other RNA
aatggaacataaggaagtgga

SEQ ID NO: 1828 - RNA, 21 nt, synthetic construct
  source 1..21: mol_type = other RNA
atggaacataaggaagtggta

SEQ ID NO: 1829 - RNA, 21 nt, synthetic construct
  source 1..21: mol_type = other RNA
tggaacataaggaagtggtta

SEQ ID NO: 1830 - RNA, 21 nt, synthetic construct
  source 1..21: mol_type = other RNA
cctctggatgactatgtgaaa

SEQ ID NO: 1831 - RNA, 21 nt, synthetic construct
  source 1..21: mol_type = other RNA
taagaagcagctgggagcaga

SEQ ID NO: 1832 - RNA, 21 nt, synthetic construct
  source 1..21: mol_type = other RNA
agcagctgggagcaggaagta

SEQ ID NO: 1833 - RNA, 21 nt, synthetic construct
  source 1..21: mol_type = other RNA
agctgggagcaggaagtataa

SEQ ID NO: 1834 - RNA, 21 nt, synthetic construct
  source 1..21: mol_type = other RNA
ctgggagcaggaagtatagaa

SEQ ID NO: 1835 - RNA, 21 nt, synthetic construct
  source 1..21: mol_type = other RNA
tgggagcaggaagtatagaaa

SEQ ID NO: 1836 - RNA, 21 nt, synthetic construct
  source 1..21: mol_type = other RNA
gggagcaggaagtatagaaga

SEQ ID NO: 1837 - RNA, 21 nt, synthetic construct
  source 1..21: mol_type = other RNA
ggagcaggaagtatagaagaa

SEQ ID NO: 1838 - RNA, 21 nt, synthetic construct
  source 1..21: mol_type = other RNA
gagcaggaagtatagaagaaa

SEQ ID NO: 1839 - RNA, 21 nt, synthetic construct
  source 1..21: mol_type = other RNA
agcaggaagtatagaagaata

SEQ ID NO: 1840 - RNA, 21 nt, synthetic construct
  source 1..21: mol_type = other RNA
gcaggaagtatagaagaatga

SEQ ID NO: 1841 - RNA, 21 nt, synthetic construct
  source 1..21: mol_type = other RNA
caggaagtatagaagaatgta

SEQ ID NO: 1842 - RNA, 21 nt, synthetic construct
  source 1..21: mol_type = other RNA
aggaagtatagaagaatgtga

SEQ ID NO: 1843 - RNA, 21 nt, synthetic construct
  source 1..21: mol_type = other RNA
ggaagtatagaagaatgtgca

SEQ ID NO: 1844 - RNA, 21 nt, synthetic construct
  source 1..21: mol_type = other RNA
gaagtatagaagaatgtgcaa

SEQ ID NO: 1845 - RNA, 21 nt, synthetic construct
  source 1..21: mol_type = other RNA
aagtatagaagaatgtgcaga

SEQ ID NO: 1846 - RNA, 21 nt, synthetic construct
  source 1..21: mol_type = other RNA
agtatagaagaatgtgcagca

SEQ ID NO: 1847 - RNA, 21 nt, synthetic construct
  source 1..21: mol_type = other RNA
gtatagaagaatgtgcagcaa

SEQ ID NO: 1848 - RNA, 21 nt, synthetic construct
  source 1..21: mol_type = other RNA
tatagaagaatgtgcagcaaa

SEQ ID NO: 1849 - RNA, 21 nt, synthetic construct
  source 1..21: mol_type = other RNA
tccaatatcacagtaaagaga

SEQ ID NO: 1850 - RNA, 21 nt, synthetic construct
  source 1..21: mol_type = other RNA
ccaatatcacagtaaagagca

SEQ ID NO: 1851 - RNA, 21 nt, synthetic construct
  source 1..21: mol_type = other RNA
caatatcacagtaaagagcaa

SEQ ID NO: 1852 - RNA, 21 nt, synthetic construct
  source 1..21: mol_type = other RNA
aatatcacagtaaagagcaaa

SEQ ID NO: 1853 - RNA, 21 nt, synthetic construct
  source 1..21: mol_type = other RNA
atatcacagtaaagagcaaca

SEQ ID NO: 1854 - RNA, 21 nt, synthetic construct
  source 1..21: mol_type = other RNA
tatcacagtaaagagcaacaa

SEQ ID NO: 1855 - RNA, 21 nt, synthetic construct
  source 1..21: mol_type = other RNA
atcacagtaaagagcaacaaa

SEQ ID NO: 1856 - RNA, 21 nt, synthetic construct
  source 1..21: mol_type = other RNA
tcacagtaaagagcaacaata

SEQ ID NO: 1857 - RNA, 21 nt, synthetic construct
  source 1..21: mol_type = other RNA
cacagtaaagagcaacaatga

SEQ ID NO: 1858 - RNA, 21 nt, synthetic construct
  source 1..21: mol_type = other RNA
acagtaaagagcaacaatgta

SEQ ID NO: 1859 - RNA, 21 nt, synthetic construct
  source 1..21: mol_type = other RNA
cagtaaagagcaacaatgtga

SEQ ID NO: 1860 - RNA, 21 nt, synthetic construct
  source 1..21: mol_type = other RNA
agtaaagagcaacaatgtgta

SEQ ID NO: 1861 - RNA, 21 nt, synthetic construct
  source 1..21: mol_type = other RNA
ggatgagagatgtagttttaa

SEQ ID NO: 1862 - RNA, 21 nt, synthetic construct
  source 1..21: mol_type = other RNA
gatgagagatgtagttttata

SEQ ID NO: 1863 - RNA, 21 nt, synthetic construct
  source 1..21: mol_type = other RNA
atgagagatgtagttttatta

SEQ ID NO: 1864 - RNA, 21 nt, synthetic construct
  source 1..21: mol_type = other RNA
tgagagatgtagttttattta

SEQ ID NO: 1865 - RNA, 21 nt, synthetic construct
  source 1..21: mol_type = other RNA
gagagatgtagttttatttga

SEQ ID NO: 1866 - RNA, 21 nt, synthetic construct
  source 1..21: mol_type = other RNA
agagatgtagttttatttgaa

SEQ ID NO: 1867 - RNA, 21 nt, synthetic construct
  source 1..21: mol_type = other RNA
gagatgtagttttatttgaaa

SEQ ID NO: 1868 - RNA, 21 nt, synthetic construct
  source 1..21: mol_type = other RNA
agatgtagttttatttgaaaa

SEQ ID NO: 1869 - RNA, 21 nt, synthetic construct
  source 1..21: mol_type = other RNA
gatgtagttttatttgaaaaa

SEQ ID NO: 1870 - RNA, 21 nt, synthetic construct
  source 1..21: mol_type = other RNA
atgtagttttatttgaaaaga

SEQ ID NO: 1871 - RNA, 21 nt, synthetic construct
  source 1..21: mol_type = other RNA
tgtagttttatttgaaaagaa

SEQ ID NO: 1872 - RNA, 21 nt, synthetic construct
  source 1..21: mol_type = other RNA
gtagttttatttgaaaagaaa

SEQ ID NO: 1873 - RNA, 21 nt, synthetic construct
  source 1..21: mol_type = other RNA
tgaaaagaaagtgtatctcta

SEQ ID NO: 1874 - RNA, 21 nt, synthetic construct
  source 1..21: mol_type = other RNA
gaaaagaaagtgtatctctca

SEQ ID NO: 1875 - RNA, 21 nt, synthetic construct
  source 1..21: mol_type = other RNA
aaaagaaagtgtatctctcaa

SEQ ID NO: 1876 - RNA, 21 nt, synthetic construct
  source 1..21: mol_type = other RNA
aaagaaagtgtatctctcaga

SEQ ID NO: 1877 - RNA, 21 nt, synthetic construct
  source 1..21: mol_type = other RNA
aagaaagtgtatctctcagaa

SEQ ID NO: 1878 - RNA, 21 nt, synthetic construct
  source 1..21: mol_type = other RNA
agaaagtgtatctctcagaga

SEQ ID NO: 1879 - RNA, 21 nt, synthetic construct
  source 1..21: mol_type = other RNA
gaaagtgtatctctcagagta

SEQ ID NO: 1880 - RNA, 21 nt, synthetic construct
  source 1..21: mol_type = other RNA
aaagtgtatctctcagagtga

SEQ ID NO: 1881 - RNA, 21 nt, synthetic construct
  source 1..21: mol_type = other RNA
aagtgtatctctcagagtgca

SEQ ID NO: 1882 - RNA, 21 nt, synthetic construct
  source 1..21: mol_type = other RNA
agtgtatctctcagagtgcaa

SEQ ID NO: 1883 - RNA, 21 nt, synthetic construct
  source 1..21: mol_type = other RNA
gtgtatctctcagagtgcaaa

SEQ ID NO: 1884 - RNA, 21 nt, synthetic construct
  source 1..21: mol_type = other RNA
tgtatctctcagagtgcaaga

SEQ ID NO: 1885 - RNA, 21 nt, synthetic construct
  source 1..21: mol_type = other RNA
gtatctctcagagtgcaagaa

SEQ ID NO: 1886 - RNA, 21 nt, synthetic construct
  source 1..21: mol_type = other RNA
atctctcagagtgcaagacta

SEQ ID NO: 1887 - RNA, 21 nt, synthetic construct
  source 1..21: mol_type = other RNA
acagagggacgatgtccaaaa

SEQ ID NO: 1888 - RNA, 21 nt, synthetic construct
  source 1..21: mol_type = other RNA
cagagggacgatgtccaaaaa

SEQ ID NO: 1889 - RNA, 21 nt, synthetic construct
  source 1..21: mol_type = other RNA
agagggacgatgtccaaaaca

SEQ ID NO: 1890 - RNA, 21 nt, synthetic construct
  source 1..21: mol_type = other RNA
gagggacgatgtccaaaacaa

SEQ ID NO: 1891 - RNA, 21 nt, synthetic construct
  source 1..21: mol_type = other RNA
agggacgatgtccaaaacaaa

SEQ ID NO: 1892 - RNA, 21 nt, synthetic construct
  source 1..21: mol_type = other RNA
gggacgatgtccaaaacaaaa

SEQ ID NO: 1893 - RNA, 21 nt, synthetic construct
  source 1..21: mol_type = other RNA
ggacgatgtccaaaacaaaaa

SEQ ID NO: 1894 - RNA, 21 nt, synthetic construct
  source 1..21: mol_type = other RNA
gacgatgtccaaaacaaaaaa

SEQ ID NO: 1895 - RNA, 21 nt, synthetic construct
  source 1..21: mol_type = other RNA
acgatgtccaaaacaaaaaaa

SEQ ID NO: 1896 - RNA, 21 nt, synthetic construct
  source 1..21: mol_type = other RNA
cgatgtccaaaacaaaaaata

SEQ ID NO: 1897 - RNA, 21 nt, synthetic construct
  source 1..21: mol_type = other RNA
gatgtccaaaacaaaaaatga

SEQ ID NO: 1898 - RNA, 21 nt, synthetic construct
  source 1..21: mol_type = other RNA
atgtccaaaacaaaaaatgga

SEQ ID NO: 1899 - RNA, 21 nt, synthetic construct
  source 1..21: mol_type = other RNA
cacagacctagattctcacca

SEQ ID NO: 1900 - RNA, 21 nt, synthetic construct
  source 1..21: mol_type = other RNA
acagacctagattctcaccta

SEQ ID NO: 1901 - RNA, 21 nt, synthetic construct
  source 1..21: mol_type = other RNA
cagacctagattctcacctga

SEQ ID NO: 1902 - RNA, 21 nt, synthetic construct
  source 1..21: mol_type = other RNA
gacctagattctcacctgcta

SEQ ID NO: 1903 - RNA, 21 nt, synthetic construct
  source 1..21: mol_type = other RNA
acctagattctcacctgctaa

SEQ ID NO: 1904 - RNA, 21 nt, synthetic construct
  source 1..21: mol_type = other RNA
cctagattctcacctgctaca

SEQ ID NO: 1905 - RNA, 21 nt, synthetic construct
  source 1..21: mol_type = other RNA
ctcagagggactggaggagaa

SEQ ID NO: 1906 - RNA, 21 nt, synthetic construct
  source 1..21: mol_type = other RNA
tcagagggactggaggagaaa

SEQ ID NO: 1907 - RNA, 21 nt, synthetic construct
  source 1..21: mol_type = other RNA
cagagggactggaggagaaca

SEQ ID NO: 1908 - RNA, 21 nt, synthetic construct
  source 1..21: mol_type = other RNA
agagggactggaggagaacta

SEQ ID NO: 1909 - RNA, 21 nt, synthetic construct
  source 1..21: mol_type = other RNA
gagggactggaggagaactaa

SEQ ID NO: 1910 - RNA, 21 nt, synthetic construct
  source 1..21: mol_type = other RNA
agggactggaggagaactaca

SEQ ID NO: 1911 - RNA, 21 nt, synthetic construct
  source 1..21: mol_type = other RNA
gggactggaggagaactacta

SEQ ID NO: 1912 - RNA, 21 nt, synthetic construct
  source 1..21: mol_type = other RNA
ggactggaggagaactactga

SEQ ID NO: 1913 - RNA, 21 nt, synthetic construct
  source 1..21: mol_type = other RNA
actggaggagaactactgcaa

SEQ ID NO: 1914 - RNA, 21 nt, synthetic construct
  source 1..21: mol_type = other RNA
ctggaggagaactactgcaga

SEQ ID NO: 1915 - RNA, 21 nt, synthetic construct
  source 1..21: mol_type = other RNA
tggaggagaactactgcagga

SEQ ID NO: 1916 - RNA, 21 nt, synthetic construct
  source 1..21: mol_type = other RNA
gaggagaactactgcaggaaa

SEQ ID NO: 1917 - RNA, 21 nt, synthetic construct
  source 1..21: mol_type = other RNA
aatccagacaacgatccgcaa

SEQ ID NO: 1918 - RNA, 21 nt, synthetic construct
  source 1..21: mol_type = other RNA
tccagacaacgatccgcagga

SEQ ID NO: 1919 - RNA, 21 nt, synthetic construct
  source 1..21: mol_type = other RNA
tgctatactactgatccagaa

SEQ ID NO: 1920 - RNA, 21 nt, synthetic construct
  source 1..21: mol_type = other RNA
gctatactactgatccagaaa

SEQ ID NO: 1921 - RNA, 21 nt, synthetic construct
  source 1..21: mol_type = other RNA
ctatactactgatccagaaaa

SEQ ID NO: 1922 - RNA, 21 nt, synthetic construct
  source 1..21: mol_type = other RNA
tatactactgatccagaaaaa

SEQ ID NO: 1923 - RNA, 21 nt, synthetic construct
  source 1..21: mol_type = other RNA
atactactgatccagaaaaga

SEQ ID NO: 1924 - RNA, 21 nt, synthetic construct
  source 1..21: mol_type = other RNA
tactactgatccagaaaagaa

SEQ ID NO: 1925 - RNA, 21 nt, synthetic construct
  source 1..21: mol_type = other RNA
actactgatccagaaaagaga

SEQ ID NO: 1926 - RNA, 21 nt, synthetic construct
  source 1..21: mol_type = other RNA
ctactgatccagaaaagagaa

SEQ ID NO: 1927 - RNA, 21 nt, synthetic construct
  source 1..21: mol_type = other RNA
tactgatccagaaaagagata

SEQ ID NO: 1928 - RNA, 21 nt, synthetic construct
  source 1..21: mol_type = other RNA
actgatccagaaaagagataa

SEQ ID NO: 1929 - RNA, 21 nt, synthetic construct
  source 1..21: mol_type = other RNA
ctgatccagaaaagagatata

SEQ ID NO: 1930 - RNA, 21 nt, synthetic construct
  source 1..21: mol_type = other RNA
tgatccagaaaagagatatga

SEQ ID NO: 1931 - RNA, 21 nt, synthetic construct
  source 1..21: mol_type = other RNA
gatccagaaaagagatatgaa

SEQ ID NO: 1932 - RNA, 21 nt, synthetic construct
  source 1..21: mol_type = other RNA
atccagaaaagagatatgaca

SEQ ID NO: 1933 - RNA, 21 nt, synthetic construct
  source 1..21: mol_type = other RNA
tccagaaaagagatatgacta

SEQ ID NO: 1934 - RNA, 21 nt, synthetic construct
  source 1..21: mol_type = other RNA
ccagaaaagagatatgactaa

SEQ ID NO: 1935 - RNA, 21 nt, synthetic construct
  source 1..21: mol_type = other RNA
cagaaaagagatatgactaca

SEQ ID NO: 1936 - RNA, 21 nt, synthetic construct
  source 1..21: mol_type = other RNA
agaaaagagatatgactacta

SEQ ID NO: 1937 - RNA, 21 nt, synthetic construct
  source 1..21: mol_type = other RNA
gaaaagagatatgactactga

SEQ ID NO: 1938 - RNA, 21 nt, synthetic construct
  source 1..21: mol_type = other RNA
aaaagagatatgactactgca

SEQ ID NO: 1939 - RNA, 21 nt, synthetic construct
  source 1..21: mol_type = other RNA
tatgactactgcgacattcta

SEQ ID NO: 1940 - RNA, 21 nt, synthetic construct
  source 1..21: mol_type = other RNA
atgactactgcgacattctta

SEQ ID NO: 1941 - RNA, 21 nt, synthetic construct
  source 1..21: mol_type = other RNA
tgactactgcgacattcttga

SEQ ID NO: 1942 - RNA, 21 nt, synthetic construct
  source 1..21: mol_type = other RNA
gactactgcgacattcttgaa

SEQ ID NO: 1943 - RNA, 21 nt, synthetic construct
  source 1..21: mol_type = other RNA
ctactgcgacattcttgagta

SEQ ID NO: 1944 - RNA, 21 nt, synthetic construct
  source 1..21: mol_type = other RNA
tactgcgacattcttgagtga

SEQ ID NO: 1945 - RNA, 21 nt, synthetic construct
  source 1..21: mol_type = other RNA
actgcgacattcttgagtgta

SEQ ID NO: 1946 - RNA, 21 nt, synthetic construct
  source 1..21: mol_type = other RNA
ctgcgacattcttgagtgtga

SEQ ID NO: 1947 - RNA, 21 nt, synthetic construct
  source 1..21: mol_type = other RNA
tgcgacattcttgagtgtgaa

SEQ ID NO: 1948 - RNA, 21 nt, synthetic construct
  source 1..21: mol_type = other RNA
gcgacattcttgagtgtgaaa

SEQ ID NO: 1949 - RNA, 21 nt, synthetic construct
  source 1..21: mol_type = other RNA
cgacattcttgagtgtgaaga

SEQ ID NO: 1950 - RNA, 21 nt, synthetic construct
  source 1..21: mol_type = other RNA
gacattcttgagtgtgaagaa

SEQ ID NO: 1951 - RNA, 21 nt, synthetic construct
  source 1..21: mol_type = other RNA
acattcttgagtgtgaagaga

SEQ ID NO: 1952 - RNA, 21 nt, synthetic construct
  source 1..21: mol_type = other RNA
attcttgagtgtgaagaggaa

SEQ ID NO: 1953 - RNA, 21 nt, synthetic construct
  source 1..21: mol_type = other RNA
ttcttgagtgtgaagaggaaa

SEQ ID NO: 1954 - RNA, 21 nt, synthetic construct
  source 1..21: mol_type = other RNA
tcttgagtgtgaagaggaata

SEQ ID NO: 1955 - RNA, 21 nt, synthetic construct
  source 1..21: mol_type = other RNA
cttgagtgtgaagaggaatga

SEQ ID NO: 1956 - RNA, 21 nt, synthetic construct
  source 1..21: mol_type = other RNA
ttgagtgtgaagaggaatgta

SEQ ID NO: 1957 - RNA, 21 nt, synthetic construct
  source 1..21: mol_type = other RNA
tgagtgtgaagaggaatgtaa

SEQ ID NO: 1958 - RNA, 21 nt, synthetic construct
  source 1..21: mol_type = other RNA
gagtgtgaagaggaatgtata

SEQ ID NO: 1959 - RNA, 21 nt, synthetic construct
  source 1..21: mol_type = other RNA
agtgtgaagaggaatgtatga

SEQ ID NO: 1960 - RNA, 21 nt, synthetic construct
  source 1..21: mol_type = other RNA
gtgtgaagaggaatgtatgca

SEQ ID NO: 1961 - RNA, 21 nt, synthetic construct
  source 1..21: mol_type = other RNA
tgtgaagaggaatgtatgcaa

SEQ ID NO: 1962 - RNA, 21 nt, synthetic construct
  source 1..21: mol_type = other RNA
gtgaagaggaatgtatgcata

SEQ ID NO: 1963 - RNA, 21 nt, synthetic construct
  source 1..21: mol_type = other RNA
tgaagaggaatgtatgcatta

SEQ ID NO: 1964 - RNA, 21 nt, synthetic construct
  source 1..21: mol_type = other RNA
gaagaggaatgtatgcattga

SEQ ID NO: 1965 - RNA, 21 nt, synthetic construct
  source 1..21: mol_type = other RNA
aagaggaatgtatgcattgca

SEQ ID NO: 1966 - RNA, 21 nt, synthetic construct
  source 1..21: mol_type = other RNA
agaggaatgtatgcattgcaa

SEQ ID NO: 1967 - RNA, 21 nt, synthetic construct
  source 1..21: mol_type = other RNA
gaggaatgtatgcattgcaga

SEQ ID NO: 1968 - RNA, 21 nt, synthetic construct
  source 1..21: mol_type = other RNA
ggaatgtatgcattgcagtga

SEQ ID NO: 1969 - RNA, 21 nt, synthetic construct
  source 1..21: mol_type = other RNA
gaatgtatgcattgcagtgga

SEQ ID NO: 1970 - RNA, 21 nt, synthetic construct
  source 1..21: mol_type = other RNA
aatgtatgcattgcagtggaa

SEQ ID NO: 1971 - RNA, 21 nt, synthetic construct
  source 1..21: mol_type = other RNA
atgtatgcattgcagtggaga

SEQ ID NO: 1972 - RNA, 21 nt, synthetic construct
  source 1..21: mol_type = other RNA
tgtatgcattgcagtggagaa

SEQ ID NO: 1973 - RNA, 21 nt, synthetic construct
  source 1..21: mol_type = other RNA
gtatgcattgcagtggagaaa

SEQ ID NO: 1974 - RNA, 21 nt, synthetic construct
  source 1..21: mol_type = other RNA
tatgcattgcagtggagaaaa

SEQ ID NO: 1975 - RNA, 21 nt, synthetic construct
  source 1..21: mol_type = other RNA
atgcattgcagtggagaaaaa

SEQ ID NO: 1976 - RNA, 21 nt, synthetic construct
  source 1..21: mol_type = other RNA
tgcattgcagtggagaaaaca

SEQ ID NO: 1977 - RNA, 21 nt, synthetic construct
  source 1..21: mol_type = other RNA
gcattgcagtggagaaaacta

SEQ ID NO: 1978 - RNA, 21 nt, synthetic construct
  source 1..21: mol_type = other RNA
cattgcagtggagaaaactaa

SEQ ID NO: 1979 - RNA, 21 nt, synthetic construct
  source 1..21: mol_type = other RNA
attgcagtggagaaaactata

SEQ ID NO: 1980 - RNA, 21 nt, synthetic construct
  source 1..21: mol_type = other RNA
ttgcagtggagaaaactatga

SEQ ID NO: 1981 - RNA, 21 nt, synthetic construct
  source 1..21: mol_type = other RNA
tgcagtggagaaaactatgaa

SEQ ID NO: 1982 - RNA, 21 nt, synthetic construct
  source 1..21: mol_type = other RNA
acggcaaaatttccaagacca

SEQ ID NO: 1983 - RNA, 21 nt, synthetic construct
  source 1..21: mol_type = other RNA
cggcaaaatttccaagaccaa

SEQ ID NO: 1984 - RNA, 21 nt, synthetic construct
  source 1..21: mol_type = other RNA
ggcaaaatttccaagaccata

SEQ ID NO: 1985 - RNA, 21 nt, synthetic construct
  source 1..21: mol_type = other RNA
gcaaaatttccaagaccatga

SEQ ID NO: 1986 - RNA, 21 nt, synthetic construct
  source 1..21: mol_type = other RNA
caaaatttccaagaccatgta

SEQ ID NO: 1987 - RNA, 21 nt, synthetic construct
  source 1..21: mol_type = other RNA
aaaatttccaagaccatgtca

SEQ ID NO: 1988 - RNA, 21 nt, synthetic construct
  source 1..21: mol_type = other RNA
aaatttccaagaccatgtcta

SEQ ID NO: 1989 - RNA, 21 nt, synthetic construct
  source 1..21: mol_type = other RNA
aatttccaagaccatgtctga

SEQ ID NO: 1990 - RNA, 21 nt, synthetic construct
  source 1..21: mol_type = other RNA
atttccaagaccatgtctgga

SEQ ID NO: 1991 - RNA, 21 nt, synthetic construct
  source 1..21: mol_type = other RNA
tttccaagaccatgtctggaa

SEQ ID NO: 1992 - RNA, 21 nt, synthetic construct
  source 1..21: mol_type = other RNA
aatgccaggcctgggactcta

SEQ ID NO: 1993 - RNA, 21 nt, synthetic construct
  source 1..21: mol_type = other RNA
gccaggcctgggactctcaga

SEQ ID NO: 1994 - RNA, 21 nt, synthetic construct
  source 1..21: mol_type = other RNA
ccaggcctgggactctcagaa

SEQ ID NO: 1995 - RNA, 21 nt, synthetic construct
  source 1..21: mol_type = other RNA
agcccacacgctcatggataa

SEQ ID NO: 1996 - RNA, 21 nt, synthetic construct
  source 1..21: mol_type = other RNA
ccacacgctcatggatacata

SEQ ID NO: 1997 - RNA, 21 nt, synthetic construct
  source 1..21: mol_type = other RNA
cacacgctcatggatacatta

SEQ ID NO: 1998 - RNA, 21 nt, synthetic construct
  source 1..21: mol_type = other RNA
acgctcatggatacattccta

SEQ ID NO: 1999 - RNA, 21 nt, synthetic construct
  source 1..21: mol_type = other RNA
cgctcatggatacattcctta

SEQ ID NO: 2000 - RNA, 21 nt, synthetic construct
  source 1..21: mol_type = other RNA
gctcatggatacattccttca

SEQ ID NO: 2001 - RNA, 21 nt, synthetic construct
  source 1..21: mol_type = other RNA
ctcatggatacattccttcca

SEQ ID NO: 2002 - RNA, 21 nt, synthetic construct
  source 1..21: mol_type = other RNA
tcatggatacattccttccaa

SEQ ID NO: 2003 - RNA, 21 nt, synthetic construct
  source 1..21: mol_type = other RNA
catggatacattccttccaaa

SEQ ID NO: 2004 - RNA, 21 nt, synthetic construct
  source 1..21: mol_type = other RNA
atggatacattccttccaaaa

SEQ ID NO: 2005 - RNA, 21 nt, synthetic construct
  source 1..21: mol_type = other RNA
tggatacattccttccaaata

SEQ ID NO: 2006 - RNA, 21 nt, synthetic construct
  source 1..21: mol_type = other RNA
ggatacattccttccaaatta

SEQ ID NO: 2007 - RNA, 21 nt, synthetic construct
  source 1..21: mol_type = other RNA
gatacattccttccaaattta

SEQ ID NO: 2008 - RNA, 21 nt, synthetic construct
  source 1..21: mol_type = other RNA
atacattccttccaaatttca

SEQ ID NO: 2009 - RNA, 21 nt, synthetic construct
  source 1..21: mol_type = other RNA
tacattccttccaaatttcca

SEQ ID NO: 2010 - RNA, 21 nt, synthetic construct
  source 1..21: mol_type = other RNA
acattccttccaaatttccaa

SEQ ID NO: 2011 - RNA, 21 nt, synthetic construct
  source 1..21: mol_type = other RNA
cattccttccaaatttccaaa

SEQ ID NO: 2012 - RNA, 21 nt, synthetic construct
  source 1..21: mol_type = other RNA
attccttccaaatttccaaaa

SEQ ID NO: 2013 - RNA, 21 nt, synthetic construct
  source 1..21: mol_type = other RNA
ttccttccaaatttccaaaca

SEQ ID NO: 2014 - RNA, 21 nt, synthetic construct
  source 1..21: mol_type = other RNA
tccttccaaatttccaaacaa

SEQ ID NO: 2015 - RNA, 21 nt, synthetic construct
  source 1..21: mol_type = other RNA
ccttccaaatttccaaacaaa

SEQ ID NO: 2016 - RNA, 21 nt, synthetic construct
  source 1..21: mol_type = other RNA
cttccaaatttccaaacaaga

SEQ ID NO: 2017 - RNA, 21 nt, synthetic construct
  source 1..21: mol_type = other RNA
ttccaaatttccaaacaagaa

SEQ ID NO: 2018 - RNA, 21 nt, synthetic construct
  source 1..21: mol_type = other RNA
tccaaatttccaaacaagaaa

SEQ ID NO: 2019 - RNA, 21 nt, synthetic construct
  source 1..21: mol_type = other RNA
ccaaatttccaaacaagaaca

SEQ ID NO: 2020 - RNA, 21 nt, synthetic construct
  source 1..21: mol_type = other RNA
caaatttccaaacaagaacca

SEQ ID NO: 2021 - RNA, 21 nt, synthetic construct
  source 1..21: mol_type = other RNA
aaatttccaaacaagaaccta

SEQ ID NO: 2022 - RNA, 21 nt, synthetic construct
  source 1..21: mol_type = other RNA
aatttccaaacaagaacctga

SEQ ID NO: 2023 - RNA, 21 nt, synthetic construct
  source 1..21: mol_type = other RNA
atttccaaacaagaacctgaa

SEQ ID NO: 2024 - RNA, 21 nt, synthetic construct
  source 1..21: mol_type = other RNA
tttccaaacaagaacctgaaa

SEQ ID NO: 2025 - RNA, 21 nt, synthetic construct
  source 1..21: mol_type = other RNA
ttccaaacaagaacctgaaga

SEQ ID NO: 2026 - RNA, 21 nt, synthetic construct
  source 1..21: mol_type = other RNA
tccaaacaagaacctgaagaa

SEQ ID NO: 2027 - RNA, 21 nt, synthetic construct
  source 1..21: mol_type = other RNA
ccaaacaagaacctgaagaaa

SEQ ID NO: 2028 - RNA, 21 nt, synthetic construct
  source 1..21: mol_type = other RNA
caaacaagaacctgaagaaga

SEQ ID NO: 2029 - RNA, 21 nt, synthetic construct
  source 1..21: mol_type = other RNA
aaacaagaacctgaagaagaa

SEQ ID NO: 2030 - RNA, 21 nt, synthetic construct
  source 1..21: mol_type = other RNA
aacaagaacctgaagaagaaa

SEQ ID NO: 2031 - RNA, 21 nt, synthetic construct
  source 1..21: mol_type = other RNA
acaagaacctgaagaagaata

SEQ ID NO: 2032 - RNA, 21 nt, synthetic construct
  source 1..21: mol_type = other RNA
caagaacctgaagaagaatta

SEQ ID NO: 2033 - RNA, 21 nt, synthetic construct
  source 1..21: mol_type = other RNA
aagaacctgaagaagaattaa

SEQ ID NO: 2034 - RNA, 21 nt, synthetic construct
  source 1..21: mol_type = other RNA
agaacctgaagaagaattaca

SEQ ID NO: 2035 - RNA, 21 nt, synthetic construct
  source 1..21: mol_type = other RNA
gaacctgaagaagaattacta

SEQ ID NO: 2036 - RNA, 21 nt, synthetic construct
  source 1..21: mol_type = other RNA
aacctgaagaagaattactga

SEQ ID NO: 2037 - RNA, 21 nt, synthetic construct
  source 1..21: mol_type = other RNA
acctgaagaagaattactgta

SEQ ID NO: 2038 - RNA, 21 nt, synthetic construct
  source 1..21: mol_type = other RNA
cctgaagaagaattactgtca

SEQ ID NO: 2039 - RNA, 21 nt, synthetic construct
  source 1..21: mol_type = other RNA
ctgaagaagaattactgtcga

SEQ ID NO: 2040 - RNA, 21 nt, synthetic construct
  source 1..21: mol_type = other RNA
tgaagaagaattactgtcgta

SEQ ID NO: 2041 - RNA, 21 nt, synthetic construct
  source 1..21: mol_type = other RNA
gaagaagaattactgtcgtaa

SEQ ID NO: 2042 - RNA, 21 nt, synthetic construct
  source 1..21: mol_type = other RNA
aagaagaattactgtcgtaaa

SEQ ID NO: 2043 - RNA, 21 nt, synthetic construct
  source 1..21: mol_type = other RNA
agggagctgcggccttggtga

SEQ ID NO: 2044 - RNA, 21 nt, synthetic construct
  source 1..21: mol_type = other RNA
ggagctgcggccttggtgtta

SEQ ID NO: 2045 - RNA, 21 nt, synthetic construct
  source 1..21: mol_type = other RNA
gagctgcggccttggtgttta

SEQ ID NO: 2046 - RNA, 21 nt, synthetic construct
  source 1..21: mol_type = other RNA
agctgcggccttggtgtttca

SEQ ID NO: 2047 - RNA, 21 nt, synthetic construct
  source 1..21: mol_type = other RNA
tgcggccttggtgtttcacca

SEQ ID NO: 2048 - RNA, 21 nt, synthetic construct
  source 1..21: mol_type = other RNA
cggccttggtgtttcaccaca

SEQ ID NO: 2049 - RNA, 21 nt, synthetic construct
  source 1..21: mol_type = other RNA
ggccttggtgtttcaccacca

SEQ ID NO: 2050 - RNA, 21 nt, synthetic construct
  source 1..21: mol_type = other RNA
gccttggtgtttcaccaccga

SEQ ID NO: 2051 - RNA, 21 nt, synthetic construct
  source 1..21: mol_type = other RNA
caacaagcgctgggaacttta

SEQ ID NO: 2052 - RNA, 21 nt, synthetic construct
  source 1..21: mol_type = other RNA
aacaagcgctgggaactttga

SEQ ID NO: 2053 - RNA, 21 nt, synthetic construct
  source 1..21: mol_type = other RNA
gctgcacaacacctccaccaa

SEQ ID NO: 2054 - RNA, 21 nt, synthetic construct
  source 1..21: mol_type = other RNA
ctgcacaacacctccaccata

SEQ ID NO: 2055 - RNA, 21 nt, synthetic construct
  source 1..21: mol_type = other RNA
tgcacaacacctccaccatca

SEQ ID NO: 2056 - RNA, 21 nt, synthetic construct
  source 1..21: mol_type = other RNA
gcacaacacctccaccatcta

SEQ ID NO: 2057 - RNA, 21 nt, synthetic construct
  source 1..21: mol_type = other RNA
cacaacacctccaccatctta

SEQ ID NO: 2058 - RNA, 21 nt, synthetic construct
  source 1..21: mol_type = other RNA
acaacacctccaccatcttca

SEQ ID NO: 2059 - RNA, 21 nt, synthetic construct
  source 1..21: mol_type = other RNA
caacacctccaccatcttcta

SEQ ID NO: 2060 - RNA, 21 nt, synthetic construct
  source 1..21: mol_type = other RNA
cacctccaccatcttctggta

SEQ ID NO: 2061 - RNA, 21 nt, synthetic construct
  source 1..21: mol_type = other RNA
acctccaccatcttctggtca

SEQ ID NO: 2062 - RNA, 21 nt, synthetic construct
  source 1..21: mol_type = other RNA
cctccaccatcttctggtcca

SEQ ID NO: 2063 - RNA, 21 nt, synthetic construct
  source 1..21: mol_type = other RNA
ctccaccatcttctggtccca

SEQ ID NO: 2064 - RNA, 21 nt, synthetic construct
  source 1..21: mol_type = other RNA
tccaccatcttctggtcccaa

SEQ ID NO: 2065 - RNA, 21 nt, synthetic construct
  source 1..21: mol_type = other RNA
ccaccatcttctggtcccaca

SEQ ID NO: 2066 - RNA, 21 nt, synthetic construct
  source 1..21: mol_type = other RNA
caccatcttctggtcccacca

SEQ ID NO: 2067 - RNA, 21 nt, synthetic construct
  source 1..21: mol_type = other RNA
catcttctggtcccacctaca

SEQ ID NO: 2068 - RNA, 21 nt, synthetic construct
  source 1..21: mol_type = other RNA
ttctggtcccacctaccagta

SEQ ID NO: 2069 - RNA, 21 nt, synthetic construct
  source 1..21: mol_type = other RNA
tctggtcccacctaccagtga

SEQ ID NO: 2070 - RNA, 21 nt, synthetic construct
  source 1..21: mol_type = other RNA
ctggtcccacctaccagtgta

SEQ ID NO: 2071 - RNA, 21 nt, synthetic construct
  source 1..21: mol_type = other RNA
tggtcccacctaccagtgtca

SEQ ID NO: 2072 - RNA, 21 nt, synthetic construct
  source 1..21: mol_type = other RNA
cccacctaccagtgtctgaaa

SEQ ID NO: 2073 - RNA, 21 nt, synthetic construct
  source 1..21: mol_type = other RNA
ccacctaccagtgtctgaaga

SEQ ID NO: 2074 - RNA, 21 nt, synthetic construct
  source 1..21: mol_type = other RNA
acctaccagtgtctgaaggga

SEQ ID NO: 2075 - RNA, 21 nt, synthetic construct
  source 1..21: mol_type = other RNA
cctaccagtgtctgaagggaa

SEQ ID NO: 2076 - RNA, 21 nt, synthetic construct
  source 1..21: mol_type = other RNA
ctaccagtgtctgaagggaaa

SEQ ID NO: 2077 - RNA, 21 nt, synthetic construct
  source 1..21: mol_type = other RNA
taccagtgtctgaagggaaca

SEQ ID NO: 2078 - RNA, 21 nt, synthetic construct
  source 1..21: mol_type = other RNA
gtgtctgaagggaacaggtga

SEQ ID NO: 2079 - RNA, 21 nt, synthetic construct
  source 1..21: mol_type = other RNA
gtctgaagggaacaggtgaaa

SEQ ID NO: 2080 - RNA, 21 nt, synthetic construct
  source 1..21: mol_type = other RNA
tctgaagggaacaggtgaaaa

SEQ ID NO: 2081 - RNA, 21 nt, synthetic construct
  source 1..21: mol_type = other RNA
ctgaagggaacaggtgaaaaa

SEQ ID NO: 2082 - RNA, 21 nt, synthetic construct
  source 1..21: mol_type = other RNA
tgaagggaacaggtgaaaaca

SEQ ID NO: 2083 - RNA, 21 nt, synthetic construct
  source 1..21: mol_type = other RNA
gaagggaacaggtgaaaacta

SEQ ID NO: 2084 - RNA, 21 nt, synthetic construct
  source 1..21: mol_type = other RNA
aagggaacaggtgaaaactaa

SEQ ID NO: 2085 - RNA, 21 nt, synthetic construct
  source 1..21: mol_type = other RNA
agggaacaggtgaaaactata

SEQ ID NO: 2086 - RNA, 21 nt, synthetic construct
  source 1..21: mol_type = other RNA
gggaacaggtgaaaactatca

SEQ ID NO: 2087 - RNA, 21 nt, synthetic construct
  source 1..21: mol_type = other RNA
ggaacaggtgaaaactatcga

SEQ ID NO: 2088 - RNA, 21 nt, synthetic construct
  source 1..21: mol_type = other RNA
gaacaggtgaaaactatcgca

SEQ ID NO: 2089 - RNA, 21 nt, synthetic construct
  source 1..21: mol_type = other RNA
gtgaaaactatcgcgggaata

SEQ ID NO: 2090 - RNA, 21 nt, synthetic construct
  source 1..21: mol_type = other RNA
gaaaactatcgcgggaatgta

SEQ ID NO: 2091 - RNA, 21 nt, synthetic construct
  source 1..21: mol_type = other RNA
aaaactatcgcgggaatgtga

SEQ ID NO: 2092 - RNA, 21 nt, synthetic construct
  source 1..21: mol_type = other RNA
tatcgcgggaatgtggctgta

SEQ ID NO: 2093 - RNA, 21 nt, synthetic construct
  source 1..21: mol_type = other RNA
atcgcgggaatgtggctgtta

SEQ ID NO: 2094 - RNA, 21 nt, synthetic construct
  source 1..21: mol_type = other RNA
tcgcgggaatgtggctgttaa

SEQ ID NO: 2095 - RNA, 21 nt, synthetic construct
  source 1..21: mol_type = other RNA
cgcgggaatgtggctgttaca

SEQ ID NO: 2096 - RNA, 21 nt, synthetic construct
  source 1..21: mol_type = other RNA
gggaatgtggctgttaccgta

SEQ ID NO: 2097 - RNA, 21 nt, synthetic construct
  source 1..21: mol_type = other RNA
gaatgtggctgttaccgtgta

SEQ ID NO: 2098 - RNA, 21 nt, synthetic construct
  source 1..21: mol_type = other RNA
aatgtggctgttaccgtgtca

SEQ ID NO: 2099 - RNA, 21 nt, synthetic construct
  source 1..21: mol_type = other RNA
ccgtgtccgggcacacctgta

SEQ ID NO: 2100 - RNA, 21 nt, synthetic construct
  source 1..21: mol_type = other RNA
tccgggcacacctgtcagcaa

SEQ ID NO: 2101 - RNA, 21 nt, synthetic construct
  source 1..21: mol_type = other RNA
cgggcacacctgtcagcacta

SEQ ID NO: 2102 - RNA, 21 nt, synthetic construct
  source 1..21: mol_type = other RNA
gcacacctgtcagcactggaa

SEQ ID NO: 2103 - RNA, 21 nt, synthetic construct
  source 1..21: mol_type = other RNA
cacacctgtcagcactggaga

SEQ ID NO: 2104 - RNA, 21 nt, synthetic construct
  source 1..21: mol_type = other RNA
acacctgtcagcactggagta

SEQ ID NO: 2105 - RNA, 21 nt, synthetic construct
  source 1..21: mol_type = other RNA
cctgtcagcactggagtgcaa

SEQ ID NO: 2106 - RNA, 21 nt, synthetic construct
  source 1..21: mol_type = other RNA
tgtcagcactggagtgcacaa

SEQ ID NO: 2107 - RNA, 21 nt, synthetic construct
  source 1..21: mol_type = other RNA
tcagcactggagtgcacagaa

SEQ ID NO: 2108 - RNA, 21 nt, synthetic construct
  source 1..21: mol_type = other RNA
cagcactggagtgcacagaca

SEQ ID NO: 2109 - RNA, 21 nt, synthetic construct
  source 1..21: mol_type = other RNA
agcactggagtgcacagacca

SEQ ID NO: 2110 - RNA, 21 nt, synthetic construct
  source 1..21: mol_type = other RNA
ctcacacacataacaggacaa

SEQ ID NO: 2111 - RNA, 21 nt, synthetic construct
  source 1..21: mol_type = other RNA
cacacacataacaggacacca

SEQ ID NO: 2112 - RNA, 21 nt, synthetic construct
  source 1..21: mol_type = other RNA
acacacataacaggacaccaa

SEQ ID NO: 2113 - RNA, 21 nt, synthetic construct
  source 1..21: mol_type = other RNA
cacacataacaggacaccaga

SEQ ID NO: 2114 - RNA, 21 nt, synthetic construct
  source 1..21: mol_type = other RNA
acacataacaggacaccagaa

SEQ ID NO: 2115 - RNA, 21 nt, synthetic construct
  source 1..21: mol_type = other RNA
cacataacaggacaccagaaa

SEQ ID NO: 2116 - RNA, 21 nt, synthetic construct
  source 1..21: mol_type = other RNA
acataacaggacaccagaaaa

SEQ ID NO: 2117 - RNA, 21 nt, synthetic construct
  source 1..21: mol_type = other RNA
cataacaggacaccagaaaaa

SEQ ID NO: 2118 - RNA, 21 nt, synthetic construct
  source 1..21: mol_type = other RNA
ataacaggacaccagaaaaca

SEQ ID NO: 2119 - RNA, 21 nt, synthetic construct
  source 1..21: mol_type = other RNA
taacaggacaccagaaaacta

SEQ ID NO: 2120 - RNA, 21 nt, synthetic construct
  source 1..21: mol_type = other RNA
aacaggacaccagaaaactta

SEQ ID NO: 2121 - RNA, 21 nt, synthetic construct
  source 1..21: mol_type = other RNA
cctgcaaaaatttggatgaaa

SEQ ID NO: 2122 - RNA, 21 nt, synthetic construct
  source 1..21: mol_type = other RNA
ctgcaaaaatttggatgaaaa

SEQ ID NO: 2123 - RNA, 21 nt, synthetic construct
  source 1..21: mol_type = other RNA
tgcaaaaatttggatgaaaaa

SEQ ID NO: 2124 - RNA, 21 nt, synthetic construct
  source 1..21: mol_type = other RNA
gcaaaaatttggatgaaaaca

SEQ ID NO: 2125 - RNA, 21 nt, synthetic construct
  source 1..21: mol_type = other RNA
caaaaatttggatgaaaacta

SEQ ID NO: 2126 - RNA, 21 nt, synthetic construct
  source 1..21: mol_type = other RNA
aaaaatttggatgaaaactaa

SEQ ID NO: 2127 - RNA, 21 nt, synthetic construct
  source 1..21: mol_type = other RNA
aaaatttggatgaaaactaca

SEQ ID NO: 2128 - RNA, 21 nt, synthetic construct
  source 1..21: mol_type = other RNA
aaatttggatgaaaactacta

SEQ ID NO: 2129 - RNA, 21 nt, synthetic construct
  source 1..21: mol_type = other RNA
aatttggatgaaaactactga

SEQ ID NO: 2130 - RNA, 21 nt, synthetic construct
  source 1..21: mol_type = other RNA
atttggatgaaaactactgca

SEQ ID NO: 2131 - RNA, 21 nt, synthetic construct
  source 1..21: mol_type = other RNA
tttggatgaaaactactgcca

SEQ ID NO: 2132 - RNA, 21 nt, synthetic construct
  source 1..21: mol_type = other RNA
ttggatgaaaactactgccga

SEQ ID NO: 2133 - RNA, 21 nt, synthetic construct
  source 1..21: mol_type = other RNA
tggatgaaaactactgccgca

SEQ ID NO: 2134 - RNA, 21 nt, synthetic construct
  source 1..21: mol_type = other RNA
ggatgaaaactactgccgcaa

SEQ ID NO: 2135 - RNA, 21 nt, synthetic construct
  source 1..21: mol_type = other RNA
gatgaaaactactgccgcaaa

SEQ ID NO: 2136 - RNA, 21 nt, synthetic construct
  source 1..21: mol_type = other RNA
atgaaaactactgccgcaata

SEQ ID NO: 2137 - RNA, 21 nt, synthetic construct
  source 1..21: mol_type = other RNA
tgaaaactactgccgcaatca

SEQ ID NO: 2138 - RNA, 21 nt, synthetic construct
  source 1..21: mol_type = other RNA
gaaaactactgccgcaatcca

SEQ ID NO: 2139 - RNA, 21 nt, synthetic construct
  source 1..21: mol_type = other RNA
aaaactactgccgcaatccta

SEQ ID NO: 2140 - RNA, 21 nt, synthetic construct
  source 1..21: mol_type = other RNA
aaactactgccgcaatcctga

SEQ ID NO: 2141 - RNA, 21 nt, synthetic construct
  source 1..21: mol_type = other RNA
aactactgccgcaatcctgaa

SEQ ID NO: 2142 - RNA, 21 nt, synthetic construct
  source 1..21: mol_type = other RNA
tactgccgcaatcctgacgga

SEQ ID NO: 2143 - RNA, 21 nt, synthetic construct
  source 1..21: mol_type = other RNA
actgccgcaatcctgacggaa

SEQ ID NO: 2144 - RNA, 21 nt, synthetic construct
  source 1..21: mol_type = other RNA
ctgccgcaatcctgacggaaa

SEQ ID NO: 2145 - RNA, 21 nt, synthetic construct
  source 1..21: mol_type = other RNA
tgccgcaatcctgacggaaaa

SEQ ID NO: 2146 - RNA, 21 nt, synthetic construct
  source 1..21: mol_type = other RNA
gccgcaatcctgacggaaaaa

SEQ ID NO: 2147 - RNA, 21 nt, synthetic construct
  source 1..21: mol_type = other RNA
ccgcaatcctgacggaaaaaa

SEQ ID NO: 2148 - RNA, 21 nt, synthetic construct
  source 1..21: mol_type = other RNA
cgcaatcctgacggaaaaaga

SEQ ID NO: 2149 - RNA, 21 nt, synthetic construct
  source 1..21: mol_type = other RNA
gcaatcctgacggaaaaagga

SEQ ID NO: 2150 - RNA, 21 nt, synthetic construct
  source 1..21: mol_type = other RNA
caatcctgacggaaaaaggga

SEQ ID NO: 2151 - RNA, 21 nt, synthetic construct
  source 1..21: mol_type = other RNA
aatcctgacggaaaaagggca

SEQ ID NO: 2152 - RNA, 21 nt, synthetic construct
  source 1..21: mol_type = other RNA
atcctgacggaaaaagggcca

SEQ ID NO: 2153 - RNA, 21 nt, synthetic construct
  source 1..21: mol_type = other RNA
catggtgccatacaaccaaca

SEQ ID NO: 2154 - RNA, 21 nt, synthetic construct
  source 1..21: mol_type = other RNA
tggtgccatacaaccaacaga

SEQ ID NO: 2155 - RNA, 21 nt, synthetic construct
  source 1..21: mol_type = other RNA
gtgccatacaaccaacagcca

SEQ ID NO: 2156 - RNA, 21 nt, synthetic construct
  source 1..21: mol_type = other RNA
gccatacaaccaacagccaaa

SEQ ID NO: 2157 - RNA, 21 nt, synthetic construct
  source 1..21: mol_type = other RNA
ccatacaaccaacagccaaga

SEQ ID NO: 2158 - RNA, 21 nt, synthetic construct
  source 1..21: mol_type = other RNA
catacaaccaacagccaagta

SEQ ID NO: 2159 - RNA, 21 nt, synthetic construct
  source 1..21: mol_type = other RNA
atacaaccaacagccaagtga

SEQ ID NO: 2160 - RNA, 21 nt, synthetic construct
  source 1..21: mol_type = other RNA
tacaaccaacagccaagtgca

SEQ ID NO: 2161 - RNA, 21 nt, synthetic construct
  source 1..21: mol_type = other RNA
acaaccaacagccaagtgcga

SEQ ID NO: 2162 - RNA, 21 nt, synthetic construct
  source 1..21: mol_type = other RNA
gccaagtgcggtgggagtaca

SEQ ID NO: 2163 - RNA, 21 nt, synthetic construct
  source 1..21: mol_type = other RNA
aagtgcggtgggagtactgta

SEQ ID NO: 2164 - RNA, 21 nt, synthetic construct
  source 1..21: mol_type = other RNA
agtgcggtgggagtactgtaa

SEQ ID NO: 2165 - RNA, 21 nt, synthetic construct
  source 1..21: mol_type = other RNA
gtgcggtgggagtactgtaaa

SEQ ID NO: 2166 - RNA, 21 nt, synthetic construct
  source 1..21: mol_type = other RNA
tgcggtgggagtactgtaaga

SEQ ID NO: 2167 - RNA, 21 nt, synthetic construct
  source 1..21: mol_type = other RNA
gcggtgggagtactgtaagaa

SEQ ID NO: 2168 - RNA, 21 nt, synthetic construct
  source 1..21: mol_type = other RNA
cggtgggagtactgtaagata

SEQ ID NO: 2169 - RNA, 21 nt, synthetic construct
  source 1..21: mol_type = other RNA
ggtgggagtactgtaagataa

SEQ ID NO: 2170 - RNA, 21 nt, synthetic construct
  source 1..21: mol_type = other RNA
gtgggagtactgtaagataca

SEQ ID NO: 2171 - RNA, 21 nt, synthetic construct
  source 1..21: mol_type = other RNA
tgggagtactgtaagatacca

SEQ ID NO: 2172 - RNA, 21 nt, synthetic construct
  source 1..21: mol_type = other RNA
ggagtactgtaagataccgta

SEQ ID NO: 2173 - RNA, 21 nt, synthetic construct
  source 1..21: mol_type = other RNA
gagtactgtaagataccgtca

SEQ ID NO: 2174 - RNA, 21 nt, synthetic construct
  source 1..21: mol_type = other RNA
agtactgtaagataccgtcca

SEQ ID NO: 2175 - RNA, 21 nt, synthetic construct
  source 1..21: mol_type = other RNA
actgtaagataccgtcctgta

SEQ ID NO: 2176 - RNA, 21 nt, synthetic construct
  source 1..21: mol_type = other RNA
ctgtaagataccgtcctgtga

SEQ ID NO: 2177 - RNA, 21 nt, synthetic construct
  source 1..21: mol_type = other RNA
gtaagataccgtcctgtgaca

SEQ ID NO: 2178 - RNA, 21 nt, synthetic construct
  source 1..21: mol_type = other RNA
ttggctcccacagcaccacca

SEQ ID NO: 2179 - RNA, 21 nt, synthetic construct
  source 1..21: mol_type = other RNA
ggctcccacagcaccacctga

SEQ ID NO: 2180 - RNA, 21 nt, synthetic construct
  source 1..21: mol_type = other RNA
gctcccacagcaccacctgaa

SEQ ID NO: 2181 - RNA, 21 nt, synthetic construct
  source 1..21: mol_type = other RNA
acagcaccacctgagctaaca

SEQ ID NO: 2182 - RNA, 21 nt, synthetic construct
  source 1..21: mol_type = other RNA
cagcaccacctgagctaacca

SEQ ID NO: 2183 - RNA, 21 nt, synthetic construct
  source 1..21: mol_type = other RNA
catggtgatggacagagctaa

SEQ ID NO: 2184 - RNA, 21 nt, synthetic construct
  source 1..21: mol_type = other RNA
gacagagctaccgaggcacaa

SEQ ID NO: 2185 - RNA, 21 nt, synthetic construct
  source 1..21: mol_type = other RNA
acagagctaccgaggcacata

SEQ ID NO: 2186 - RNA, 21 nt, synthetic construct
  source 1..21: mol_type = other RNA
cagagctaccgaggcacatca

SEQ ID NO: 2187 - RNA, 21 nt, synthetic construct
  source 1..21: mol_type = other RNA
gagctaccgaggcacatccta

SEQ ID NO: 2188 - RNA, 21 nt, synthetic construct
  source 1..21: mol_type = other RNA
accgaggcacatcctccacca

SEQ ID NO: 2189 - RNA, 21 nt, synthetic construct
  source 1..21: mol_type = other RNA
cgaggcacatcctccaccaca

SEQ ID NO: 2190 - RNA, 21 nt, synthetic construct
  source 1..21: mol_type = other RNA
aggcacatcctccaccaccaa

SEQ ID NO: 2191 - RNA, 21 nt, synthetic construct
  source 1..21: mol_type = other RNA
gcacatcctccaccaccacca

SEQ ID NO: 2192 - RNA, 21 nt, synthetic construct
  source 1..21: mol_type = other RNA
catcctccaccaccaccacaa

SEQ ID NO: 2193 - RNA, 21 nt, synthetic construct
  source 1..21: mol_type = other RNA
atcctccaccaccaccacaga

SEQ ID NO: 2194 - RNA, 21 nt, synthetic construct
  source 1..21: mol_type = other RNA
tcctccaccaccaccacagga

SEQ ID NO: 2195 - RNA, 21 nt, synthetic construct
  source 1..21: mol_type = other RNA
cctccaccaccaccacaggaa

SEQ ID NO: 2196 - RNA, 21 nt, synthetic construct
  source 1..21: mol_type = other RNA
ctccaccaccaccacaggaaa

SEQ ID NO: 2197 - RNA, 21 nt, synthetic construct
  source 1..21: mol_type = other RNA
tccaccaccaccacaggaaaa

SEQ ID NO: 2198 - RNA, 21 nt, synthetic construct
  source 1..21: mol_type = other RNA
ccaccaccaccacaggaaaga

SEQ ID NO: 2199 - RNA, 21 nt, synthetic construct
  source 1..21: mol_type = other RNA
caccaccaccacaggaaagaa

SEQ ID NO: 2200 - RNA, 21 nt, synthetic construct
  source 1..21: mol_type = other RNA
accaccaccacaggaaagaaa

SEQ ID NO: 2201 - RNA, 21 nt, synthetic construct
  source 1..21: mol_type = other RNA
ccaccaccacaggaaagaaga

SEQ ID NO: 2202 - RNA, 21 nt, synthetic construct
  source 1..21: mol_type = other RNA
caccaccacaggaaagaagta

SEQ ID NO: 2203 - RNA, 21 nt, synthetic construct
  source 1..21: mol_type = other RNA
ccaccacaggaaagaagtgta

SEQ ID NO: 2204 - RNA, 21 nt, synthetic construct
  source 1..21: mol_type = other RNA
caccacaggaaagaagtgtca

SEQ ID NO: 2205 - RNA, 21 nt, synthetic construct
  source 1..21: mol_type = other RNA
accacaggaaagaagtgtcaa

SEQ ID NO: 2206 - RNA, 21 nt, synthetic construct
  source 1..21: mol_type = other RNA
ccacaggaaagaagtgtcaga

SEQ ID NO: 2207 - RNA, 21 nt, synthetic construct
  source 1..21: mol_type = other RNA
cacaggaaagaagtgtcagta

SEQ ID NO: 2208 - RNA, 21 nt, synthetic construct
  source 1..21: mol_type = other RNA
acaggaaagaagtgtcagtca

SEQ ID NO: 2209 - RNA, 21 nt, synthetic construct
  source 1..21: mol_type = other RNA
caggaaagaagtgtcagtcta

SEQ ID NO: 2210 - RNA, 21 nt, synthetic construct
  source 1..21: mol_type = other RNA
aggaaagaagtgtcagtctta

SEQ ID NO: 2211 - RNA, 21 nt, synthetic construct
  source 1..21: mol_type = other RNA
ggaaagaagtgtcagtcttga

SEQ ID NO: 2212 - RNA, 21 nt, synthetic construct
  source 1..21: mol_type = other RNA
gaaagaagtgtcagtcttgga

SEQ ID NO: 2213 - RNA, 21 nt, synthetic construct
  source 1..21: mol_type = other RNA
aaagaagtgtcagtcttggta

SEQ ID NO: 2214 - RNA, 21 nt, synthetic construct
  source 1..21: mol_type = other RNA
agaagtgtcagtcttggtcaa

SEQ ID NO: 2215 - RNA, 21 nt, synthetic construct
  source 1..21: mol_type = other RNA
gaagtgtcagtcttggtcata

SEQ ID NO: 2216 - RNA, 21 nt, synthetic construct
  source 1..21: mol_type = other RNA
aagtgtcagtcttggtcatca

SEQ ID NO: 2217 - RNA, 21 nt, synthetic construct
  source 1..21: mol_type = other RNA
agtgtcagtcttggtcatcta

SEQ ID NO: 2218 - RNA, 21 nt, synthetic construct
  source 1..21: mol_type = other RNA
gtgtcagtcttggtcatctaa

SEQ ID NO: 2219 - RNA, 21 nt, synthetic construct
  source 1..21: mol_type = other RNA
tgtcagtcttggtcatctata

SEQ ID NO: 2220 - RNA, 21 nt, synthetic construct
  source 1..21: mol_type = other RNA
gtcagtcttggtcatctatga

SEQ ID NO: 2221 - RNA, 21 nt, synthetic construct
  source 1..21: mol_type = other RNA
tcagtcttggtcatctatgaa

SEQ ID NO: 2222 - RNA, 21 nt, synthetic construct
  source 1..21: mol_type = other RNA
cagtcttggtcatctatgaca

SEQ ID NO: 2223 - RNA, 21 nt, synthetic construct
  source 1..21: mol_type = other RNA
agtcttggtcatctatgacaa

SEQ ID NO: 2224 - RNA, 21 nt, synthetic construct
  source 1..21: mol_type = other RNA
ggaatccagatgccgataaaa

SEQ ID NO: 2225 - RNA, 21 nt, synthetic construct
  source 1..21: mol_type = other RNA
gaatccagatgccgataaaga

SEQ ID NO: 2226 - RNA, 21 nt, synthetic construct
  source 1..21: mol_type = other RNA
ggtgggagtactgcaacctga

SEQ ID NO: 2227 - RNA, 21 nt, synthetic construct
  source 1..21: mol_type = other RNA
gtgggagtactgcaacctgaa

SEQ ID NO: 2228 - RNA, 21 nt, synthetic construct
  source 1..21: mol_type = other RNA
tgggagtactgcaacctgaaa

SEQ ID NO: 2229 - RNA, 21 nt, synthetic construct
  source 1..21: mol_type = other RNA
gggagtactgcaacctgaaaa

SEQ ID NO: 2230 - RNA, 21 nt, synthetic construct
  source 1..21: mol_type = other RNA
ggagtactgcaacctgaaaaa

SEQ ID NO: 2231 - RNA, 21 nt, synthetic construct
  source 1..21: mol_type = other RNA
gagtactgcaacctgaaaaaa

SEQ ID NO: 2232 - RNA, 21 nt, synthetic construct
  source 1..21: mol_type = other RNA
agtactgcaacctgaaaaaaa

SEQ ID NO: 2233 - RNA, 21 nt, synthetic construct
  source 1..21: mol_type = other RNA
gtactgcaacctgaaaaaata

SEQ ID NO: 2234 - RNA, 21 nt, synthetic construct
  source 1..21: mol_type = other RNA
tactgcaacctgaaaaaatga

SEQ ID NO: 2235 - RNA, 21 nt, synthetic construct
  source 1..21: mol_type = other RNA
actgcaacctgaaaaaatgca

SEQ ID NO: 2236 - RNA, 21 nt, synthetic construct
  source 1..21: mol_type = other RNA
ctgcaacctgaaaaaatgcta

SEQ ID NO: 2237 - RNA, 21 nt, synthetic construct
  source 1..21: mol_type = other RNA
tgcaacctgaaaaaatgctca

SEQ ID NO: 2238 - RNA, 21 nt, synthetic construct
  source 1..21: mol_type = other RNA
gcaacctgaaaaaatgctcaa

SEQ ID NO: 2239 - RNA, 21 nt, synthetic construct
  source 1..21: mol_type = other RNA
caacctgaaaaaatgctcaga

SEQ ID NO: 2240 - RNA, 21 nt, synthetic construct
  source 1..21: mol_type = other RNA
aacctgaaaaaatgctcagga

SEQ ID NO: 2241 - RNA, 21 nt, synthetic construct
  source 1..21: mol_type = other RNA
acctgaaaaaatgctcaggaa

SEQ ID NO: 2242 - RNA, 21 nt, synthetic construct
  source 1..21: mol_type = other RNA
cctgaaaaaatgctcaggaaa

SEQ ID NO: 2243 - RNA, 21 nt, synthetic construct
  source 1..21: mol_type = other RNA
ctgaaaaaatgctcaggaaca

SEQ ID NO: 2244 - RNA, 21 nt, synthetic construct
  source 1..21: mol_type = other RNA
tgaaaaaatgctcaggaacaa

SEQ ID NO: 2245 - RNA, 21 nt, synthetic construct
  source 1..21: mol_type = other RNA
gaaaaaatgctcaggaacaga

SEQ ID NO: 2246 - RNA, 21 nt, synthetic construct
  source 1..21: mol_type = other RNA
aaaaaatgctcaggaacagaa

SEQ ID NO: 2247 - RNA, 21 nt, synthetic construct
  source 1..21: mol_type = other RNA
aaaaatgctcaggaacagaaa

SEQ ID NO: 2248 - RNA, 21 nt, synthetic construct
  source 1..21: mol_type = other RNA
aaaatgctcaggaacagaaga

SEQ ID NO: 2249 - RNA, 21 nt, synthetic construct
  source 1..21: mol_type = other RNA
aaatgctcaggaacagaagca

SEQ ID NO: 2250 - RNA, 21 nt, synthetic construct
  source 1..21: mol_type = other RNA
gcacctccgcctgttgtccta

SEQ ID NO: 2251 - RNA, 21 nt, synthetic construct
  source 1..21: mol_type = other RNA
cacctccgcctgttgtcctga

SEQ ID NO: 2252 - RNA, 21 nt, synthetic construct
  source 1..21: mol_type = other RNA
cctccgcctgttgtcctgcta

SEQ ID NO: 2253 - RNA, 21 nt, synthetic construct
  source 1..21: mol_type = other RNA
ctccgcctgttgtcctgctta

SEQ ID NO: 2254 - RNA, 21 nt, synthetic construct
  source 1..21: mol_type = other RNA
tccgcctgttgtcctgcttca

SEQ ID NO: 2255 - RNA, 21 nt, synthetic construct
  source 1..21: mol_type = other RNA
ccgcctgttgtcctgcttcca

SEQ ID NO: 2256 - RNA, 21 nt, synthetic construct
  source 1..21: mol_type = other RNA
cgcctgttgtcctgcttccaa

SEQ ID NO: 2257 - RNA, 21 nt, synthetic construct
  source 1..21: mol_type = other RNA
ccgaagaagactgtatgttta

SEQ ID NO: 2258 - RNA, 21 nt, synthetic construct
  source 1..21: mol_type = other RNA
cgaagaagactgtatgtttga

SEQ ID NO: 2259 - RNA, 21 nt, synthetic construct
  source 1..21: mol_type = other RNA
gaagaagactgtatgtttgga

SEQ ID NO: 2260 - RNA, 21 nt, synthetic construct
  source 1..21: mol_type = other RNA
aagaagactgtatgtttggga

SEQ ID NO: 2261 - RNA, 21 nt, synthetic construct
  source 1..21: mol_type = other RNA
gcgaccactgttactgggaca

SEQ ID NO: 2262 - RNA, 21 nt, synthetic construct
  source 1..21: mol_type = other RNA
ctgggacgccatgccaggaca

SEQ ID NO: 2263 - RNA, 21 nt, synthetic construct
  source 1..21: mol_type = other RNA
tgggacgccatgccaggacta

SEQ ID NO: 2264 - RNA, 21 nt, synthetic construct
  source 1..21: mol_type = other RNA
catagacacagcattttcaca

SEQ ID NO: 2265 - RNA, 21 nt, synthetic construct
  source 1..21: mol_type = other RNA
atagacacagcattttcacta

SEQ ID NO: 2266 - RNA, 21 nt, synthetic construct
  source 1..21: mol_type = other RNA
tagacacagcattttcactca

SEQ ID NO: 2267 - RNA, 21 nt, synthetic construct
  source 1..21: mol_type = other RNA
agacacagcattttcactcca

SEQ ID NO: 2268 - RNA, 21 nt, synthetic construct
  source 1..21: mol_type = other RNA
gacacagcattttcactccaa

SEQ ID NO: 2269 - RNA, 21 nt, synthetic construct
  source 1..21: mol_type = other RNA
acacagcattttcactccaga

SEQ ID NO: 2270 - RNA, 21 nt, synthetic construct
  source 1..21: mol_type = other RNA
cacagcattttcactccagaa

SEQ ID NO: 2271 - RNA, 21 nt, synthetic construct
  source 1..21: mol_type = other RNA
acagcattttcactccagaga

SEQ ID NO: 2272 - RNA, 21 nt, synthetic construct
  source 1..21: mol_type = other RNA
cagcattttcactccagagaa

SEQ ID NO: 2273 - RNA, 21 nt, synthetic construct
  source 1..21: mol_type = other RNA
agcattttcactccagagaca

SEQ ID NO: 2274 - RNA, 21 nt, synthetic construct
  source 1..21: mol_type = other RNA
gcattttcactccagagacaa

SEQ ID NO: 2275 - RNA, 21 nt, synthetic construct
  source 1..21: mol_type = other RNA
cattttcactccagagacaaa

SEQ ID NO: 2276 - RNA, 21 nt, synthetic construct
  source 1..21: mol_type = other RNA
attttcactccagagacaaaa

SEQ ID NO: 2277 - RNA, 21 nt, synthetic construct
  source 1..21: mol_type = other RNA
ttttcactccagagacaaata

SEQ ID NO: 2278 - RNA, 21 nt, synthetic construct
  source 1..21: mol_type = other RNA
tttcactccagagacaaatca

SEQ ID NO: 2279 - RNA, 21 nt, synthetic construct
  source 1..21: mol_type = other RNA
ttcactccagagacaaatcca

SEQ ID NO: 2280 - RNA, 21 nt, synthetic construct
  source 1..21: mol_type = other RNA
tcactccagagacaaatccaa

SEQ ID NO: 2281 - RNA, 21 nt, synthetic construct
  source 1..21: mol_type = other RNA
acgggcgggtctggaaaaaaa

SEQ ID NO: 2282 - RNA, 21 nt, synthetic construct
  source 1..21: mol_type = other RNA
cgggcgggtctggaaaaaaaa

SEQ ID NO: 2283 - RNA, 21 nt, synthetic construct
  source 1..21: mol_type = other RNA
gggcgggtctggaaaaaaata

SEQ ID NO: 2284 - RNA, 21 nt, synthetic construct
  source 1..21: mol_type = other RNA
ggcgggtctggaaaaaaatta

SEQ ID NO: 2285 - RNA, 21 nt, synthetic construct
  source 1..21: mol_type = other RNA
gcgggtctggaaaaaaattaa

SEQ ID NO: 2286 - RNA, 21 nt, synthetic construct
  source 1..21: mol_type = other RNA
cgggtctggaaaaaaattaca

SEQ ID NO: 2287 - RNA, 21 nt, synthetic construct
  source 1..21: mol_type = other RNA
gggtctggaaaaaaattacta

SEQ ID NO: 2288 - RNA, 21 nt, synthetic construct
  source 1..21: mol_type = other RNA
ggtctggaaaaaaattactga

SEQ ID NO: 2289 - RNA, 21 nt, synthetic construct
  source 1..21: mol_type = other RNA
gtctggaaaaaaattactgca

SEQ ID NO: 2290 - RNA, 21 nt, synthetic construct
  source 1..21: mol_type = other RNA
tctggaaaaaaattactgcca

SEQ ID NO: 2291 - RNA, 21 nt, synthetic construct
  source 1..21: mol_type = other RNA
ctggaaaaaaattactgccga

SEQ ID NO: 2292 - RNA, 21 nt, synthetic construct
  source 1..21: mol_type = other RNA
tggaaaaaaattactgccgta

SEQ ID NO: 2293 - RNA, 21 nt, synthetic construct
  source 1..21: mol_type = other RNA
cgtaaccctgatggtgatgta

SEQ ID NO: 2294 - RNA, 21 nt, synthetic construct
  source 1..21: mol_type = other RNA
aaccctgatggtgatgtagga

SEQ ID NO: 2295 - RNA, 21 nt, synthetic construct
  source 1..21: mol_type = other RNA
ccctgatggtgatgtaggtga

SEQ ID NO: 2296 - RNA, 21 nt, synthetic construct
  source 1..21: mol_type = other RNA
cctgatggtgatgtaggtgga

SEQ ID NO: 2297 - RNA, 21 nt, synthetic construct
  source 1..21: mol_type = other RNA
taggtggtccctggtgctaca

SEQ ID NO: 2298 - RNA, 21 nt, synthetic construct
  source 1..21: mol_type = other RNA
aggtggtccctggtgctacaa

SEQ ID NO: 2299 - RNA, 21 nt, synthetic construct
  source 1..21: mol_type = other RNA
gtggtccctggtgctacacga

SEQ ID NO: 2300 - RNA, 21 nt, synthetic construct
  source 1..21: mol_type = other RNA
ctggtgctacacgacaaatca

SEQ ID NO: 2301 - RNA, 21 nt, synthetic construct
  source 1..21: mol_type = other RNA
ggtgctacacgacaaatccaa

SEQ ID NO: 2302 - RNA, 21 nt, synthetic construct
  source 1..21: mol_type = other RNA
gtgctacacgacaaatccaaa

SEQ ID NO: 2303 - RNA, 21 nt, synthetic construct
  source 1..21: mol_type = other RNA
tgctacacgacaaatccaaga

SEQ ID NO: 2304 - RNA, 21 nt, synthetic construct
  source 1..21: mol_type = other RNA
gctacacgacaaatccaagaa

SEQ ID NO: 2305 - RNA, 21 nt, synthetic construct
  source 1..21: mol_type = other RNA
ctacacgacaaatccaagaaa

SEQ ID NO: 2306 - RNA, 21 nt, synthetic construct
  source 1..21: mol_type = other RNA
tacacgacaaatccaagaaaa

SEQ ID NO: 2307 - RNA, 21 nt, synthetic construct
  source 1..21: mol_type = other RNA
acacgacaaatccaagaaaaa

SEQ ID NO: 2308 - RNA, 21 nt, synthetic construct
  source 1..21: mol_type = other RNA
cacgacaaatccaagaaaaca

SEQ ID NO: 2309 - RNA, 21 nt, synthetic construct
  source 1..21: mol_type = other RNA
acgacaaatccaagaaaacta

SEQ ID NO: 2310 - RNA, 21 nt, synthetic construct
  source 1..21: mol_type = other RNA
cgacaaatccaagaaaactta

SEQ ID NO: 2311 - RNA, 21 nt, synthetic construct
  source 1..21: mol_type = other RNA
gacaaatccaagaaaacttta

SEQ ID NO: 2312 - RNA, 21 nt, synthetic construct
  source 1..21: mol_type = other RNA
acaaatccaagaaaactttaa

SEQ ID NO: 2313 - RNA, 21 nt, synthetic construct
  source 1..21: mol_type = other RNA
caaatccaagaaaactttaca

SEQ ID NO: 2314 - RNA, 21 nt, synthetic construct
  source 1..21: mol_type = other RNA
aaatccaagaaaactttacga

SEQ ID NO: 2315 - RNA, 21 nt, synthetic construct
  source 1..21: mol_type = other RNA
aatccaagaaaactttacgaa

SEQ ID NO: 2316 - RNA, 21 nt, synthetic construct
  source 1..21: mol_type = other RNA
atccaagaaaactttacgaca

SEQ ID NO: 2317 - RNA, 21 nt, synthetic construct
  source 1..21: mol_type = other RNA
tccaagaaaactttacgacta

SEQ ID NO: 2318 - RNA, 21 nt, synthetic construct
  source 1..21: mol_type = other RNA
ccaagaaaactttacgactaa

SEQ ID NO: 2319 - RNA, 21 nt, synthetic construct
  source 1..21: mol_type = other RNA
aagaaaactttacgactacta

SEQ ID NO: 2320 - RNA, 21 nt, synthetic construct
  source 1..21: mol_type = other RNA
agaaaactttacgactactga

SEQ ID NO: 2321 - RNA, 21 nt, synthetic construct
  source 1..21: mol_type = other RNA
gaaaactttacgactactgta

SEQ ID NO: 2322 - RNA, 21 nt, synthetic construct
  source 1..21: mol_type = other RNA
aaaactttacgactactgtga

SEQ ID NO: 2323 - RNA, 21 nt, synthetic construct
  source 1..21: mol_type = other RNA
aaactttacgactactgtgaa

SEQ ID NO: 2324 - RNA, 21 nt, synthetic construct
  source 1..21: mol_type = other RNA
aactttacgactactgtgata

SEQ ID NO: 2325 - RNA, 21 nt, synthetic construct
  source 1..21: mol_type = other RNA
actttacgactactgtgatga

SEQ ID NO: 2326 - RNA, 21 nt, synthetic construct
  source 1..21: mol_type = other RNA
ctttacgactactgtgatgta

SEQ ID NO: 2327 - RNA, 21 nt, synthetic construct
  source 1..21: mol_type = other RNA
tttacgactactgtgatgtca

SEQ ID NO: 2328 - RNA, 21 nt, synthetic construct
  source 1..21: mol_type = other RNA
gactactgtgatgtccctcaa

SEQ ID NO: 2329 - RNA, 21 nt, synthetic construct
  source 1..21: mol_type = other RNA
ctgtgatgtccctcagtgtga

SEQ ID NO: 2330 - RNA, 21 nt, synthetic construct
  source 1..21: mol_type = other RNA
atgtccctcagtgtgcggcca

SEQ ID NO: 2331 - RNA, 21 nt, synthetic construct
  source 1..21: mol_type = other RNA
aagaaatgtcctggaagggta

SEQ ID NO: 2332 - RNA, 21 nt, synthetic construct
  source 1..21: mol_type = other RNA
gccctggcaagtcagtcttaa

SEQ ID NO: 2333 - RNA, 21 nt, synthetic construct
  source 1..21: mol_type = other RNA
cctggcaagtcagtcttagaa

SEQ ID NO: 2334 - RNA, 21 nt, synthetic construct
  source 1..21: mol_type = other RNA
ctggcaagtcagtcttagaaa

SEQ ID NO: 2335 - RNA, 21 nt, synthetic construct
  source 1..21: mol_type = other RNA
tggcaagtcagtcttagaaca

SEQ ID NO: 2336 - RNA, 21 nt, synthetic construct
  source 1..21: mol_type = other RNA
ggcaagtcagtcttagaacaa

SEQ ID NO: 2337 - RNA, 21 nt, synthetic construct
  source 1..21: mol_type = other RNA
gcaagtcagtcttagaacaaa

SEQ ID NO: 2338 - RNA, 21 nt, synthetic construct
  source 1..21: mol_type = other RNA
caagtcagtcttagaacaaga

SEQ ID NO: 2339 - RNA, 21 nt, synthetic construct
  source 1..21: mol_type = other RNA
aagtcagtcttagaacaagga

SEQ ID NO: 2340 - RNA, 21 nt, synthetic construct
  source 1..21: mol_type = other RNA
agtcagtcttagaacaaggta

SEQ ID NO: 2341 - RNA, 21 nt, synthetic construct
  source 1..21: mol_type = other RNA
gtcagtcttagaacaaggtta

SEQ ID NO: 2342 - RNA, 21 nt, synthetic construct
  source 1..21: mol_type = other RNA
tcagtcttagaacaaggttta

SEQ ID NO: 2343 - RNA, 21 nt, synthetic construct
  source 1..21: mol_type = other RNA
cagtcttagaacaaggtttga

SEQ ID NO: 2344 - RNA, 21 nt, synthetic construct
  source 1..21: mol_type = other RNA
agtcttagaacaaggtttgga

SEQ ID NO: 2345 - RNA, 21 nt, synthetic construct
  source 1..21: mol_type = other RNA
gtcttagaacaaggtttggaa

SEQ ID NO: 2346 - RNA, 21 nt, synthetic construct
  source 1..21: mol_type = other RNA
tcttagaacaaggtttggaaa

SEQ ID NO: 2347 - RNA, 21 nt, synthetic construct
  source 1..21: mol_type = other RNA
cttagaacaaggtttggaata

SEQ ID NO: 2348 - RNA, 21 nt, synthetic construct
  source 1..21: mol_type = other RNA
ttagaacaaggtttggaatga

SEQ ID NO: 2349 - RNA, 21 nt, synthetic construct
  source 1..21: mol_type = other RNA
tagaacaaggtttggaatgca

SEQ ID NO: 2350 - RNA, 21 nt, synthetic construct
  source 1..21: mol_type = other RNA
agaacaaggtttggaatgcaa

SEQ ID NO: 2351 - RNA, 21 nt, synthetic construct
  source 1..21: mol_type = other RNA
gaacaaggtttggaatgcaca

SEQ ID NO: 2352 - RNA, 21 nt, synthetic construct
  source 1..21: mol_type = other RNA
aacaaggtttggaatgcacta

SEQ ID NO: 2353 - RNA, 21 nt, synthetic construct
  source 1..21: mol_type = other RNA
acaaggtttggaatgcactta

SEQ ID NO: 2354 - RNA, 21 nt, synthetic construct
  source 1..21: mol_type = other RNA
caaggtttggaatgcacttca

SEQ ID NO: 2355 - RNA, 21 nt, synthetic construct
  source 1..21: mol_type = other RNA
aaggtttggaatgcacttcta

SEQ ID NO: 2356 - RNA, 21 nt, synthetic construct
  source 1..21: mol_type = other RNA
aggtttggaatgcacttctga

SEQ ID NO: 2357 - RNA, 21 nt, synthetic construct
  source 1..21: mol_type = other RNA
ggtttggaatgcacttctgta

SEQ ID NO: 2358 - RNA, 21 nt, synthetic construct
  source 1..21: mol_type = other RNA
ttggaatgcacttctgtggaa

SEQ ID NO: 2359 - RNA, 21 nt, synthetic construct
  source 1..21: mol_type = other RNA
tggaatgcacttctgtggaga

SEQ ID NO: 2360 - RNA, 21 nt, synthetic construct
  source 1..21: mol_type = other RNA
gaatgcacttctgtggaggca

SEQ ID NO: 2361 - RNA, 21 nt, synthetic construct
  source 1..21: mol_type = other RNA
ctgtggaggcaccttgatata

SEQ ID NO: 2362 - RNA, 21 nt, synthetic construct
  source 1..21: mol_type = other RNA
tgtggaggcaccttgatatca

SEQ ID NO: 2363 - RNA, 21 nt, synthetic construct
  source 1..21: mol_type = other RNA
gtggaggcaccttgatatcca

SEQ ID NO: 2364 - RNA, 21 nt, synthetic construct
  source 1..21: mol_type = other RNA
ttgactgctgcccactgctta

SEQ ID NO: 2365 - RNA, 21 nt, synthetic construct
  source 1..21: mol_type = other RNA
tgactgctgcccactgcttga

SEQ ID NO: 2366 - RNA, 21 nt, synthetic construct
  source 1..21: mol_type = other RNA
actgctgcccactgcttggaa

SEQ ID NO: 2367 - RNA, 21 nt, synthetic construct
  source 1..21: mol_type = other RNA
ctgctgcccactgcttggaga

SEQ ID NO: 2368 - RNA, 21 nt, synthetic construct
  source 1..21: mol_type = other RNA
tgctgcccactgcttggagaa

SEQ ID NO: 2369 - RNA, 21 nt, synthetic construct
  source 1..21: mol_type = other RNA
ctgcccactgcttggagaaga

SEQ ID NO: 2370 - RNA, 21 nt, synthetic construct
  source 1..21: mol_type = other RNA
tgcccactgcttggagaagta

SEQ ID NO: 2371 - RNA, 21 nt, synthetic construct
  source 1..21: mol_type = other RNA
cccactgcttggagaagtcca

SEQ ID NO: 2372 - RNA, 21 nt, synthetic construct
  source 1..21: mol_type = other RNA
gtgcacaccaagaagtgaata

SEQ ID NO: 2373 - RNA, 21 nt, synthetic construct
  source 1..21: mol_type = other RNA
gcacaccaagaagtgaatcta

SEQ ID NO: 2374 - RNA, 21 nt, synthetic construct
  source 1..21: mol_type = other RNA
acaccaagaagtgaatctcga

SEQ ID NO: 2375 - RNA, 21 nt, synthetic construct
  source 1..21: mol_type = other RNA
caccaagaagtgaatctcgaa

SEQ ID NO: 2376 - RNA, 21 nt, synthetic construct
  source 1..21: mol_type = other RNA
accaagaagtgaatctcgaaa

SEQ ID NO: 2377 - RNA, 21 nt, synthetic construct
  source 1..21: mol_type = other RNA
tgaatctcgaaccgcatgtta

SEQ ID NO: 2378 - RNA, 21 nt, synthetic construct
  source 1..21: mol_type = other RNA
aatctcgaaccgcatgttcaa

SEQ ID NO: 2379 - RNA, 21 nt, synthetic construct
  source 1..21: mol_type = other RNA
cgaaccgcatgttcaggaaaa

SEQ ID NO: 2380 - RNA, 21 nt, synthetic construct
  source 1..21: mol_type = other RNA
gaaccgcatgttcaggaaata

SEQ ID NO: 2381 - RNA, 21 nt, synthetic construct
  source 1..21: mol_type = other RNA
aaccgcatgttcaggaaataa

SEQ ID NO: 2382 - RNA, 21 nt, synthetic construct
  source 1..21: mol_type = other RNA
accgcatgttcaggaaataga

SEQ ID NO: 2383 - RNA, 21 nt, synthetic construct
  source 1..21: mol_type = other RNA
ccgcatgttcaggaaatagaa

SEQ ID NO: 2384 - RNA, 21 nt, synthetic construct
  source 1..21: mol_type = other RNA
ttggagcccacacgaaaagaa

SEQ ID NO: 2385 - RNA, 21 nt, synthetic construct
  source 1..21: mol_type = other RNA
tggagcccacacgaaaagata

SEQ ID NO: 2386 - RNA, 21 nt, synthetic construct
  source 1..21: mol_type = other RNA
gagcccacacgaaaagatata

SEQ ID NO: 2387 - RNA, 21 nt, synthetic construct
  source 1..21: mol_type = other RNA
agcccacacgaaaagatatta

SEQ ID NO: 2388 - RNA, 21 nt, synthetic construct
  source 1..21: mol_type = other RNA
gcccacacgaaaagatattga

SEQ ID NO: 2389 - RNA, 21 nt, synthetic construct
  source 1..21: mol_type = other RNA
cccacacgaaaagatattgca

SEQ ID NO: 2390 - RNA, 21 nt, synthetic construct
  source 1..21: mol_type = other RNA
ccacacgaaaagatattgcca

SEQ ID NO: 2391 - RNA, 21 nt, synthetic construct
  source 1..21: mol_type = other RNA
cacacgaaaagatattgccta

SEQ ID NO: 2392 - RNA, 21 nt, synthetic construct
  source 1..21: mol_type = other RNA
acacgaaaagatattgcctta

SEQ ID NO: 2393 - RNA, 21 nt, synthetic construct
  source 1..21: mol_type = other RNA
cacgaaaagatattgccttga

SEQ ID NO: 2394 - RNA, 21 nt, synthetic construct
  source 1..21: mol_type = other RNA
acgaaaagatattgccttgca

SEQ ID NO: 2395 - RNA, 21 nt, synthetic construct
  source 1..21: mol_type = other RNA
cgaaaagatattgccttgcta

SEQ ID NO: 2396 - RNA, 21 nt, synthetic construct
  source 1..21: mol_type = other RNA
gaaaagatattgccttgctaa

SEQ ID NO: 2397 - RNA, 21 nt, synthetic construct
  source 1..21: mol_type = other RNA
aaaagatattgccttgctaaa

SEQ ID NO: 2398 - RNA, 21 nt, synthetic construct
  source 1..21: mol_type = other RNA
aaagatattgccttgctaaaa

SEQ ID NO: 2399 - RNA, 21 nt, synthetic construct
  source 1..21: mol_type = other RNA
aagatattgccttgctaaaga

SEQ ID NO: 2400 - RNA, 21 nt, synthetic construct
  source 1..21: mol_type = other RNA
agatattgccttgctaaagca

SEQ ID NO: 2401 - RNA, 21 nt, synthetic construct
  source 1..21: mol_type = other RNA
gatattgccttgctaaagcta

SEQ ID NO: 2402 - RNA, 21 nt, synthetic construct
  source 1..21: mol_type = other RNA
atattgccttgctaaagctaa

SEQ ID NO: 2403 - RNA, 21 nt, synthetic construct
  source 1..21: mol_type = other RNA
tattgccttgctaaagctaaa

SEQ ID NO: 2404 - RNA, 21 nt, synthetic construct
  source 1..21: mol_type = other RNA
ccttgctaaagctaagcagta

SEQ ID NO: 2405 - RNA, 21 nt, synthetic construct
  source 1..21: mol_type = other RNA
cttgctaaagctaagcagtca

SEQ ID NO: 2406 - RNA, 21 nt, synthetic construct
  source 1..21: mol_type = other RNA
tgctaaagctaagcagtccta

SEQ ID NO: 2407 - RNA, 21 nt, synthetic construct
  source 1..21: mol_type = other RNA
ctaagcagtcctgccgtcata

SEQ ID NO: 2408 - RNA, 21 nt, synthetic construct
  source 1..21: mol_type = other RNA
agcagtcctgccgtcatcaca

SEQ ID NO: 2409 - RNA, 21 nt, synthetic construct
  source 1..21: mol_type = other RNA
gcagtcctgccgtcatcacta

SEQ ID NO: 2410 - RNA, 21 nt, synthetic construct
  source 1..21: mol_type = other RNA
cagtcctgccgtcatcactga

SEQ ID NO: 2411 - RNA, 21 nt, synthetic construct
  source 1..21: mol_type = other RNA
tcatcactgacaaagtaatca

SEQ ID NO: 2412 - RNA, 21 nt, synthetic construct
  source 1..21: mol_type = other RNA
catcactgacaaagtaatcca

SEQ ID NO: 2413 - RNA, 21 nt, synthetic construct
  source 1..21: mol_type = other RNA
atcactgacaaagtaatccca

SEQ ID NO: 2414 - RNA, 21 nt, synthetic construct
  source 1..21: mol_type = other RNA
tcactgacaaagtaatcccaa

SEQ ID NO: 2415 - RNA, 21 nt, synthetic construct
  source 1..21: mol_type = other RNA
cactgacaaagtaatcccaga

SEQ ID NO: 2416 - RNA, 21 nt, synthetic construct
  source 1..21: mol_type = other RNA
actgacaaagtaatcccagca

SEQ ID NO: 2417 - RNA, 21 nt, synthetic construct
  source 1..21: mol_type = other RNA
ctgacaaagtaatcccagcta

SEQ ID NO: 2418 - RNA, 21 nt, synthetic construct
  source 1..21: mol_type = other RNA
tgacaaagtaatcccagctta

SEQ ID NO: 2419 - RNA, 21 nt, synthetic construct
  source 1..21: mol_type = other RNA
gacaaagtaatcccagcttga

SEQ ID NO: 2420 - RNA, 21 nt, synthetic construct
  source 1..21: mol_type = other RNA
acaaagtaatcccagcttgta

SEQ ID NO: 2421 - RNA, 21 nt, synthetic construct
  source 1..21: mol_type = other RNA
caaagtaatcccagcttgtca

SEQ ID NO: 2422 - RNA, 21 nt, synthetic construct
  source 1..21: mol_type = other RNA
aaagtaatcccagcttgtcta

SEQ ID NO: 2423 - RNA, 21 nt, synthetic construct
  source 1..21: mol_type = other RNA
taatcccagcttgtctgccaa

SEQ ID NO: 2424 - RNA, 21 nt, synthetic construct
  source 1..21: mol_type = other RNA
atcccagcttgtctgccatca

SEQ ID NO: 2425 - RNA, 21 nt, synthetic construct
  source 1..21: mol_type = other RNA
ctgaccggaccgaatgtttca

SEQ ID NO: 2426 - RNA, 21 nt, synthetic construct
  source 1..21: mol_type = other RNA
gaccggaccgaatgtttcata

SEQ ID NO: 2427 - RNA, 21 nt, synthetic construct
  source 1..21: mol_type = other RNA
accggaccgaatgtttcatca

SEQ ID NO: 2428 - RNA, 21 nt, synthetic construct
  source 1..21: mol_type = other RNA
ccggaccgaatgtttcatcaa

SEQ ID NO: 2429 - RNA, 21 nt, synthetic construct
  source 1..21: mol_type = other RNA
cggaccgaatgtttcatcaca

SEQ ID NO: 2430 - RNA, 21 nt, synthetic construct
  source 1..21: mol_type = other RNA
ggaccgaatgtttcatcacta

SEQ ID NO: 2431 - RNA, 21 nt, synthetic construct
  source 1..21: mol_type = other RNA
gaccgaatgtttcatcactga

SEQ ID NO: 2432 - RNA, 21 nt, synthetic construct
  source 1..21: mol_type = other RNA
cgaatgtttcatcactggcta

SEQ ID NO: 2433 - RNA, 21 nt, synthetic construct
  source 1..21: mol_type = other RNA
gagaaacccaaggtactttta

SEQ ID NO: 2434 - RNA, 21 nt, synthetic construct
  source 1..21: mol_type = other RNA
agaaacccaaggtacttttga

SEQ ID NO: 2435 - RNA, 21 nt, synthetic construct
  source 1..21: mol_type = other RNA
gaaacccaaggtacttttgga

SEQ ID NO: 2436 - RNA, 21 nt, synthetic construct
  source 1..21: mol_type = other RNA
aaacccaaggtacttttggaa

SEQ ID NO: 2437 - RNA, 21 nt, synthetic construct
  source 1..21: mol_type = other RNA
aacccaaggtacttttggaga

SEQ ID NO: 2438 - RNA, 21 nt, synthetic construct
  source 1..21: mol_type = other RNA
acccaaggtacttttggagca

SEQ ID NO: 2439 - RNA, 21 nt, synthetic construct
  source 1..21: mol_type = other RNA
cccaaggtacttttggagcta

SEQ ID NO: 2440 - RNA, 21 nt, synthetic construct
  source 1..21: mol_type = other RNA
caaggtacttttggagctgga

SEQ ID NO: 2441 - RNA, 21 nt, synthetic construct
  source 1..21: mol_type = other RNA
acttttggagctggccttcta

SEQ ID NO: 2442 - RNA, 21 nt, synthetic construct
  source 1..21: mol_type = other RNA
tttggagctggccttctcaaa

SEQ ID NO: 2443 - RNA, 21 nt, synthetic construct
  source 1..21: mol_type = other RNA
ttggagctggccttctcaaga

SEQ ID NO: 2444 - RNA, 21 nt, synthetic construct
  source 1..21: mol_type = other RNA
tggagctggccttctcaagga

SEQ ID NO: 2445 - RNA, 21 nt, synthetic construct
  source 1..21: mol_type = other RNA
ggagctggccttctcaaggaa

SEQ ID NO: 2446 - RNA, 21 nt, synthetic construct
  source 1..21: mol_type = other RNA
ggaagcccagctccctgtgaa

SEQ ID NO: 2447 - RNA, 21 nt, synthetic construct
  source 1..21: mol_type = other RNA
gaagcccagctccctgtgata

SEQ ID NO: 2448 - RNA, 21 nt, synthetic construct
  source 1..21: mol_type = other RNA
aagcccagctccctgtgatta

SEQ ID NO: 2449 - RNA, 21 nt, synthetic construct
  source 1..21: mol_type = other RNA
agcccagctccctgtgattga

SEQ ID NO: 2450 - RNA, 21 nt, synthetic construct
  source 1..21: mol_type = other RNA
gcccagctccctgtgattgaa

SEQ ID NO: 2451 - RNA, 21 nt, synthetic construct
  source 1..21: mol_type = other RNA
cccagctccctgtgattgaga

SEQ ID NO: 2452 - RNA, 21 nt, synthetic construct
  source 1..21: mol_type = other RNA
ccagctccctgtgattgagaa

SEQ ID NO: 2453 - RNA, 21 nt, synthetic construct
  source 1..21: mol_type = other RNA
cagctccctgtgattgagaaa

SEQ ID NO: 2454 - RNA, 21 nt, synthetic construct
  source 1..21: mol_type = other RNA
agctccctgtgattgagaata

SEQ ID NO: 2455 - RNA, 21 nt, synthetic construct
  source 1..21: mol_type = other RNA
gctccctgtgattgagaataa

SEQ ID NO: 2456 - RNA, 21 nt, synthetic construct
  source 1..21: mol_type = other RNA
ctccctgtgattgagaataaa

SEQ ID NO: 2457 - RNA, 21 nt, synthetic construct
  source 1..21: mol_type = other RNA
tccctgtgattgagaataaaa

SEQ ID NO: 2458 - RNA, 21 nt, synthetic construct
  source 1..21: mol_type = other RNA
ccctgtgattgagaataaaga

SEQ ID NO: 2459 - RNA, 21 nt, synthetic construct
  source 1..21: mol_type = other RNA
cctgtgattgagaataaagta

SEQ ID NO: 2460 - RNA, 21 nt, synthetic construct
  source 1..21: mol_type = other RNA
ctgtgattgagaataaagtga

SEQ ID NO: 2461 - RNA, 21 nt, synthetic construct
  source 1..21: mol_type = other RNA
tgtgattgagaataaagtgta

SEQ ID NO: 2462 - RNA, 21 nt, synthetic construct
  source 1..21: mol_type = other RNA
gtgattgagaataaagtgtga

SEQ ID NO: 2463 - RNA, 21 nt, synthetic construct
  source 1..21: mol_type = other RNA
tgattgagaataaagtgtgca

SEQ ID NO: 2464 - RNA, 21 nt, synthetic construct
  source 1..21: mol_type = other RNA
gattgagaataaagtgtgcaa

SEQ ID NO: 2465 - RNA, 21 nt, synthetic construct
  source 1..21: mol_type = other RNA
attgagaataaagtgtgcaaa

SEQ ID NO: 2466 - RNA, 21 nt, synthetic construct
  source 1..21: mol_type = other RNA
ttgagaataaagtgtgcaata

SEQ ID NO: 2467 - RNA, 21 nt, synthetic construct
  source 1..21: mol_type = other RNA
tgagaataaagtgtgcaatca

SEQ ID NO: 2468 - RNA, 21 nt, synthetic construct
  source 1..21: mol_type = other RNA
gagaataaagtgtgcaatcga

SEQ ID NO: 2469 - RNA, 21 nt, synthetic construct
  source 1..21: mol_type = other RNA
gaataaagtgtgcaatcgcta

SEQ ID NO: 2470 - RNA, 21 nt, synthetic construct
  source 1..21: mol_type = other RNA
aataaagtgtgcaatcgctaa

SEQ ID NO: 2471 - RNA, 21 nt, synthetic construct
  source 1..21: mol_type = other RNA
ataaagtgtgcaatcgctata

SEQ ID NO: 2472 - RNA, 21 nt, synthetic construct
  source 1..21: mol_type = other RNA
taaagtgtgcaatcgctatga

SEQ ID NO: 2473 - RNA, 21 nt, synthetic construct
  source 1..21: mol_type = other RNA
aaagtgtgcaatcgctatgaa

SEQ ID NO: 2474 - RNA, 21 nt, synthetic construct
  source 1..21: mol_type = other RNA
aagtgtgcaatcgctatgaga

SEQ ID NO: 2475 - RNA, 21 nt, synthetic construct
  source 1..21: mol_type = other RNA
agtgtgcaatcgctatgagta

SEQ ID NO: 2476 - RNA, 21 nt, synthetic construct
  source 1..21: mol_type = other RNA
gtgtgcaatcgctatgagtta

SEQ ID NO: 2477 - RNA, 21 nt, synthetic construct
  source 1..21: mol_type = other RNA
tgtgcaatcgctatgagttta

SEQ ID NO: 2478 - RNA, 21 nt, synthetic construct
  source 1..21: mol_type = other RNA
gtgcaatcgctatgagtttca

SEQ ID NO: 2479 - RNA, 21 nt, synthetic construct
  source 1..21: mol_type = other RNA
tgcaatcgctatgagtttcta

SEQ ID NO: 2480 - RNA, 21 nt, synthetic construct
  source 1..21: mol_type = other RNA
caatcgctatgagtttctgaa

SEQ ID NO: 2481 - RNA, 21 nt, synthetic construct
  source 1..21: mol_type = other RNA
aatcgctatgagtttctgaaa

SEQ ID NO: 2482 - RNA, 21 nt, synthetic construct
  source 1..21: mol_type = other RNA
atcgctatgagtttctgaata

SEQ ID NO: 2483 - RNA, 21 nt, synthetic construct
  source 1..21: mol_type = other RNA
tcgctatgagtttctgaatga

SEQ ID NO: 2484 - RNA, 21 nt, synthetic construct
  source 1..21: mol_type = other RNA
cgctatgagtttctgaatgga

SEQ ID NO: 2485 - RNA, 21 nt, synthetic construct
  source 1..21: mol_type = other RNA
gctatgagtttctgaatggaa

SEQ ID NO: 2486 - RNA, 21 nt, synthetic construct
  source 1..21: mol_type = other RNA
ctatgagtttctgaatggaaa

SEQ ID NO: 2487 - RNA, 21 nt, synthetic construct
  source 1..21: mol_type = other RNA
tatgagtttctgaatggaaga

SEQ ID NO: 2488 - RNA, 21 nt, synthetic construct
  source 1..21: mol_type = other RNA
atgagtttctgaatggaagaa

SEQ ID NO: 2489 - RNA, 21 nt, synthetic construct
  source 1..21: mol_type = other RNA
tgagtttctgaatggaagaga

SEQ ID NO: 2490 - RNA, 21 nt, synthetic construct
  source 1..21: mol_type = other RNA
gagtttctgaatggaagagta

SEQ ID NO: 2491 - RNA, 21 nt, synthetic construct
  source 1..21: mol_type = other RNA
gtttctgaatggaagagtcca

SEQ ID NO: 2492 - RNA, 21 nt, synthetic construct
  source 1..21: mol_type = other RNA
tttctgaatggaagagtccaa

SEQ ID NO: 2493 - RNA, 21 nt, synthetic construct
  source 1..21: mol_type = other RNA
ttctgaatggaagagtccaaa

SEQ ID NO: 2494 - RNA, 21 nt, synthetic construct
  source 1..21: mol_type = other RNA
tctgaatggaagagtccaata

SEQ ID NO: 2495 - RNA, 21 nt, synthetic construct
  source 1..21: mol_type = other RNA
ctgaatggaagagtccaatca

SEQ ID NO: 2496 - RNA, 21 nt, synthetic construct
  source 1..21: mol_type = other RNA
gaatggaagagtccaatccaa

SEQ ID NO: 2497 - RNA, 21 nt, synthetic construct
  source 1..21: mol_type = other RNA
gaactctgtgctgggcattta

SEQ ID NO: 2498 - RNA, 21 nt, synthetic construct
  source 1..21: mol_type = other RNA
aactctgtgctgggcatttga

SEQ ID NO: 2499 - RNA, 21 nt, synthetic construct
  source 1..21: mol_type = other RNA
ctctgtgctgggcatttggca

SEQ ID NO: 2500 - RNA, 21 nt, synthetic construct
  source 1..21: mol_type = other RNA
tctgtgctgggcatttggcca

SEQ ID NO: 2501 - RNA, 21 nt, synthetic construct
  source 1..21: mol_type = other RNA
tgtgctgggcatttggccgga

SEQ ID NO: 2502 - RNA, 21 nt, synthetic construct
  source 1..21: mol_type = other RNA
gtgctgggcatttggccggaa

SEQ ID NO: 2503 - RNA, 21 nt, synthetic construct
  source 1..21: mol_type = other RNA
tgctgggcatttggccggaga

SEQ ID NO: 2504 - RNA, 21 nt, synthetic construct
  source 1..21: mol_type = other RNA
cttcgagaaggacaaatacaa

SEQ ID NO: 2505 - RNA, 21 nt, synthetic construct
  source 1..21: mol_type = other RNA
ttcgagaaggacaaatacata

SEQ ID NO: 2506 - RNA, 21 nt, synthetic construct
  source 1..21: mol_type = other RNA
tcgagaaggacaaatacatta

SEQ ID NO: 2507 - RNA, 21 nt, synthetic construct
  source 1..21: mol_type = other RNA
cgagaaggacaaatacattta

SEQ ID NO: 2508 - RNA, 21 nt, synthetic construct
  source 1..21: mol_type = other RNA
gagaaggacaaatacatttta

SEQ ID NO: 2509 - RNA, 21 nt, synthetic construct
  source 1..21: mol_type = other RNA
agaaggacaaatacattttaa

SEQ ID NO: 2510 - RNA, 21 nt, synthetic construct
  source 1..21: mol_type = other RNA
gaaggacaaatacattttaca

SEQ ID NO: 2511 - RNA, 21 nt, synthetic construct
  source 1..21: mol_type = other RNA
aaggacaaatacattttacaa

SEQ ID NO: 2512 - RNA, 21 nt, synthetic construct
  source 1..21: mol_type = other RNA
aggacaaatacattttacaaa

SEQ ID NO: 2513 - RNA, 21 nt, synthetic construct
  source 1..21: mol_type = other RNA
ggacaaatacattttacaaga

SEQ ID NO: 2514 - RNA, 21 nt, synthetic construct
  source 1..21: mol_type = other RNA
gacaaatacattttacaagga

SEQ ID NO: 2515 - RNA, 21 nt, synthetic construct
  source 1..21: mol_type = other RNA
acaaatacattttacaaggaa

SEQ ID NO: 2516 - RNA, 21 nt, synthetic construct
  source 1..21: mol_type = other RNA
aataagcctggtgtctatgta

SEQ ID NO: 2517 - RNA, 21 nt, synthetic construct
  source 1..21: mol_type = other RNA
ataagcctggtgtctatgtta

SEQ ID NO: 2518 - RNA, 21 nt, synthetic construct
  source 1..21: mol_type = other RNA
taagcctggtgtctatgttca

SEQ ID NO: 2519 - RNA, 21 nt, synthetic construct
  source 1..21: mol_type = other RNA
agcctggtgtctatgttcgta

SEQ ID NO: 2520 - RNA, 21 nt, synthetic construct
  source 1..21: mol_type = other RNA
cctggtgtctatgttcgtgta

SEQ ID NO: 2521 - RNA, 21 nt, synthetic construct
  source 1..21: mol_type = other RNA
ctggtgtctatgttcgtgtta

SEQ ID NO: 2522 - RNA, 21 nt, synthetic construct
  source 1..21: mol_type = other RNA
tggtgtctatgttcgtgttta

SEQ ID NO: 2523 - RNA, 21 nt, synthetic construct
  source 1..21: mol_type = other RNA
ggtgtctatgttcgtgtttca

SEQ ID NO: 2524 - RNA, 21 nt, synthetic construct
  source 1..21: mol_type = other RNA
gtgtctatgttcgtgtttcaa

SEQ ID NO: 2525 - RNA, 21 nt, synthetic construct
  source 1..21: mol_type = other RNA
tgtctatgttcgtgtttcaaa

SEQ ID NO: 2526 - RNA, 21 nt, synthetic construct
  source 1..21: mol_type = other RNA
gtctatgttcgtgtttcaaga

SEQ ID NO: 2527 - RNA, 21 nt, synthetic construct
  source 1..21: mol_type = other RNA
tctatgttcgtgtttcaagga

SEQ ID NO: 2528 - RNA, 21 nt, synthetic construct
  source 1..21: mol_type = other RNA
ctatgttcgtgtttcaaggta

SEQ ID NO: 2529 - RNA, 21 nt, synthetic construct
  source 1..21: mol_type = other RNA
tatgttcgtgtttcaaggtta

SEQ ID NO: 2530 - RNA, 21 nt, synthetic construct
  source 1..21: mol_type = other RNA
atgttcgtgtttcaaggttta

SEQ ID NO: 2531 - RNA, 21 nt, synthetic construct
  source 1..21: mol_type = other RNA
tgttcgtgtttcaaggtttga

SEQ ID NO: 2532 - RNA, 21 nt, synthetic construct
  source 1..21: mol_type = other RNA
gttcgtgtttcaaggtttgta

SEQ ID NO: 2533 - RNA, 21 nt, synthetic construct
  source 1..21: mol_type = other RNA
ttcgtgtttcaaggtttgtta

SEQ ID NO: 2534 - RNA, 21 nt, synthetic construct
  source 1..21: mol_type = other RNA
tcgtgtttcaaggtttgttaa

SEQ ID NO: 2535 - RNA, 21 nt, synthetic construct
  source 1..21: mol_type = other RNA
cgtgtttcaaggtttgttaca

SEQ ID NO: 2536 - RNA, 21 nt, synthetic construct
  source 1..21: mol_type = other RNA
gtgtttcaaggtttgttacta

SEQ ID NO: 2537 - RNA, 21 nt, synthetic construct
  source 1..21: mol_type = other RNA
tgtttcaaggtttgttactta

SEQ ID NO: 2538 - RNA, 21 nt, synthetic construct
  source 1..21: mol_type = other RNA
gtttcaaggtttgttacttga

SEQ ID NO: 2539 - RNA, 21 nt, synthetic construct
  source 1..21: mol_type = other RNA
tttcaaggtttgttacttgga

SEQ ID NO: 2540 - RNA, 21 nt, synthetic construct
  source 1..21: mol_type = other RNA
ttcaaggtttgttacttggaa

SEQ ID NO: 2541 - RNA, 21 nt, synthetic construct
  source 1..21: mol_type = other RNA
tcaaggtttgttacttggata

SEQ ID NO: 2542 - RNA, 21 nt, synthetic construct
  source 1..21: mol_type = other RNA
tgttacttggattgagggaga

SEQ ID NO: 2543 - RNA, 21 nt, synthetic construct
  source 1..21: mol_type = other RNA
gttacttggattgagggagta

SEQ ID NO: 2544 - RNA, 21 nt, synthetic construct
  source 1..21: mol_type = other RNA
tacttggattgagggagtgaa

SEQ ID NO: 2545 - RNA, 21 nt, synthetic construct
  source 1..21: mol_type = other RNA
acttggattgagggagtgata

SEQ ID NO: 2546 - RNA, 21 nt, synthetic construct
  source 1..21: mol_type = other RNA
cttggattgagggagtgatga

SEQ ID NO: 2547 - RNA, 21 nt, synthetic construct
  source 1..21: mol_type = other RNA
ttggattgagggagtgatgaa

SEQ ID NO: 2548 - RNA, 21 nt, synthetic construct
  source 1..21: mol_type = other RNA
tggattgagggagtgatgaga

SEQ ID NO: 2549 - RNA, 21 nt, synthetic construct
  source 1..21: mol_type = other RNA
ggattgagggagtgatgagaa

SEQ ID NO: 2550 - RNA, 21 nt, synthetic construct
  source 1..21: mol_type = other RNA
gattgagggagtgatgagaaa

SEQ ID NO: 2551 - RNA, 21 nt, synthetic construct
  source 1..21: mol_type = other RNA
attgagggagtgatgagaaaa

SEQ ID NO: 2552 - RNA, 21 nt, synthetic construct
  source 1..21: mol_type = other RNA
ttgagggagtgatgagaaata

SEQ ID NO: 2553 - RNA, 21 nt, synthetic construct
  source 1..21: mol_type = other RNA
tgagggagtgatgagaaataa

SEQ ID NO: 2554 - RNA, 21 nt, synthetic construct
  source 1..21: mol_type = other RNA
gagggagtgatgagaaataaa

SEQ ID NO: 2555 - RNA, 21 nt, synthetic construct
  source 1..21: mol_type = other RNA
gggagtgatgagaaataatta

SEQ ID NO: 2556 - RNA, 21 nt, synthetic construct
  source 1..21: mol_type = other RNA
gagtgatgagaaataattaaa

SEQ ID NO: 2557 - RNA, 21 nt, synthetic construct
  source 1..21: mol_type = other RNA
agtgatgagaaataattaata

SEQ ID NO: 2558 - RNA, 21 nt, synthetic construct
  source 1..21: mol_type = other RNA
gtgatgagaaataattaatta

SEQ ID NO: 2559 - RNA, 21 nt, synthetic construct
  source 1..21: mol_type = other RNA
tgatgagaaataattaattga

SEQ ID NO: 2560 - RNA, 21 nt, synthetic construct
  source 1..21: mol_type = other RNA
gatgagaaataattaattgga

SEQ ID NO: 2561 - RNA, 21 nt, synthetic construct
  source 1..21: mol_type = other RNA
atgagaaataattaattggaa

SEQ ID NO: 2562 - RNA, 21 nt, synthetic construct
  source 1..21: mol_type = other RNA
tggacgggagacagagtgaca

SEQ ID NO: 2563 - RNA, 21 nt, synthetic construct
  source 1..21: mol_type = other RNA
ggacgggagacagagtgacga

SEQ ID NO: 2564 - RNA, 21 nt, synthetic construct
  source 1..21: mol_type = other RNA
gacgggagacagagtgacgca

SEQ ID NO: 2565 - RNA, 21 nt, synthetic construct
  source 1..21: mol_type = other RNA
acgggagacagagtgacgcaa

SEQ ID NO: 2566 - RNA, 21 nt, synthetic construct
  source 1..21: mol_type = other RNA
agacagagtgacgcactgaca

SEQ ID NO: 2567 - RNA, 21 nt, synthetic construct
  source 1..21: mol_type = other RNA
acagagtgacgcactgactca

SEQ ID NO: 2568 - RNA, 21 nt, synthetic construct
  source 1..21: mol_type = other RNA
agagtgacgcactgactcaca

SEQ ID NO: 2569 - RNA, 21 nt, synthetic construct
  source 1..21: mol_type = other RNA
gagtgacgcactgactcacca

SEQ ID NO: 2570 - RNA, 21 nt, synthetic construct
  source 1..21: mol_type = other RNA
agtgacgcactgactcaccta

SEQ ID NO: 2571 - RNA, 21 nt, synthetic construct
  source 1..21: mol_type = other RNA
tgacgcactgactcacctaga

SEQ ID NO: 2572 - RNA, 21 nt, synthetic construct
  source 1..21: mol_type = other RNA
gacgcactgactcacctagaa

SEQ ID NO: 2573 - RNA, 21 nt, synthetic construct
  source 1..21: mol_type = other RNA
acgcactgactcacctagaga

SEQ ID NO: 2574 - RNA, 21 nt, synthetic construct
  source 1..21: mol_type = other RNA
cgcactgactcacctagagga

SEQ ID NO: 2575 - RNA, 21 nt, synthetic construct
  source 1..21: mol_type = other RNA
gcactgactcacctagaggca

SEQ ID NO: 2576 - RNA, 21 nt, synthetic construct
  source 1..21: mol_type = other RNA
cactgactcacctagaggcta

SEQ ID NO: 2577 - RNA, 21 nt, synthetic construct
  source 1..21: mol_type = other RNA
actgactcacctagaggctga

SEQ ID NO: 2578 - RNA, 21 nt, synthetic construct
  source 1..21: mol_type = other RNA
gaacgtgggtagggatttaga

SEQ ID NO: 2579 - RNA, 21 nt, synthetic construct
  source 1..21: mol_type = other RNA
acgtgggtagggatttagcaa

SEQ ID NO: 2580 - RNA, 21 nt, synthetic construct
  source 1..21: mol_type = other RNA
tgggtagggatttagcatgca

SEQ ID NO: 2581 - RNA, 21 nt, synthetic construct
  source 1..21: mol_type = other RNA
gggtagggatttagcatgcta

SEQ ID NO: 2582 - RNA, 21 nt, synthetic construct
  source 1..21: mol_type = other RNA
ggtagggatttagcatgctga

SEQ ID NO: 2583 - RNA, 21 nt, synthetic construct
  source 1..21: mol_type = other RNA
gtagggatttagcatgctgga

SEQ ID NO: 2584 - RNA, 21 nt, synthetic construct
  source 1..21: mol_type = other RNA
tagggatttagcatgctggaa

SEQ ID NO: 2585 - RNA, 21 nt, synthetic construct
  source 1..21: mol_type = other RNA
tttagcatgctggaaataaca

SEQ ID NO: 2586 - RNA, 21 nt, synthetic construct
  source 1..21: mol_type = other RNA
ttagcatgctggaaataacta

SEQ ID NO: 2587 - RNA, 21 nt, synthetic construct
  source 1..21: mol_type = other RNA
tagcatgctggaaataactga

SEQ ID NO: 2588 - RNA, 21 nt, synthetic construct
  source 1..21: mol_type = other RNA
agcatgctggaaataactgga

SEQ ID NO: 2589 - RNA, 21 nt, synthetic construct
  source 1..21: mol_type = other RNA
gcatgctggaaataactggca

SEQ ID NO: 2590 - RNA, 21 nt, synthetic construct
  source 1..21: mol_type = other RNA
catgctggaaataactggcaa

SEQ ID NO: 2591 - RNA, 21 nt, synthetic construct
  source 1..21: mol_type = other RNA
atgctggaaataactggcaga

SEQ ID NO: 2592 - RNA, 21 nt, synthetic construct
  source 1..21: mol_type = other RNA
tgctggaaataactggcagta

SEQ ID NO: 2593 - RNA, 21 nt, synthetic construct
  source 1..21: mol_type = other RNA
gctggaaataactggcagtaa

SEQ ID NO: 2594 - RNA, 21 nt, synthetic construct
  source 1..21: mol_type = other RNA
ctggaaataactggcagtaaa

SEQ ID NO: 2595 - RNA, 21 nt, synthetic construct
  source 1..21: mol_type = other RNA
tggaaataactggcagtaata

SEQ ID NO: 2596 - RNA, 21 nt, synthetic construct
  source 1..21: mol_type = other RNA
ggaaataactggcagtaatca

SEQ ID NO: 2597 - RNA, 21 nt, synthetic construct
  source 1..21: mol_type = other RNA
gaaataactggcagtaatcaa

SEQ ID NO: 2598 - RNA, 21 nt, synthetic construct
  source 1..21: mol_type = other RNA
aaataactggcagtaatcaaa

SEQ ID NO: 2599 - RNA, 21 nt, synthetic construct
  source 1..21: mol_type = other RNA
aataactggcagtaatcaaaa

SEQ ID NO: 2600 - RNA, 21 nt, synthetic construct
  source 1..21: mol_type = other RNA
ataactggcagtaatcaaaca

SEQ ID NO: 2601 - RNA, 21 nt, synthetic construct
  source 1..21: mol_type = other RNA
aactggcagtaatcaaacgaa

SEQ ID NO: 2602 - RNA, 21 nt, synthetic construct
  source 1..21: mol_type = other RNA
actggcagtaatcaaacgaaa

SEQ ID NO: 2603 - RNA, 21 nt, synthetic construct
  source 1..21: mol_type = other RNA
ctggcagtaatcaaacgaaga

SEQ ID NO: 2604 - RNA, 21 nt, synthetic construct
  source 1..21: mol_type = other RNA
tggcagtaatcaaacgaagaa

SEQ ID NO: 2605 - RNA, 21 nt, synthetic construct
  source 1..21: mol_type = other RNA
ggcagtaatcaaacgaagaca

SEQ ID NO: 2606 - RNA, 21 nt, synthetic construct
  source 1..21: mol_type = other RNA
gcagtaatcaaacgaagacaa

SEQ ID NO: 2607 - RNA, 21 nt, synthetic construct
  source 1..21: mol_type = other RNA
agtaatcaaacgaagacacta

SEQ ID NO: 2608 - RNA, 21 nt, synthetic construct
  source 1..21: mol_type = other RNA
aatcaaacgaagacactgtca

SEQ ID NO: 2609 - RNA, 21 nt, synthetic construct
  source 1..21: mol_type = other RNA
atcaaacgaagacactgtcca

SEQ ID NO: 2610 - RNA, 21 nt, synthetic construct
  source 1..21: mol_type = other RNA
acgccaaacctcggcatttta

SEQ ID NO: 2611 - RNA, 21 nt, synthetic construct
  source 1..21: mol_type = other RNA
cgccaaacctcggcattttta

SEQ ID NO: 2612 - RNA, 21 nt, synthetic construct
  source 1..21: mol_type = other RNA
gccaaacctcggcatttttta

SEQ ID NO: 2613 - RNA, 21 nt, synthetic construct
  source 1..21: mol_type = other RNA
ccaaacctcggcattttttga

SEQ ID NO: 2614 - RNA, 21 nt, synthetic construct
  source 1..21: mol_type = other RNA
caaacctcggcattttttgta

SEQ ID NO: 2615 - RNA, 21 nt, synthetic construct
  source 1..21: mol_type = other RNA
aaacctcggcattttttgtga

SEQ ID NO: 2616 - RNA, 21 nt, synthetic construct
  source 1..21: mol_type = other RNA
aacctcggcattttttgtgta

SEQ ID NO: 2617 - RNA, 21 nt, synthetic construct
  source 1..21: mol_type = other RNA
acctcggcattttttgtgtta

SEQ ID NO: 2618 - RNA, 21 nt, synthetic construct
  source 1..21: mol_type = other RNA
cctcggcattttttgtgttaa

SEQ ID NO: 2619 - RNA, 21 nt, synthetic construct
  source 1..21: mol_type = other RNA
ctcggcattttttgtgttata

SEQ ID NO: 2620 - RNA, 21 nt, synthetic construct
  source 1..21: mol_type = other RNA
tcggcattttttgtgttatta

SEQ ID NO: 2621 - RNA, 21 nt, synthetic construct
  source 1..21: mol_type = other RNA
ggcattttttgtgttatttta

SEQ ID NO: 2622 - RNA, 21 nt, synthetic construct
  source 1..21: mol_type = other RNA
gcattttttgtgttattttca

SEQ ID NO: 2623 - RNA, 21 nt, synthetic construct
  source 1..21: mol_type = other RNA
cattttttgtgttattttcta

SEQ ID NO: 2624 - RNA, 21 nt, synthetic construct
  source 1..21: mol_type = other RNA
tttgtgttattttctgactga

SEQ ID NO: 2625 - RNA, 21 nt, synthetic construct
  source 1..21: mol_type = other RNA
ttgtgttattttctgactgca

SEQ ID NO: 2626 - RNA, 21 nt, synthetic construct
  source 1..21: mol_type = other RNA
tgtgttattttctgactgcta

SEQ ID NO: 2627 - RNA, 21 nt, synthetic construct
  source 1..21: mol_type = other RNA
gtgttattttctgactgctga

SEQ ID NO: 2628 - RNA, 21 nt, synthetic construct
  source 1..21: mol_type = other RNA
tgttattttctgactgctgga

SEQ ID NO: 2629 - RNA, 21 nt, synthetic construct
  source 1..21: mol_type = other RNA
gttattttctgactgctggaa

SEQ ID NO: 2630 - RNA, 21 nt, synthetic construct
  source 1..21: mol_type = other RNA
ttattttctgactgctggata

SEQ ID NO: 2631 - RNA, 21 nt, synthetic construct
  source 1..21: mol_type = other RNA
tattttctgactgctggatta

SEQ ID NO: 2632 - RNA, 21 nt, synthetic construct
  source 1..21: mol_type = other RNA
attttctgactgctggattca

SEQ ID NO: 2633 - RNA, 21 nt, synthetic construct
  source 1..21: mol_type = other RNA
tctgactgctggattctgtaa

SEQ ID NO: 2634 - RNA, 21 nt, synthetic construct
  source 1..21: mol_type = other RNA
agtaaggtgacatagctatga

SEQ ID NO: 2635 - RNA, 21 nt, synthetic construct
  source 1..21: mol_type = other RNA
gtaaggtgacatagctatgaa

SEQ ID NO: 2636 - RNA, 21 nt, synthetic construct
  source 1..21: mol_type = other RNA
taaggtgacatagctatgaca

SEQ ID NO: 2637 - RNA, 21 nt, synthetic construct
  source 1..21: mol_type = other RNA
aaggtgacatagctatgacaa

SEQ ID NO: 2638 - RNA, 21 nt, synthetic construct
  source 1..21: mol_type = other RNA
aggtgacatagctatgacata

SEQ ID NO: 2639 - RNA, 21 nt, synthetic construct
  source 1..21: mol_type = other RNA
ggtgacatagctatgacatta

SEQ ID NO: 2640 - RNA, 21 nt, synthetic construct
  source 1..21: mol_type = other RNA
gtgacatagctatgacattta

SEQ ID NO: 2641 - RNA, 21 nt, synthetic construct
  source 1..21: mol_type = other RNA
tgacatagctatgacatttga

SEQ ID NO: 2642 - RNA, 21 nt, synthetic construct
  source 1..21: mol_type = other RNA
acatagctatgacatttgtta

SEQ ID NO: 2643 - RNA, 21 nt, synthetic construct
  source 1..21: mol_type = other RNA
catagctatgacatttgttaa

SEQ ID NO: 2644 - RNA, 21 nt, synthetic construct
  source 1..21: mol_type = other RNA
atagctatgacatttgttaaa

SEQ ID NO: 2645 - RNA, 21 nt, synthetic construct
  source 1..21: mol_type = other RNA
tagctatgacatttgttaaaa

SEQ ID NO: 2646 - RNA, 21 nt, synthetic construct
  source 1..21: mol_type = other RNA
agctatgacatttgttaaaaa

SEQ ID NO: 2647 - RNA, 21 nt, synthetic construct
  source 1..21: mol_type = other RNA
gctatgacatttgttaaaaaa

SEQ ID NO: 2648 - RNA, 21 nt, synthetic construct
  source 1..21: mol_type = other RNA
ctatgacatttgttaaaaata

SEQ ID NO: 2649 - RNA, 21 nt, synthetic construct
  source 1..21: mol_type = other RNA
tatgacatttgttaaaaataa

SEQ ID NO: 2650 - RNA, 21 nt, synthetic construct
  source 1..21: mol_type = other RNA
atgacatttgttaaaaataaa

SEQ ID NO: 2651 - RNA, 21 nt, synthetic construct
  source 1..21: mol_type = other RNA
tgacatttgttaaaaataaaa

SEQ ID NO: 2652 - RNA, 21 nt, synthetic construct
  source 1..21: mol_type = other RNA
gacatttgttaaaaataaaca

SEQ ID NO: 2653 - RNA, 21 nt, synthetic construct
  source 1..21: mol_type = other RNA
acatttgttaaaaataaacta

SEQ ID NO: 2654 - RNA, 21 nt, synthetic construct
  source 1..21: mol_type = other RNA
aataaactctgtacttaacta

SEQ ID NO: 2655 - RNA, 21 nt, synthetic construct
  source 1..21: mol_type = other RNA
ataaactctgtacttaactta

SEQ ID NO: 2656 - RNA, 21 nt, synthetic construct
  source 1..21: mol_type = other RNA
taaactctgtacttaacttta

SEQ ID NO: 2657 - RNA, 21 nt, synthetic construct
  source 1..21: mol_type = other RNA
aaactctgtacttaactttga

SEQ ID NO: 2658 - RNA, 21 nt, synthetic construct
  source 1..21: mol_type = other RNA
aactctgtacttaactttgaa

SEQ ID NO: 2659 - RNA, 21 nt, synthetic construct
  source 1..21: mol_type = other RNA
actctgtacttaactttgata

SEQ ID NO: 2660 - RNA, 21 nt, synthetic construct
  source 1..21: mol_type = other RNA
ctctgtacttaactttgatta

SEQ ID NO: 2661 - RNA, 21 nt, synthetic construct
  source 1..21: mol_type = other RNA
tctgtacttaactttgattta

SEQ ID NO: 2662 - RNA, 21 nt, synthetic construct
  source 1..21: mol_type = other RNA
ctgtacttaactttgatttga

SEQ ID NO: 2663 - RNA, 21 nt, synthetic construct
  source 1..21: mol_type = other RNA
tgtacttaactttgatttgaa

SEQ ID NO: 2664 - RNA, 21 nt, synthetic construct
  source 1..21: mol_type = other RNA
gtacttaactttgatttgaga

SEQ ID NO: 2665 - RNA, 21 nt, synthetic construct
  source 1..21: mol_type = other RNA
tacttaactttgatttgagta

SEQ ID NO: 2666 - RNA, 21 nt, synthetic construct
  source 1..21: mol_type = other RNA
acttaactttgatttgagtaa

SEQ ID NO: 2667 - RNA, 21 nt, synthetic construct
  source 1..21: mol_type = other RNA
ttgatttgagtaaattttgga

SEQ ID NO: 2668 - RNA, 21 nt, synthetic construct
  source 1..21: mol_type = other RNA
tgagtaaattttggttttgga

SEQ ID NO: 2669 - RNA, 21 nt, synthetic construct
  source 1..21: mol_type = other RNA
gagtaaattttggttttggta

SEQ ID NO: 2670 - RNA, 21 nt, synthetic construct
  source 1..21: mol_type = other RNA
agtaaattttggttttggtca

SEQ ID NO: 2671 - RNA, 21 nt, synthetic construct
  source 1..21: mol_type = other RNA
gtaaattttggttttggtcta

SEQ ID NO: 2672 - RNA, 21 nt, synthetic construct
  source 1..21: mol_type = other RNA
taaattttggttttggtctta

SEQ ID NO: 2673 - RNA, 21 nt, synthetic construct
  source 1..21: mol_type = other RNA
aaattttggttttggtcttca

SEQ ID NO: 2674 - RNA, 21 nt, synthetic construct
  source 1..21: mol_type = other RNA
attttggttttggtcttcaaa

SEQ ID NO: 2675 - RNA, 21 nt, synthetic construct
  source 1..21: mol_type = other RNA
tttggttttggtcttcaacaa

SEQ ID NO: 2676 - RNA, 21 nt, synthetic construct
  source 1..21: mol_type = other RNA
ttggttttggtcttcaacata

SEQ ID NO: 2677 - RNA, 21 nt, synthetic construct
  source 1..21: mol_type = other RNA
tggttttggtcttcaacatta

SEQ ID NO: 2678 - RNA, 21 nt, synthetic construct
  source 1..21: mol_type = other RNA
ggttttggtcttcaacattta

SEQ ID NO: 2679 - RNA, 21 nt, synthetic construct
  source 1..21: mol_type = other RNA
gttttggtcttcaacatttta

SEQ ID NO: 2680 - RNA, 21 nt, synthetic construct
  source 1..21: mol_type = other RNA
ttttggtcttcaacattttca

SEQ ID NO: 2681 - RNA, 21 nt, synthetic construct
  source 1..21: mol_type = other RNA
tttggtcttcaacattttcaa

SEQ ID NO: 2682 - RNA, 21 nt, synthetic construct
  source 1..21: mol_type = other RNA
ttggtcttcaacattttcata

SEQ ID NO: 2683 - RNA, 21 nt, synthetic construct
  source 1..21: mol_type = other RNA
tggtcttcaacattttcatga

SEQ ID NO: 2684 - RNA, 21 nt, synthetic construct
  source 1..21: mol_type = other RNA
ggtcttcaacattttcatgca

SEQ ID NO: 2685 - RNA, 21 nt, synthetic construct
  source 1..21: mol_type = other RNA
gtcttcaacattttcatgcta

SEQ ID NO: 2686 - RNA, 21 nt, synthetic construct
  source 1..21: mol_type = other RNA
cttcaacattttcatgctcta

SEQ ID NO: 2687 - RNA, 21 nt, synthetic construct
  source 1..21: mol_type = other RNA
ttcaacattttcatgctctta

SEQ ID NO: 2688 - RNA, 21 nt, synthetic construct
  source 1..21: mol_type = other RNA
tcaacattttcatgctcttta

SEQ ID NO: 2689 - RNA, 21 nt, synthetic construct
  source 1..21: mol_type = other RNA
caacattttcatgctctttga

SEQ ID NO: 2690 - RNA, 21 nt, synthetic construct
  source 1..21: mol_type = other RNA
aacattttcatgctctttgta

SEQ ID NO: 2691 - RNA, 21 nt, synthetic construct
  source 1..21: mol_type = other RNA
acattttcatgctctttgtta

SEQ ID NO: 2692 - RNA, 21 nt, synthetic construct
  source 1..21: mol_type = other RNA
cattttcatgctctttgttca

SEQ ID NO: 2693 - RNA, 21 nt, synthetic construct
  source 1..21: mol_type = other RNA
attttcatgctctttgttcaa

SEQ ID NO: 2694 - RNA, 21 nt, synthetic construct
  source 1..21: mol_type = other RNA
ttttcatgctctttgttcaca

SEQ ID NO: 2695 - RNA, 21 nt, synthetic construct
  source 1..21: mol_type = other RNA
tttcatgctctttgttcacca

SEQ ID NO: 2696 - RNA, 21 nt, synthetic construct
  source 1..21: mol_type = other RNA
gatttagctgcttttgataaa

SEQ ID NO: 2697 - RNA, 21 nt, synthetic construct
  source 1..21: mol_type = other RNA
atttagctgcttttgataaga

SEQ ID NO: 2698 - RNA, 21 nt, synthetic construct
  source 1..21: mol_type = other RNA
ttagctgcttttgataaggaa

SEQ ID NO: 2699 - RNA, 21 nt, synthetic construct
  source 1..21: mol_type = other RNA
tagctgcttttgataaggaaa

SEQ ID NO: 2700 - RNA, 21 nt, synthetic construct
  source 1..21: mol_type = other RNA
agctgcttttgataaggaaca

SEQ ID NO: 2701 - RNA, 21 nt, synthetic construct
  source 1..21: mol_type = other RNA
gctgcttttgataaggaacaa

SEQ ID NO: 2702 - RNA, 21 nt, synthetic construct
  source 1..21: mol_type = other RNA
ataaggaacagctgcacaaaa

SEQ ID NO: 2703 - RNA, 21 nt, synthetic construct
  source 1..21: mol_type = other RNA
cgcatttacctcatcagctaa

SEQ ID NO: 2704 - RNA, 21 nt, synthetic construct
  source 1..21: mol_type = other RNA
gcatttacctcatcagctaaa

SEQ ID NO: 2705 - RNA, 21 nt, synthetic construct
  source 1..21: mol_type = other RNA
catttacctcatcagctaaca

SEQ ID NO: 2706 - RNA, 21 nt, synthetic construct
  source 1..21: mol_type = other RNA
gcttgacatgcatttttacta

SEQ ID NO: 2707 - RNA, 21 nt, synthetic construct
  source 1..21: mol_type = other RNA
cttgacatgcatttttactga

SEQ ID NO: 2708 - RNA, 21 nt, synthetic construct
  source 1..21: mol_type = other RNA
ttgacatgcatttttactgta

SEQ ID NO: 2709 - RNA, 21 nt, synthetic construct
  source 1..21: mol_type = other RNA
tgacatgcatttttactgtca

SEQ ID NO: 2710 - RNA, 21 nt, synthetic construct
  source 1..21: mol_type = other RNA
gacatgcatttttactgtcta

SEQ ID NO: 2711 - RNA, 21 nt, synthetic construct
  source 1..21: mol_type = other RNA
acatgcatttttactgtctta

SEQ ID NO: 2712 - RNA, 21 nt, synthetic construct
  source 1..21: mol_type = other RNA
catgcatttttactgtcttta

SEQ ID NO: 2713 - RNA, 21 nt, synthetic construct
  source 1..21: mol_type = other RNA
atgcatttttactgtctttaa

SEQ ID NO: 2714 - RNA, 21 nt, synthetic construct
  source 1..21: mol_type = other RNA
tgcatttttactgtctttata

SEQ ID NO: 2715 - RNA, 21 nt, synthetic construct
  source 1..21: mol_type = other RNA
gcatttttactgtctttatta

SEQ ID NO: 2716 - RNA, 21 nt, synthetic construct
  source 1..21: mol_type = other RNA
catttttactgtctttattca

SEQ ID NO: 2717 - RNA, 21 nt, synthetic construct
  source 1..21: mol_type = other RNA
atttttactgtctttattcca

SEQ ID NO: 2718 - RNA, 21 nt, synthetic construct
  source 1..21: mol_type = other RNA
tttttactgtctttattccta

SEQ ID NO: 2719 - RNA, 21 nt, synthetic construct
  source 1..21: mol_type = other RNA
ttttactgtctttattcctga

SEQ ID NO: 2720 - RNA, 21 nt, synthetic construct
  source 1..21: mol_type = other RNA
tttactgtctttattcctgaa

SEQ ID NO: 2721 - RNA, 21 nt, synthetic construct
  source 1..21: mol_type = other RNA
tactgtctttattcctgacaa

SEQ ID NO: 2722 - RNA, 21 nt, synthetic construct
  source 1..21: mol_type = other RNA
actgtctttattcctgacaca

SEQ ID NO: 2723 - RNA, 21 nt, synthetic construct
  source 1..21: mol_type = other RNA
ctgtctttattcctgacacta

SEQ ID NO: 2724 - RNA, 21 nt, synthetic construct
  source 1..21: mol_type = other RNA
gtctttattcctgacactgaa

SEQ ID NO: 2725 - RNA, 21 nt, synthetic construct
  source 1..21: mol_type = other RNA
gacactgagatgaatgtttta

SEQ ID NO: 2726 - RNA, 21 nt, synthetic construct
  source 1..21: mol_type = other RNA
acactgagatgaatgttttca

SEQ ID NO: 2727 - RNA, 21 nt, synthetic construct
  source 1..21: mol_type = other RNA
cactgagatgaatgttttcaa

SEQ ID NO: 2728 - RNA, 21 nt, synthetic construct
  source 1..21: mol_type = other RNA
actgagatgaatgttttcaaa

SEQ ID NO: 2729 - RNA, 21 nt, synthetic construct
  source 1..21: mol_type = other RNA
ctgagatgaatgttttcaaaa

SEQ ID NO: 2730 - RNA, 21 nt, synthetic construct
  source 1..21: mol_type = other RNA
tgagatgaatgttttcaaaga

SEQ ID NO: 2731 - RNA, 21 nt, synthetic construct
  source 1..21: mol_type = other RNA
gagatgaatgttttcaaagca

SEQ ID NO: 2732 - RNA, 21 nt, synthetic construct
  source 1..21: mol_type = other RNA
agatgaatgttttcaaagcta

SEQ ID NO: 2733 - RNA, 21 nt, synthetic construct
  source 1..21: mol_type = other RNA
aatgttttcaaagctgcaaca

SEQ ID NO: 2734 - RNA, 21 nt, synthetic construct
  source 1..21: mol_type = other RNA
atgttttcaaagctgcaacaa

SEQ ID NO: 2735 - RNA, 21 nt, synthetic construct
  source 1..21: mol_type = other RNA
tgttttcaaagctgcaacata

SEQ ID NO: 2736 - RNA, 21 nt, synthetic construct
  source 1..21: mol_type = other RNA
gttttcaaagctgcaacatga

SEQ ID NO: 2737 - RNA, 21 nt, synthetic construct
  source 1..21: mol_type = other RNA
aaccgattctgttattgggaa

SEQ ID NO: 2738 - RNA, 21 nt, synthetic construct
  source 1..21: mol_type = other RNA
accgattctgttattgggaaa

SEQ ID NO: 2739 - RNA, 21 nt, synthetic construct
  source 1..21: mol_type = other RNA
ccgattctgttattgggaata

SEQ ID NO: 2740 - RNA, 21 nt, synthetic construct
  source 1..21: mol_type = other RNA
cgattctgttattgggaatga

SEQ ID NO: 2741 - RNA, 21 nt, synthetic construct
  source 1..21: mol_type = other RNA
gattctgttattgggaatgaa

SEQ ID NO: 2742 - RNA, 21 nt, synthetic construct
  source 1..21: mol_type = other RNA
attctgttattgggaatgaaa

SEQ ID NO: 2743 - RNA, 21 nt, synthetic construct
  source 1..21: mol_type = other RNA
ttctgttattgggaatgaaaa

SEQ ID NO: 2744 - RNA, 21 nt, synthetic construct
  source 1..21: mol_type = other RNA
tctgttattgggaatgaaata

SEQ ID NO: 2745 - RNA, 21 nt, synthetic construct
  source 1..21: mol_type = other RNA
ctgttattgggaatgaaatca

SEQ ID NO: 2746 - RNA, 21 nt, synthetic construct
  source 1..21: mol_type = other RNA
tgttattgggaatgaaatcta

SEQ ID NO: 2747 - RNA, 21 nt, synthetic construct
  source 1..21: mol_type = other RNA
gttattgggaatgaaatctga

SEQ ID NO: 2748 - RNA, 21 nt, synthetic construct
  source 1..21: mol_type = other RNA
ttattgggaatgaaatctgta

SEQ ID NO: 2749 - RNA, 21 nt, synthetic construct
  source 1..21: mol_type = other RNA
attgggaatgaaatctgtcaa

SEQ ID NO: 2750 - RNA, 21 nt, synthetic construct
  source 1..21: mol_type = other RNA
agagctgtatatgatggagta

SEQ ID NO: 2751 - RNA, 21 nt, synthetic construct
  source 1..21: mol_type = other RNA
gctgtatatgatggagtgaaa

SEQ ID NO: 2752 - RNA, 21 nt, synthetic construct
  source 1..21: mol_type = other RNA
ggatgtgtaacacaagaccaa

SEQ ID NO: 2753 - RNA, 21 nt, synthetic construct
  source 1..21: mol_type = other RNA
gatgtgtaacacaagaccaaa

SEQ ID NO: 2754 - RNA, 21 nt, synthetic construct
  source 1..21: mol_type = other RNA
gtgtaacacaagaccaactga

SEQ ID NO: 2755 - RNA, 21 nt, synthetic construct
  source 1..21: mol_type = other RNA
tgtaacacaagaccaactgaa

SEQ ID NO: 2756 - RNA, 21 nt, synthetic construct
  source 1..21: mol_type = other RNA
taacacaagaccaactgagaa

SEQ ID NO: 2757 - RNA, 21 nt, synthetic construct
  source 1..21: mol_type = other RNA
aactgagagtctgaatgttaa

SEQ ID NO: 2758 - RNA, 21 nt, synthetic construct
  source 1..21: mol_type = other RNA
actgagagtctgaatgttata

SEQ ID NO: 2759 - RNA, 21 nt, synthetic construct
  source 1..21: mol_type = other RNA
ctgagagtctgaatgttatta

SEQ ID NO: 2760 - RNA, 21 nt, synthetic construct
  source 1..21: mol_type = other RNA
gagagtctgaatgttattcta

SEQ ID NO: 2761 - RNA, 21 nt, synthetic construct
  source 1..21: mol_type = other RNA
gagtctgaatgttattctgga

SEQ ID NO: 2762 - RNA, 21 nt, synthetic construct
  source 1..21: mol_type = other RNA
tgccaagagcatgtaaatgaa

SEQ ID NO: 2763 - RNA, 21 nt, synthetic construct
  source 1..21: mol_type = other RNA
gccaagagcatgtaaatgaaa

SEQ ID NO: 2764 - RNA, 21 nt, synthetic construct
  source 1..21: mol_type = other RNA
ccaagagcatgtaaatgaaca

SEQ ID NO: 2765 - RNA, 21 nt, synthetic construct
  source 1..21: mol_type = other RNA
caagagcatgtaaatgaacaa

SEQ ID NO: 2766 - RNA, 21 nt, synthetic construct
  source 1..21: mol_type = other RNA
aagagcatgtaaatgaacaaa

SEQ ID NO: 2767 - RNA, 21 nt, synthetic construct
  source 1..21: mol_type = other RNA
agagcatgtaaatgaacaaca

SEQ ID NO: 2768 - RNA, 21 nt, synthetic construct
  source 1..21: mol_type = other RNA
gagcatgtaaatgaacaacaa

SEQ ID NO: 2769 - RNA, 21 nt, synthetic construct
  source 1..21: mol_type = other RNA
agcatgtaaatgaacaacaaa

SEQ ID NO: 2770 - RNA, 21 nt, synthetic construct
  source 1..21: mol_type = other RNA
gcatgtaaatgaacaacaaga

SEQ ID NO: 2771 - RNA, 21 nt, synthetic construct
  source 1..21: mol_type = other RNA
catgtaaatgaacaacaagca

SEQ ID NO: 2772 - RNA, 21 nt, synthetic construct
  source 1..21: mol_type = other RNA
atgtaaatgaacaacaagcaa

SEQ ID NO: 2773 - RNA, 21 nt, synthetic construct
  source 1..21: mol_type = other RNA
tgtaaatgaacaacaagcaaa

SEQ ID NO: 2774 - RNA, 21 nt, synthetic construct
  source 1..21: mol_type = other RNA
gtaaatgaacaacaagcaaaa

SEQ ID NO: 2775 - RNA, 21 nt, synthetic construct
  source 1..21: mol_type = other RNA
taaatgaacaacaagcaaata

SEQ ID NO: 2776 - RNA, 21 nt, synthetic construct
  source 1..21: mol_type = other RNA
aaatgaacaacaagcaaataa

SEQ ID NO: 2777 - RNA, 21 nt, synthetic construct
  source 1..21: mol_type = other RNA
aatgaacaacaagcaaatata

SEQ ID NO: 2778 - RNA, 21 nt, synthetic construct
  source 1..21: mol_type = other RNA
atgaacaacaagcaaatatta

SEQ ID NO: 2779 - RNA, 21 nt, synthetic construct
  source 1..21: mol_type = other RNA
tgaacaacaagcaaatattga

SEQ ID NO: 2780 - RNA, 21 nt, synthetic construct
  source 1..21: mol_type = other RNA
gaacaacaagcaaatattgaa

SEQ ID NO: 2781 - RNA, 21 nt, synthetic construct
  source 1..21: mol_type = other RNA
aacaacaagcaaatattgaaa

SEQ ID NO: 2782 - RNA, 21 nt, synthetic construct
  source 1..21: mol_type = other RNA
acaacaagcaaatattgaaga

SEQ ID NO: 2783 - RNA, 21 nt, synthetic construct
  source 1..21: mol_type = other RNA
caacaagcaaatattgaagga

SEQ ID NO: 2784 - RNA, 21 nt, synthetic construct
  source 1..21: mol_type = other RNA
aacaagcaaatattgaaggta

SEQ ID NO: 2785 - RNA, 21 nt, synthetic construct
  source 1..21: mol_type = other RNA
acaagcaaatattgaaggtga

SEQ ID NO: 2786 - RNA, 21 nt, synthetic construct
  source 1..21: mol_type = other RNA
cacttatttcccattgctaaa

SEQ ID NO: 2787 - RNA, 21 nt, synthetic construct
  source 1..21: mol_type = other RNA
acttatttcccattgctaata

SEQ ID NO: 2788 - RNA, 21 nt, synthetic construct
  source 1..21: mol_type = other RNA
cttatttcccattgctaatta

SEQ ID NO: 2789 - RNA, 21 nt, synthetic construct
  source 1..21: mol_type = other RNA
ttatttcccattgctaattga

SEQ ID NO: 2790 - RNA, 21 nt, synthetic construct
  source 1..21: mol_type = other RNA
atttcccattgctaattgcca

SEQ ID NO: 2791 - RNA, 21 nt, synthetic construct
  source 1..21: mol_type = other RNA
gcctgcccggttttgaaacaa

SEQ ID NO: 2792 - RNA, 21 nt, synthetic construct
  source 1..21: mol_type = other RNA
ttttgaaacagtctgcagtaa

SEQ ID NO: 2793 - RNA, 21 nt, synthetic construct
  source 1..21: mol_type = other RNA
ttgaaacagtctgcagtacaa

SEQ ID NO: 2794 - RNA, 21 nt, synthetic construct
  source 1..21: mol_type = other RNA
gtgggagagatacatgtttaa

SEQ ID NO: 2795 - RNA, 21 nt, synthetic construct
  source 1..21: mol_type = other RNA
gggagagatacatgtttagaa

SEQ ID NO: 2796 - RNA, 21 nt, synthetic construct
  source 1..21: mol_type = other RNA
ggagagatacatgtttagaaa

SEQ ID NO: 2797 - RNA, 21 nt, synthetic construct
  source 1..21: mol_type = other RNA
gagagatacatgtttagaaga

SEQ ID NO: 2798 - RNA, 21 nt, synthetic construct
  source 1..21: mol_type = other RNA
gagatacatgtttagaaggaa

SEQ ID NO: 2799 - RNA, 21 nt, synthetic construct
  source 1..21: mol_type = other RNA
agatacatgtttagaaggaaa

SEQ ID NO: 2800 - RNA, 21 nt, synthetic construct
  source 1..21: mol_type = other RNA
gatacatgtttagaaggaaga

SEQ ID NO: 2801 - RNA, 21 nt, synthetic construct
  source 1..21: mol_type = other RNA
atacatgtttagaaggaagaa

SEQ ID NO: 2802 - RNA, 21 nt, synthetic construct
  source 1..21: mol_type = other RNA
catgtttagaaggaagagaaa

SEQ ID NO: 2803 - RNA, 21 nt, synthetic construct
  source 1..21: mol_type = other RNA
tgtttagaaggaagagaaaga

SEQ ID NO: 2804 - RNA, 21 nt, synthetic construct
  source 1..21: mol_type = other RNA
gtttagaaggaagagaaagga

SEQ ID NO: 2805 - RNA, 21 nt, synthetic construct
  source 1..21: mol_type = other RNA
ttagaaggaagagaaaggaca

SEQ ID NO: 2806 - RNA, 21 nt, synthetic construct
  source 1..21: mol_type = other RNA
tagaaggaagagaaaggacaa

SEQ ID NO: 2807 - RNA, 21 nt, synthetic construct
  source 1..21: mol_type = other RNA
agaaggaagagaaaggacaaa

SEQ ID NO: 2808 - RNA, 21 nt, synthetic construct
  source 1..21: mol_type = other RNA
gaaggaagagaaaggacaaaa

SEQ ID NO: 2809 - RNA, 21 nt, synthetic construct
  source 1..21: mol_type = other RNA
aaggcacacgttttaccatta

SEQ ID NO: 2810 - RNA, 21 nt, synthetic construct
  source 1..21: mol_type = other RNA
aggcacacgttttaccattta

SEQ ID NO: 2811 - RNA, 21 nt, synthetic construct
  source 1..21: mol_type = other RNA
ggcacacgttttaccatttaa

SEQ ID NO: 2812 - RNA, 21 nt, synthetic construct
  source 1..21: mol_type = other RNA
gcacacgttttaccatttaaa

SEQ ID NO: 2813 - RNA, 21 nt, synthetic construct
  source 1..21: mol_type = other RNA
cacacgttttaccatttaaaa

SEQ ID NO: 2814 - RNA, 21 nt, synthetic construct
  source 1..21: mol_type = other RNA
acacgttttaccatttaaaaa

SEQ ID NO: 2815 - RNA, 21 nt, synthetic construct
  source 1..21: mol_type = other RNA
cacgttttaccatttaaaata

SEQ ID NO: 2816 - RNA, 21 nt, synthetic construct
  source 1..21: mol_type = other RNA
acgttttaccatttaaaataa

SEQ ID NO: 2817 - RNA, 21 nt, synthetic construct
  source 1..21: mol_type = other RNA
cgttttaccatttaaaatata

SEQ ID NO: 2818 - RNA, 21 nt, synthetic construct
  source 1..21: mol_type = other RNA
gttttaccatttaaaatatta

SEQ ID NO: 2819 - RNA, 21 nt, synthetic construct
  source 1..21: mol_type = other RNA
ttttaccatttaaaatattga

SEQ ID NO: 2820 - RNA, 21 nt, synthetic construct
  source 1..21: mol_type = other RNA
tttaccatttaaaatattgta

SEQ ID NO: 2821 - RNA, 21 nt, synthetic construct
  source 1..21: mol_type = other RNA
tttaaaatattgttaccaaaa

SEQ ID NO: 2822 - RNA, 21 nt, synthetic construct
  source 1..21: mol_type = other RNA
ttaaaatattgttaccaaaca

SEQ ID NO: 2823 - RNA, 21 nt, synthetic construct
  source 1..21: mol_type = other RNA
taaaatattgttaccaaacaa

SEQ ID NO: 2824 - RNA, 21 nt, synthetic construct
  source 1..21: mol_type = other RNA
aaaatattgttaccaaacaaa

SEQ ID NO: 2825 - RNA, 21 nt, synthetic construct
  source 1..21: mol_type = other RNA
aaatattgttaccaaacaaaa

SEQ ID NO: 2826 - RNA, 21 nt, synthetic construct
  source 1..21: mol_type = other RNA
aatattgttaccaaacaaaaa

SEQ ID NO: 2827 - RNA, 21 nt, synthetic construct
  source 1..21: mol_type = other RNA
atattgttaccaaacaaaaaa

SEQ ID NO: 2828 - RNA, 21 nt, synthetic construct
  source 1..21: mol_type = other RNA
tattgttaccaaacaaaaata

SEQ ID NO: 2829 - RNA, 21 nt, synthetic construct
  source 1..21: mol_type = other RNA
attgttaccaaacaaaaataa

SEQ ID NO: 2830 - RNA, 21 nt, synthetic construct
  source 1..21: mol_type = other RNA
ttgttaccaaacaaaaatata

SEQ ID NO: 2831 - RNA, 21 nt, synthetic construct
  source 1..21: mol_type = other RNA
tgttaccaaacaaaaatatca

SEQ ID NO: 2832 - RNA, 21 nt, synthetic construct
  source 1..21: mol_type = other RNA
gttaccaaacaaaaatatcca

SEQ ID NO: 2833 - RNA, 21 nt, synthetic construct
  source 1..21: mol_type = other RNA
ttaccaaacaaaaatatccaa

SEQ ID NO: 2834 - RNA, 21 nt, synthetic construct
  source 1..21: mol_type = other RNA
taccaaacaaaaatatccata

SEQ ID NO: 2835 - RNA, 21 nt, synthetic construct
  source 1..21: mol_type = other RNA
ccaaacaaaaatatccattca

SEQ ID NO: 2836 - RNA, 21 nt, synthetic construct
  source 1..21: mol_type = other RNA
caaacaaaaatatccattcaa

SEQ ID NO: 2837 - RNA, 21 nt, synthetic construct
  source 1..21: mol_type = other RNA
aaacaaaaatatccattcaaa

SEQ ID NO: 2838 - RNA, 21 nt, synthetic construct
  source 1..21: mol_type = other RNA
aaaatatccattcaaaataca

SEQ ID NO: 2839 - RNA, 21 nt, synthetic construct
  source 1..21: mol_type = other RNA
aaatatccattcaaaatacaa

SEQ ID NO: 2840 - RNA, 21 nt, synthetic construct
  source 1..21: mol_type = other RNA
aatatccattcaaaatacaaa

SEQ ID NO: 2841 - RNA, 21 nt, synthetic construct
  source 1..21: mol_type = other RNA
atatccattcaaaatacaata

SEQ ID NO: 2842 - RNA, 21 nt, synthetic construct
  source 1..21: mol_type = other RNA
tatccattcaaaatacaatta

SEQ ID NO: 2843 - RNA, 21 nt, synthetic construct
  source 1..21: mol_type = other RNA
atccattcaaaatacaattta

SEQ ID NO: 2844 - RNA, 21 nt, synthetic construct
  source 1..21: mol_type = other RNA
tccattcaaaatacaatttaa

SEQ ID NO: 2845 - RNA, 21 nt, synthetic construct
  source 1..21: mol_type = other RNA
ccattcaaaatacaatttaaa

SEQ ID NO: 2846 - RNA, 21 nt, synthetic construct
  source 1..21: mol_type = other RNA
cattcaaaatacaatttaaca

SEQ ID NO: 2847 - RNA, 21 nt, synthetic construct
  source 1..21: mol_type = other RNA
attcaaaatacaatttaacaa

SEQ ID NO: 2848 - RNA, 21 nt, synthetic construct
  source 1..21: mol_type = other RNA
ttcaaaatacaatttaacaaa

SEQ ID NO: 2849 - RNA, 21 nt, synthetic construct
  source 1..21: mol_type = other RNA
tcaaaatacaatttaacaata

SEQ ID NO: 2850 - RNA, 21 nt, synthetic construct
  source 1..21: mol_type = other RNA
caatttaacaatgcaacagta

SEQ ID NO: 2851 - RNA, 21 nt, synthetic construct
  source 1..21: mol_type = other RNA
tcatcttacagcagagaaata

SEQ ID NO: 2852 - RNA, 21 nt, synthetic construct
  source 1..21: mol_type = other RNA
catcttacagcagagaaatga

SEQ ID NO: 2853 - RNA, 21 nt, synthetic construct
  source 1..21: mol_type = other RNA
atcttacagcagagaaatgca

SEQ ID NO: 2854 - RNA, 21 nt, synthetic construct
  source 1..21: mol_type = other RNA
tcttacagcagagaaatgcaa

SEQ ID NO: 2855 - RNA, 21 nt, synthetic construct
  source 1..21: mol_type = other RNA
cttacagcagagaaatgcaga

SEQ ID NO: 2856 - RNA, 21 nt, synthetic construct
  source 1..21: mol_type = other RNA
ttacagcagagaaatgcagaa

SEQ ID NO: 2857 - RNA, 21 nt, synthetic construct
  source 1..21: mol_type = other RNA
tacagcagagaaatgcagaga

SEQ ID NO: 2858 - RNA, 21 nt, synthetic construct
  source 1..21: mol_type = other RNA
acagcagagaaatgcagagaa

SEQ ID NO: 2859 - RNA, 21 nt, synthetic construct
  source 1..21: mol_type = other RNA
cagcagagaaatgcagagaaa

SEQ ID NO: 2860 - RNA, 21 nt, synthetic construct
  source 1..21: mol_type = other RNA
agcagagaaatgcagagaaaa

SEQ ID NO: 2861 - RNA, 21 nt, synthetic construct
  source 1..21: mol_type = other RNA
gcagagaaatgcagagaaaaa

SEQ ID NO: 2862 - RNA, 21 nt, synthetic construct
  source 1..21: mol_type = other RNA
cagagaaatgcagagaaaaga

SEQ ID NO: 2863 - RNA, 21 nt, synthetic construct
  source 1..21: mol_type = other RNA
agagaaatgcagagaaaagca

SEQ ID NO: 2864 - RNA, 21 nt, synthetic construct
  source 1..21: mol_type = other RNA
gagaaatgcagagaaaagcaa

SEQ ID NO: 2865 - RNA, 21 nt, synthetic construct
  source 1..21: mol_type = other RNA
agaaatgcagagaaaagcaaa

SEQ ID NO: 2866 - RNA, 21 nt, synthetic construct
  source 1..21: mol_type = other RNA
gaaatgcagagaaaagcaaaa

SEQ ID NO: 2867 - RNA, 21 nt, synthetic construct
  source 1..21: mol_type = other RNA
aaatgcagagaaaagcaaaaa

SEQ ID NO: 2868 - RNA, 21 nt, synthetic construct
  source 1..21: mol_type = other RNA
aatgcagagaaaagcaaaaca

SEQ ID NO: 2869 - RNA, 21 nt, synthetic construct
  source 1..21: mol_type = other RNA
atgcagagaaaagcaaaacta

SEQ ID NO: 2870 - RNA, 21 nt, synthetic construct
  source 1..21: mol_type = other RNA
tgcagagaaaagcaaaactga

SEQ ID NO: 2871 - RNA, 21 nt, synthetic construct
  source 1..21: mol_type = other RNA
gcagagaaaagcaaaactgca

SEQ ID NO: 2872 - RNA, 21 nt, synthetic construct
  source 1..21: mol_type = other RNA
cagagaaaagcaaaactgcaa

SEQ ID NO: 2873 - RNA, 21 nt, synthetic construct
  source 1..21: mol_type = other RNA
agagaaaagcaaaactgcaaa

SEQ ID NO: 2874 - RNA, 21 nt, synthetic construct
  source 1..21: mol_type = other RNA
agaaaagcaaaactgcaagta

SEQ ID NO: 2875 - RNA, 21 nt, synthetic construct
  source 1..21: mol_type = other RNA
aaaagcaaaactgcaagtgaa

SEQ ID NO: 2876 - RNA, 21 nt, synthetic construct
  source 1..21: mol_type = other RNA
aaagcaaaactgcaagtgaca

SEQ ID NO: 2877 - RNA, 21 nt, synthetic construct
  source 1..21: mol_type = other RNA
aagcaaaactgcaagtgacta

SEQ ID NO: 2878 - RNA, 21 nt, synthetic construct
  source 1..21: mol_type = other RNA
aaactgcaagtgactgtgaaa

SEQ ID NO: 2879 - RNA, 21 nt, synthetic construct
  source 1..21: mol_type = other RNA
aactgcaagtgactgtgaata

SEQ ID NO: 2880 - RNA, 21 nt, synthetic construct
  source 1..21: mol_type = other RNA
actgcaagtgactgtgaataa

SEQ ID NO: 2881 - RNA, 21 nt, synthetic construct
  source 1..21: mol_type = other RNA
ctgcaagtgactgtgaataaa

SEQ ID NO: 2882 - RNA, 21 nt, synthetic construct
  source 1..21: mol_type = other RNA
tgcaagtgactgtgaataaaa

SEQ ID NO: 2883 - RNA, 21 nt, synthetic construct
  source 1..21: mol_type = other RNA
gcaagtgactgtgaataaaga

SEQ ID NO: 2884 - RNA, 21 nt, synthetic construct
  source 1..21: mol_type = other RNA
caagtgactgtgaataaagga

SEQ ID NO: 2885 - RNA, 21 nt, synthetic construct
  source 1..21: mol_type = other RNA
gactgtgaataaagggtgaaa

SEQ ID NO: 2886 - RNA, 21 nt, synthetic construct
  source 1..21: mol_type = other RNA
actgtgaataaagggtgaata

SEQ ID NO: 2887 - RNA, 21 nt, synthetic construct
  source 1..21: mol_type = other RNA
gtgaataaagggtgaatgtaa

SEQ ID NO: 2888 - RNA, 21 nt, synthetic construct
  source 1..21: mol_type = other RNA
tgaataaagggtgaatgtaga

SEQ ID NO: 2889 - RNA, 21 nt, synthetic construct
  source 1..21: mol_type = other RNA
gaataaagggtgaatgtagta

SEQ ID NO: 2890 - RNA, 21 nt, synthetic construct
  source 1..21: mol_type = other RNA
taaagggtgaatgtagtctca

SEQ ID NO: 2891 - RNA, 21 nt, synthetic construct
  source 1..21: mol_type = other RNA
aagggtgaatgtagtctcaaa

SEQ ID NO: 2892 - RNA, 21 nt, synthetic construct
  source 1..21: mol_type = other RNA
agggtgaatgtagtctcaaaa

SEQ ID NO: 2893 - RNA, 21 nt, synthetic construct
  source 1..21: mol_type = other RNA
atcctcaaagagctgtgttta

SEQ ID NO: 2894 - RNA, 21 nt, synthetic construct
  source 1..21: mol_type = other RNA
tcctcaaagagctgtgtttaa

SEQ ID NO: 2895 - RNA, 21 nt, synthetic construct
  source 1..21: mol_type = other RNA
cctcaaagagctgtgtttata

SEQ ID NO: 2896 - RNA, 21 nt, synthetic construct
  source 1..21: mol_type = other RNA
ctcaaagagctgtgtttatta

SEQ ID NO: 2897 - RNA, 21 nt, synthetic construct
  source 1..21: mol_type = other RNA
tcaaagagctgtgtttattta

SEQ ID NO: 2898 - RNA, 21 nt, synthetic construct
  source 1..21: mol_type = other RNA
caaagagctgtgtttatttca

SEQ ID NO: 2899 - RNA, 21 nt, synthetic construct
  source 1..21: mol_type = other RNA
aaagagctgtgtttatttcaa

SEQ ID NO: 2900 - RNA, 21 nt, synthetic construct
  source 1..21: mol_type = other RNA
agctgtgtttatttcattgaa

SEQ ID NO: 2901 - RNA, 21 nt, synthetic construct
  source 1..21: mol_type = other RNA
gctgtgtttatttcattgaca

SEQ ID NO: 2902 - RNA, 21 nt, synthetic construct
  source 1..21: mol_type = other RNA
gtgtttatttcattgacaaaa

SEQ ID NO: 2903 - RNA, 21 nt, synthetic construct
  source 1..21: mol_type = other RNA
atttcattgacaaatagatta

SEQ ID NO: 2904 - RNA, 21 nt, synthetic construct
  source 1..21: mol_type = other RNA
tttcattgacaaatagattaa

SEQ ID NO: 2905 - RNA, 21 nt, synthetic construct
  source 1..21: mol_type = other RNA
ttcattgacaaatagattata

SEQ ID NO: 2906 - RNA, 21 nt, synthetic construct
  source 1..21: mol_type = other RNA
tcattgacaaatagattatta

SEQ ID NO: 2907 - RNA, 21 nt, synthetic construct
  source 1..21: mol_type = other RNA
cattgacaaatagattattta

SEQ ID NO: 2908 - RNA, 21 nt, synthetic construct
  source 1..21: mol_type = other RNA
attgacaaatagattatttga

SEQ ID NO: 2909 - RNA, 21 nt, synthetic construct
  source 1..21: mol_type = other RNA
ttgacaaatagattatttgta

SEQ ID NO: 2910 - RNA, 21 nt, synthetic construct
  source 1..21: mol_type = other RNA
tgacaaatagattatttgtaa

SEQ ID NO: 2911 - RNA, 21 nt, synthetic construct
  source 1..21: mol_type = other RNA
gacaaatagattatttgtata

SEQ ID NO: 2912 - RNA, 21 nt, synthetic construct
  source 1..21: mol_type = other RNA
acaaatagattatttgtatta

SEQ ID NO: 2913 - RNA, 21 nt, synthetic construct
  source 1..21: mol_type = other RNA
caaatagattatttgtattca

SEQ ID NO: 2914 - RNA, 21 nt, synthetic construct
  source 1..21: mol_type = other RNA
aaatagattatttgtattcaa

SEQ ID NO: 2915 - RNA, 23 nt, synthetic construct
  source 1..23: mol_type = other RNA
tcaagcagtgggcagcagtcaac

SEQ ID NO: 2916 - RNA, 23 nt, synthetic construct
  source 1..23: mol_type = other RNA
ttccaagcagtgggcagcagtca

SEQ ID NO: 2917 - RNA, 23 nt, synthetic construct
  source 1..23: mol_type = other RNA
tctccaagcagtgggcagcagtc

SEQ ID NO: 2918 - RNA, 23 nt, synthetic construct
  source 1..23: mol_type = other RNA
ttctccaagcagtgggcagcagt

SEQ ID NO: 2919 - RNA, 23 nt, synthetic construct
  source 1..23: mol_type = other RNA
tcttctccaagcagtgggcagca

SEQ ID NO: 2920 - RNA, 23 nt, synthetic construct
  source 1..23: mol_type = other RNA
tacttctccaagcagtgggcagc

SEQ ID NO: 2921 - RNA, 23 nt, synthetic construct
  source 1..23: mol_type = other RNA
tggacttctccaagcagtgggca

SEQ ID NO: 2922 - RNA, 23 nt, synthetic construct
  source 1..23: mol_type = other RNA
tattcacttcttggtgtgcaccc

SEQ ID NO: 2923 - RNA, 23 nt, synthetic construct
  source 1..23: mol_type = other RNA
tagattcacttcttggtgtgcac

SEQ ID NO: 2924 - RNA, 23 nt, synthetic construct
  source 1..23: mol_type = other RNA
tcgagattcacttcttggtgtgc

SEQ ID NO: 2925 - RNA, 23 nt, synthetic construct
  source 1..23: mol_type = other RNA
ttcgagattcacttcttggtgtg

SEQ ID NO: 2926 - RNA, 23 nt, synthetic construct
  source 1..23: mol_type = other RNA
tttcgagattcacttcttggtgt

SEQ ID NO: 2927 - RNA, 23 nt, synthetic construct
  source 1..23: mol_type = other RNA
taacatgcggttcgagattcact

SEQ ID NO: 2928 - RNA, 23 nt, synthetic construct
  source 1..23: mol_type = other RNA
ttgaacatgcggttcgagattca

SEQ ID NO: 2929 - RNA, 23 nt, synthetic construct
  source 1..23: mol_type = other RNA
ttttcctgaacatgcggttcgag

SEQ ID NO: 2930 - RNA, 23 nt, synthetic construct
  source 1..23: mol_type = other RNA
tatttcctgaacatgcggttcga

SEQ ID NO: 2931 - RNA, 23 nt, synthetic construct
  source 1..23: mol_type = other RNA
ttatttcctgaacatgcggttcg

SEQ ID NO: 2932 - RNA, 23 nt, synthetic construct
  source 1..23: mol_type = other RNA
tctatttcctgaacatgcggttc

SEQ ID NO: 2933 - RNA, 23 nt, synthetic construct
  source 1..23: mol_type = other RNA
ttctatttcctgaacatgcggtt

SEQ ID NO: 2934 - RNA, 23 nt, synthetic construct
  source 1..23: mol_type = other RNA
ttcttttcgtgtgggctccaaga

SEQ ID NO: 2935 - RNA, 23 nt, synthetic construct
  source 1..23: mol_type = other RNA
tatcttttcgtgtgggctccaag

SEQ ID NO: 2936 - RNA, 23 nt, synthetic construct
  source 1..23: mol_type = other RNA
tatatcttttcgtgtgggctcca

SEQ ID NO: 2937 - RNA, 23 nt, synthetic construct
  source 1..23: mol_type = other RNA
taatatcttttcgtgtgggctcc

SEQ ID NO: 2938 - RNA, 23 nt, synthetic construct
  source 1..23: mol_type = other RNA
tcaatatcttttcgtgtgggctc

SEQ ID NO: 2939 - RNA, 23 nt, synthetic construct
  source 1..23: mol_type = other RNA
tgcaatatcttttcgtgtgggct

SEQ ID NO: 2940 - RNA, 23 nt, synthetic construct
  source 1..23: mol_type = other RNA
tggcaatatcttttcgtgtgggc

SEQ ID NO: 2941 - RNA, 23 nt, synthetic construct
  source 1..23: mol_type = other RNA
taggcaatatcttttcgtgtggg

SEQ ID NO: 2942 - RNA, 23 nt, synthetic construct
  source 1..23: mol_type = other RNA
taaggcaatatcttttcgtgtgg

SEQ ID NO: 2943 - RNA, 23 nt, synthetic construct
  source 1..23: mol_type = other RNA
tcaaggcaatatcttttcgtgtg

SEQ ID NO: 2944 - RNA, 23 nt, synthetic construct
  source 1..23: mol_type = other RNA
tgcaaggcaatatcttttcgtgt

SEQ ID NO: 2945 - RNA, 23 nt, synthetic construct
  source 1..23: mol_type = other RNA
tagcaaggcaatatcttttcgtg

SEQ ID NO: 2946 - RNA, 23 nt, synthetic construct
  source 1..23: mol_type = other RNA
ttagcaaggcaatatcttttcgt

SEQ ID NO: 2947 - RNA, 23 nt, synthetic construct
  source 1..23: mol_type = other RNA
tttagcaaggcaatatcttttcg

SEQ ID NO: 2948 - RNA, 23 nt, synthetic construct
  source 1..23: mol_type = other RNA
ttttagcaaggcaatatcttttc

SEQ ID NO: 2949 - RNA, 23 nt, synthetic construct
  source 1..23: mol_type = other RNA
tctttagcaaggcaatatctttt

SEQ ID NO: 2950 - RNA, 23 nt, synthetic construct
  source 1..23: mol_type = other RNA
tgctttagcaaggcaatatcttt

SEQ ID NO: 2951 - RNA, 23 nt, synthetic construct
  source 1..23: mol_type = other RNA
tagctttagcaaggcaatatctt

SEQ ID NO: 2952 - RNA, 23 nt, synthetic construct
  source 1..23: mol_type = other RNA
ttagctttagcaaggcaatatct

SEQ ID NO: 2953 - RNA, 23 nt, synthetic construct
  source 1..23: mol_type = other RNA
tttagctttagcaaggcaatatc

SEQ ID NO: 2954 - RNA, 23 nt, synthetic construct
  source 1..23: mol_type = other RNA
tactgcttagctttagcaaggca

SEQ ID NO: 2955 - RNA, 23 nt, synthetic construct
  source 1..23: mol_type = other RNA
tgactgcttagctttagcaaggc

SEQ ID NO: 2956 - RNA, 23 nt, synthetic construct
  source 1..23: mol_type = other RNA
taggactgcttagctttagcaag

SEQ ID NO: 2957 - RNA, 23 nt, synthetic construct
  source 1..23: mol_type = other RNA
tatgacggcaggactgcttagct

SEQ ID NO: 2958 - RNA, 23 nt, synthetic construct
  source 1..23: mol_type = other RNA
tgtgatgacggcaggactgctta

SEQ ID NO: 2959 - RNA, 23 nt, synthetic construct
  source 1..23: mol_type = other RNA
tagtgatgacggcaggactgctt

SEQ ID NO: 2960 - RNA, 23 nt, synthetic construct
  source 1..23: mol_type = other RNA
tcagtgatgacggcaggactgct

SEQ ID NO: 2961 - RNA, 23 nt, synthetic construct
  source 1..23: mol_type = other RNA
tgattactttgtcagtgatgacg

SEQ ID NO: 2962 - RNA, 23 nt, synthetic construct
  source 1..23: mol_type = other RNA
tggattactttgtcagtgatgac

SEQ ID NO: 2963 - RNA, 23 nt, synthetic construct
  source 1..23: mol_type = other RNA
tgggattactttgtcagtgatga

SEQ ID NO: 2964 - RNA, 23 nt, synthetic construct
  source 1..23: mol_type = other RNA
ttgggattactttgtcagtgatg

SEQ ID NO: 2965 - RNA, 23 nt, synthetic construct
  source 1..23: mol_type = other RNA
tctgggattactttgtcagtgat

SEQ ID NO: 2966 - RNA, 23 nt, synthetic construct
  source 1..23: mol_type = other RNA
tgctgggattactttgtcagtga

SEQ ID NO: 2967 - RNA, 23 nt, synthetic construct
  source 1..23: mol_type = other RNA
tagctgggattactttgtcagtg

SEQ ID NO: 2968 - RNA, 23 nt, synthetic construct
  source 1..23: mol_type = other RNA
taagctgggattactttgtcagt

SEQ ID NO: 2969 - RNA, 23 nt, synthetic construct
  source 1..23: mol_type = other RNA
tcaagctgggattactttgtcag

SEQ ID NO: 2970 - RNA, 23 nt, synthetic construct
  source 1..23: mol_type = other RNA
tacaagctgggattactttgtca

SEQ ID NO: 2971 - RNA, 23 nt, synthetic construct
  source 1..23: mol_type = other RNA
tgacaagctgggattactttgtc

SEQ ID NO: 2972 - RNA, 23 nt, synthetic construct
  source 1..23: mol_type = other RNA
tagacaagctgggattactttgt

SEQ ID NO: 2973 - RNA, 23 nt, synthetic construct
  source 1..23: mol_type = other RNA
ttggcagacaagctgggattact

SEQ ID NO: 2974 - RNA, 23 nt, synthetic construct
  source 1..23: mol_type = other RNA
tgatggcagacaagctgggatta

SEQ ID NO: 2975 - RNA, 23 nt, synthetic construct
  source 1..23: mol_type = other RNA
tgaaacattcggtccggtcagcg

SEQ ID NO: 2976 - RNA, 23 nt, synthetic construct
  source 1..23: mol_type = other RNA
tatgaaacattcggtccggtcag

SEQ ID NO: 2977 - RNA, 23 nt, synthetic construct
  source 1..23: mol_type = other RNA
tgatgaaacattcggtccggtca

SEQ ID NO: 2978 - RNA, 23 nt, synthetic construct
  source 1..23: mol_type = other RNA
ttgatgaaacattcggtccggtc

SEQ ID NO: 2979 - RNA, 23 nt, synthetic construct
  source 1..23: mol_type = other RNA
tgtgatgaaacattcggtccggt

SEQ ID NO: 2980 - RNA, 23 nt, synthetic construct
  source 1..23: mol_type = other RNA
tagtgatgaaacattcggtccgg

SEQ ID NO: 2981 - RNA, 23 nt, synthetic construct
  source 1..23: mol_type = other RNA
tcagtgatgaaacattcggtccg

SEQ ID NO: 2982 - RNA, 23 nt, synthetic construct
  source 1..23: mol_type = other RNA
tagccagtgatgaaacattcggt

SEQ ID NO: 2983 - RNA, 23 nt, synthetic construct
  source 1..23: mol_type = other RNA
taaaagtaccttgggtttctccc

SEQ ID NO: 2984 - RNA, 23 nt, synthetic construct
  source 1..23: mol_type = other RNA
tcaaaagtaccttgggtttctcc

SEQ ID NO: 2985 - RNA, 23 nt, synthetic construct
  source 1..23: mol_type = other RNA
tccaaaagtaccttgggtttctc

SEQ ID NO: 2986 - RNA, 23 nt, synthetic construct
  source 1..23: mol_type = other RNA
ttccaaaagtaccttgggtttct

SEQ ID NO: 2987 - RNA, 23 nt, synthetic construct
  source 1..23: mol_type = other RNA
tctccaaaagtaccttgggtttc

SEQ ID NO: 2988 - RNA, 23 nt, synthetic construct
  source 1..23: mol_type = other RNA
tgctccaaaagtaccttgggttt

SEQ ID NO: 2989 - RNA, 23 nt, synthetic construct
  source 1..23: mol_type = other RNA
tagctccaaaagtaccttgggtt

SEQ ID NO: 2990 - RNA, 23 nt, synthetic construct
  source 1..23: mol_type = other RNA
tccagctccaaaagtaccttggg

SEQ ID NO: 2991 - RNA, 23 nt, synthetic construct
  source 1..23: mol_type = other RNA
tagaaggccagctccaaaagtac

SEQ ID NO: 2992 - RNA, 23 nt, synthetic construct
  source 1..23: mol_type = other RNA
tttgagaaggccagctccaaaag

SEQ ID NO: 2993 - RNA, 23 nt, synthetic construct
  source 1..23: mol_type = other RNA
tcttgagaaggccagctccaaaa

SEQ ID NO: 2994 - RNA, 23 nt, synthetic construct
  source 1..23: mol_type = other RNA
tccttgagaaggccagctccaaa

SEQ ID NO: 2995 - RNA, 23 nt, synthetic construct
  source 1..23: mol_type = other RNA
ttccttgagaaggccagctccaa

SEQ ID NO: 2996 - RNA, 23 nt, synthetic construct
  source 1..23: mol_type = other RNA
ttcacagggagctgggcttcctt

SEQ ID NO: 2997 - RNA, 23 nt, synthetic construct
  source 1..23: mol_type = other RNA
tatcacagggagctgggcttcct

SEQ ID NO: 2998 - RNA, 23 nt, synthetic construct
  source 1..23: mol_type = other RNA
taatcacagggagctgggcttcc

SEQ ID NO: 2999 - RNA, 23 nt, synthetic construct
  source 1..23: mol_type = other RNA
tcaatcacagggagctgggcttc

SEQ ID NO: 3000 - RNA, 23 nt, synthetic construct
  source 1..23: mol_type = other RNA
ttcaatcacagggagctgggctt

SEQ ID NO: 3001 - RNA, 23 nt, synthetic construct
  source 1..23: mol_type = other RNA
tctcaatcacagggagctgggct

SEQ ID NO: 3002 - RNA, 23 nt, synthetic construct
  source 1..23: mol_type = other RNA
ttctcaatcacagggagctgggc

SEQ ID NO: 3003 - RNA, 23 nt, synthetic construct
  source 1..23: mol_type = other RNA
tttctcaatcacagggagctggg

SEQ ID NO: 3004 - RNA, 23 nt, synthetic construct
  source 1..23: mol_type = other RNA
tattctcaatcacagggagctgg

SEQ ID NO: 3005 - RNA, 23 nt, synthetic construct
  source 1..23: mol_type = other RNA
ttattctcaatcacagggagctg

SEQ ID NO: 3006 - RNA, 23 nt, synthetic construct
  source 1..23: mol_type = other RNA
tttattctcaatcacagggagct

SEQ ID NO: 3007 - RNA, 23 nt, synthetic construct
  source 1..23: mol_type = other RNA
ttttattctcaatcacagggagc

SEQ ID NO: 3008 - RNA, 23 nt, synthetic construct
  source 1..23: mol_type = other RNA
tctttattctcaatcacagggag

SEQ ID NO: 3009 - RNA, 23 nt, synthetic construct
  source 1..23: mol_type = other RNA
tactttattctcaatcacaggga

SEQ ID NO: 3010 - RNA, 23 nt, synthetic construct
  source 1..23: mol_type = other RNA
tcactttattctcaatcacaggg

SEQ ID NO: 3011 - RNA, 23 nt, synthetic construct
  source 1..23: mol_type = other RNA
tacactttattctcaatcacagg

SEQ ID NO: 3012 - RNA, 23 nt, synthetic construct
  source 1..23: mol_type = other RNA
tcacactttattctcaatcacag

SEQ ID NO: 3013 - RNA, 23 nt, synthetic construct
  source 1..23: mol_type = other RNA
tgcacactttattctcaatcaca

SEQ ID NO: 3014 - RNA, 23 nt, synthetic construct
  source 1..23: mol_type = other RNA
ttgcacactttattctcaatcac

SEQ ID NO: 3015 - RNA, 23 nt, synthetic construct
  source 1..23: mol_type = other RNA
tttgcacactttattctcaatca

SEQ ID NO: 3016 - RNA, 23 nt, synthetic construct
  source 1..23: mol_type = other RNA
tattgcacactttattctcaatc

SEQ ID NO: 3017 - RNA, 23 nt, synthetic construct
  source 1..23: mol_type = other RNA
tgattgcacactttattctcaat

SEQ ID NO: 3018 - RNA, 23 nt, synthetic construct
  source 1..23: mol_type = other RNA
tcgattgcacactttattctcaa

SEQ ID NO: 3019 - RNA, 23 nt, synthetic construct
  source 1..23: mol_type = other RNA
tagcgattgcacactttattctc

SEQ ID NO: 3020 - RNA, 23 nt, synthetic construct
  source 1..23: mol_type = other RNA
ttagcgattgcacactttattct

SEQ ID NO: 3021 - RNA, 23 nt, synthetic construct
  source 1..23: mol_type = other RNA
tatagcgattgcacactttattc

SEQ ID NO: 3022 - RNA, 23 nt, synthetic construct
  source 1..23: mol_type = other RNA
tcatagcgattgcacactttatt

SEQ ID NO: 3023 - RNA, 23 nt, synthetic construct
  source 1..23: mol_type = other RNA
ttcatagcgattgcacactttat

SEQ ID NO: 3024 - RNA, 23 nt, synthetic construct
  source 1..23: mol_type = other RNA
tctcatagcgattgcacacttta

SEQ ID NO: 3025 - RNA, 23 nt, synthetic construct
  source 1..23: mol_type = other RNA
tactcatagcgattgcacacttt

SEQ ID NO: 3026 - RNA, 23 nt, synthetic construct
  source 1..23: mol_type = other RNA
taactcatagcgattgcacactt

SEQ ID NO: 3027 - RNA, 23 nt, synthetic construct
  source 1..23: mol_type = other RNA
taaactcatagcgattgcacact

SEQ ID NO: 3028 - RNA, 23 nt, synthetic construct
  source 1..23: mol_type = other RNA
tgaaactcatagcgattgcacac

SEQ ID NO: 3029 - RNA, 23 nt, synthetic construct
  source 1..23: mol_type = other RNA
tagaaactcatagcgattgcaca

SEQ ID NO: 3030 - RNA, 23 nt, synthetic construct
  source 1..23: mol_type = other RNA
ttcagaaactcatagcgattgca

SEQ ID NO: 3031 - RNA, 23 nt, synthetic construct
  source 1..23: mol_type = other RNA
tttcagaaactcatagcgattgc

SEQ ID NO: 3032 - RNA, 23 nt, synthetic construct
  source 1..23: mol_type = other RNA
tattcagaaactcatagcgattg

SEQ ID NO: 3033 - RNA, 23 nt, synthetic construct
  source 1..23: mol_type = other RNA
tcattcagaaactcatagcgatt

SEQ ID NO: 3034 - RNA, 23 nt, synthetic construct
  source 1..23: mol_type = other RNA
tccattcagaaactcatagcgat

SEQ ID NO: 3035 - RNA, 23 nt, synthetic construct
  source 1..23: mol_type = other RNA
ttccattcagaaactcatagcga

SEQ ID NO: 3036 - RNA, 23 nt, synthetic construct
  source 1..23: mol_type = other RNA
tttccattcagaaactcatagcg

SEQ ID NO: 3037 - RNA, 23 nt, synthetic construct
  source 1..23: mol_type = other RNA
tcttccattcagaaactcatagc

SEQ ID NO: 3038 - RNA, 23 nt, synthetic construct
  source 1..23: mol_type = other RNA
ttcttccattcagaaactcatag

SEQ ID NO: 3039 - RNA, 23 nt, synthetic construct
  source 1..23: mol_type = other RNA
tctcttccattcagaaactcata

SEQ ID NO: 3040 - RNA, 23 nt, synthetic construct
  source 1..23: mol_type = other RNA
tactcttccattcagaaactcat

SEQ ID NO: 3041 - RNA, 23 nt, synthetic construct
  source 1..23: mol_type = other RNA
tggactcttccattcagaaactc

SEQ ID NO: 3042 - RNA, 23 nt, synthetic construct
  source 1..23: mol_type = other RNA
ttggactcttccattcagaaact

SEQ ID NO: 3043 - RNA, 23 nt, synthetic construct
  source 1..23: mol_type = other RNA
tttggactcttccattcagaaac

SEQ ID NO: 3044 - RNA, 23 nt, synthetic construct
  source 1..23: mol_type = other RNA
tattggactcttccattcagaaa

SEQ ID NO: 3045 - RNA, 23 nt, synthetic construct
  source 1..23: mol_type = other RNA
tgattggactcttccattcagaa

SEQ ID NO: 3046 - RNA, 23 nt, synthetic construct
  source 1..23: mol_type = other RNA
ttggattggactcttccattcag

SEQ ID NO: 3047 - RNA, 23 nt, synthetic construct
  source 1..23: mol_type = other RNA
taaatgcccagcacagagttcgg

SEQ ID NO: 3048 - RNA, 23 nt, synthetic construct
  source 1..23: mol_type = other RNA
tcaaatgcccagcacagagttcg

SEQ ID NO: 3049 - RNA, 23 nt, synthetic construct
  source 1..23: mol_type = other RNA
tgccaaatgcccagcacagagtt

SEQ ID NO: 3050 - RNA, 23 nt, synthetic construct
  source 1..23: mol_type = other RNA
tggccaaatgcccagcacagagt

SEQ ID NO: 3051 - RNA, 23 nt, synthetic construct
  source 1..23: mol_type = other RNA
tccggccaaatgcccagcacaga

SEQ ID NO: 3052 - RNA, 23 nt, synthetic construct
  source 1..23: mol_type = other RNA
ttccggccaaatgcccagcacag

SEQ ID NO: 3053 - RNA, 23 nt, synthetic construct
  source 1..23: mol_type = other RNA
tctccggccaaatgcccagcaca

SEQ ID NO: 3054 - RNA, 23 nt, synthetic construct
  source 1..23: mol_type = other RNA
ttgtatttgtccttctcgaagca

SEQ ID NO: 3055 - RNA, 23 nt, synthetic construct
  source 1..23: mol_type = other RNA
tatgtatttgtccttctcgaagc

SEQ ID NO: 3056 - RNA, 23 nt, synthetic construct
  source 1..23: mol_type = other RNA
taatgtatttgtccttctcgaag

SEQ ID NO: 3057 - RNA, 23 nt, synthetic construct
  source 1..23: mol_type = other RNA
taaatgtatttgtccttctcgaa

SEQ ID NO: 3058 - RNA, 23 nt, synthetic construct
  source 1..23: mol_type = other RNA
taaaatgtatttgtccttctcga

SEQ ID NO: 3059 - RNA, 23 nt, synthetic construct
  source 1..23: mol_type = other RNA
ttaaaatgtatttgtccttctcg

SEQ ID NO: 3060 - RNA, 23 nt, synthetic construct
  source 1..23: mol_type = other RNA
tgtaaaatgtatttgtccttctc

SEQ ID NO: 3061 - RNA, 23 nt, synthetic construct
  source 1..23: mol_type = other RNA
ttgtaaaatgtatttgtccttct

SEQ ID NO: 3062 - RNA, 23 nt, synthetic construct
  source 1..23: mol_type = other RNA
tttgtaaaatgtatttgtccttc

SEQ ID NO: 3063 - RNA, 23 nt, synthetic construct
  source 1..23: mol_type = other RNA
tcttgtaaaatgtatttgtcctt

SEQ ID NO: 3064 - RNA, 23 nt, synthetic construct
  source 1..23: mol_type = other RNA
tccttgtaaaatgtatttgtcct

SEQ ID NO: 3065 - RNA, 23 nt, synthetic construct
  source 1..23: mol_type = other RNA
ttccttgtaaaatgtatttgtcc

SEQ ID NO: 3066 - RNA, 23 nt, synthetic construct
  source 1..23: mol_type = other RNA
tacatagacaccaggcttattgg

SEQ ID NO: 3067 - RNA, 23 nt, synthetic construct
  source 1..23: mol_type = other RNA
taacatagacaccaggcttattg

SEQ ID NO: 3068 - RNA, 23 nt, synthetic construct
  source 1..23: mol_type = other RNA
tgaacatagacaccaggcttatt

SEQ ID NO: 3069 - RNA, 23 nt, synthetic construct
  source 1..23: mol_type = other RNA
tacgaacatagacaccaggctta

SEQ ID NO: 3070 - RNA, 23 nt, synthetic construct
  source 1..23: mol_type = other RNA
tacacgaacatagacaccaggct

SEQ ID NO: 3071 - RNA, 23 nt, synthetic construct
  source 1..23: mol_type = other RNA
taacacgaacatagacaccaggc

SEQ ID NO: 3072 - RNA, 23 nt, synthetic construct
  source 1..23: mol_type = other RNA
taaacacgaacatagacaccagg

SEQ ID NO: 3073 - RNA, 23 nt, synthetic construct
  source 1..23: mol_type = other RNA
tgaaacacgaacatagacaccag

SEQ ID NO: 3074 - RNA, 23 nt, synthetic construct
  source 1..23: mol_type = other RNA
ttgaaacacgaacatagacacca

SEQ ID NO: 3075 - RNA, 23 nt, synthetic construct
  source 1..23: mol_type = other RNA
tttgaaacacgaacatagacacc

SEQ ID NO: 3076 - RNA, 23 nt, synthetic construct
  source 1..23: mol_type = other RNA
tcttgaaacacgaacatagacac

SEQ ID NO: 3077 - RNA, 23 nt, synthetic construct
  source 1..23: mol_type = other RNA
tccttgaaacacgaacatagaca

SEQ ID NO: 3078 - RNA, 23 nt, synthetic construct
  source 1..23: mol_type = other RNA
taccttgaaacacgaacatagac

SEQ ID NO: 3079 - RNA, 23 nt, synthetic construct
  source 1..23: mol_type = other RNA
taaccttgaaacacgaacataga

SEQ ID NO: 3080 - RNA, 23 nt, synthetic construct
  source 1..23: mol_type = other RNA
taaaccttgaaacacgaacatag

SEQ ID NO: 3081 - RNA, 23 nt, synthetic construct
  source 1..23: mol_type = other RNA
tcaaaccttgaaacacgaacata

SEQ ID NO: 3082 - RNA, 23 nt, synthetic construct
  source 1..23: mol_type = other RNA
tacaaaccttgaaacacgaacat

SEQ ID NO: 3083 - RNA, 23 nt, synthetic construct
  source 1..23: mol_type = other RNA
taacaaaccttgaaacacgaaca

SEQ ID NO: 3084 - RNA, 23 nt, synthetic construct
  source 1..23: mol_type = other RNA
ttaacaaaccttgaaacacgaac

SEQ ID NO: 3085 - RNA, 23 nt, synthetic construct
  source 1..23: mol_type = other RNA
tgtaacaaaccttgaaacacgaa

SEQ ID NO: 3086 - RNA, 23 nt, synthetic construct
  source 1..23: mol_type = other RNA
tagtaacaaaccttgaaacacga

SEQ ID NO: 3087 - RNA, 23 nt, synthetic construct
  source 1..23: mol_type = other RNA
taagtaacaaaccttgaaacacg

SEQ ID NO: 3088 - RNA, 23 nt, synthetic construct
  source 1..23: mol_type = other RNA
tcaagtaacaaaccttgaaacac

SEQ ID NO: 3089 - RNA, 23 nt, synthetic construct
  source 1..23: mol_type = other RNA
tccaagtaacaaaccttgaaaca

SEQ ID NO: 3090 - RNA, 23 nt, synthetic construct
  source 1..23: mol_type = other RNA
ttccaagtaacaaaccttgaaac

SEQ ID NO: 3091 - RNA, 23 nt, synthetic construct
  source 1..23: mol_type = other RNA
tatccaagtaacaaaccttgaaa

SEQ ID NO: 3092 - RNA, 23 nt, synthetic construct
  source 1..23: mol_type = other RNA
tctccctcaatccaagtaacaaa

SEQ ID NO: 3093 - RNA, 23 nt, synthetic construct
  source 1..23: mol_type = other RNA
tactccctcaatccaagtaacaa

SEQ ID NO: 3094 - RNA, 23 nt, synthetic construct
  source 1..23: mol_type = other RNA
ttcactccctcaatccaagtaac

SEQ ID NO: 3095 - RNA, 23 nt, synthetic construct
  source 1..23: mol_type = other RNA
tatcactccctcaatccaagtaa

SEQ ID NO: 3096 - RNA, 23 nt, synthetic construct
  source 1..23: mol_type = other RNA
tcatcactccctcaatccaagta

SEQ ID NO: 3097 - RNA, 23 nt, synthetic construct
  source 1..23: mol_type = other RNA
ttcatcactccctcaatccaagt

SEQ ID NO: 3098 - RNA, 23 nt, synthetic construct
  source 1..23: mol_type = other RNA
tctcatcactccctcaatccaag

SEQ ID NO: 3099 - RNA, 23 nt, synthetic construct
  source 1..23: mol_type = other RNA
ttctcatcactccctcaatccaa

SEQ ID NO: 3100 - RNA, 23 nt, synthetic construct
  source 1..23: mol_type = other RNA
tttctcatcactccctcaatcca

SEQ ID NO: 3101 - RNA, 23 nt, synthetic construct
  source 1..23: mol_type = other RNA
ttttctcatcactccctcaatcc

SEQ ID NO: 3102 - RNA, 23 nt, synthetic construct
  source 1..23: mol_type = other RNA
tatttctcatcactccctcaatc

SEQ ID NO: 3103 - RNA, 23 nt, synthetic construct
  source 1..23: mol_type = other RNA
ttatttctcatcactccctcaat

SEQ ID NO: 3104 - RNA, 23 nt, synthetic construct
  source 1..23: mol_type = other RNA
tttatttctcatcactccctcaa

SEQ ID NO: 3105 - RNA, 23 nt, synthetic construct
  source 1..23: mol_type = other RNA
taattatttctcatcactccctc

SEQ ID NO: 3106 - RNA, 23 nt, synthetic construct
  source 1..23: mol_type = other RNA
tttaattatttctcatcactccc

SEQ ID NO: 3107 - RNA, 23 nt, synthetic construct
  source 1..23: mol_type = other RNA
tattaattatttctcatcactcc

SEQ ID NO: 3108 - RNA, 23 nt, synthetic construct
  source 1..23: mol_type = other RNA
taattaattatttctcatcactc

SEQ ID NO: 3109 - RNA, 23 nt, synthetic construct
  source 1..23: mol_type = other RNA
tcaattaattatttctcatcact

SEQ ID NO: 3110 - RNA, 23 nt, synthetic construct
  source 1..23: mol_type = other RNA
tccaattaattatttctcatcac

SEQ ID NO: 3111 - RNA, 23 nt, synthetic construct
  source 1..23: mol_type = other RNA
ttccaattaattatttctcatca

SEQ ID NO: 3112 - RNA, 23 nt, synthetic construct
  source 1..23: mol_type = other RNA
tgtcactctgtctcccgtccaat

SEQ ID NO: 3113 - RNA, 23 nt, synthetic construct
  source 1..23: mol_type = other RNA
tcgtcactctgtctcccgtccaa

SEQ ID NO: 3114 - RNA, 23 nt, synthetic construct
  source 1..23: mol_type = other RNA
tgcgtcactctgtctcccgtcca

SEQ ID NO: 3115 - RNA, 23 nt, synthetic construct
  source 1..23: mol_type = other RNA
ttgcgtcactctgtctcccgtcc

SEQ ID NO: 3116 - RNA, 23 nt, synthetic construct
  source 1..23: mol_type = other RNA
tgtcagtgcgtcactctgtctcc

SEQ ID NO: 3117 - RNA, 23 nt, synthetic construct
  source 1..23: mol_type = other RNA
tgagtcagtgcgtcactctgtct

SEQ ID NO: 3118 - RNA, 23 nt, synthetic construct
  source 1..23: mol_type = other RNA
tgtgagtcagtgcgtcactctgt

SEQ ID NO: 3119 - RNA, 23 nt, synthetic construct
  source 1..23: mol_type = other RNA
tggtgagtcagtgcgtcactctg

SEQ ID NO: 3120 - RNA, 23 nt, synthetic construct
  source 1..23: mol_type = other RNA
taggtgagtcagtgcgtcactct

SEQ ID NO: 3121 - RNA, 23 nt, synthetic construct
  source 1..23: mol_type = other RNA
tctaggtgagtcagtgcgtcact

SEQ ID NO: 3122 - RNA, 23 nt, synthetic construct
  source 1..23: mol_type = other RNA
ttctaggtgagtcagtgcgtcac

SEQ ID NO: 3123 - RNA, 23 nt, synthetic construct
  source 1..23: mol_type = other RNA
tctctaggtgagtcagtgcgtca

SEQ ID NO: 3124 - RNA, 23 nt, synthetic construct
  source 1..23: mol_type = other RNA
tcctctaggtgagtcagtgcgtc

SEQ ID NO: 3125 - RNA, 23 nt, synthetic construct
  source 1..23: mol_type = other RNA
tgcctctaggtgagtcagtgcgt

SEQ ID NO: 3126 - RNA, 23 nt, synthetic construct
  source 1..23: mol_type = other RNA
tagcctctaggtgagtcagtgcg

SEQ ID NO: 3127 - RNA, 23 nt, synthetic construct
  source 1..23: mol_type = other RNA
tcagcctctaggtgagtcagtgc

SEQ ID NO: 3128 - RNA, 23 nt, synthetic construct
  source 1..23: mol_type = other RNA
tctaaatccctacccacgttcca

SEQ ID NO: 3129 - RNA, 23 nt, synthetic construct
  source 1..23: mol_type = other RNA
ttgctaaatccctacccacgttc

SEQ ID NO: 3130 - RNA, 23 nt, synthetic construct
  source 1..23: mol_type = other RNA
tgcatgctaaatccctacccacg

SEQ ID NO: 3131 - RNA, 23 nt, synthetic construct
  source 1..23: mol_type = other RNA
tagcatgctaaatccctacccac

SEQ ID NO: 3132 - RNA, 23 nt, synthetic construct
  source 1..23: mol_type = other RNA
tcagcatgctaaatccctaccca

SEQ ID NO: 3133 - RNA, 23 nt, synthetic construct
  source 1..23: mol_type = other RNA
tccagcatgctaaatccctaccc

SEQ ID NO: 3134 - RNA, 23 nt, synthetic construct
  source 1..23: mol_type = other RNA
ttccagcatgctaaatccctacc

SEQ ID NO: 3135 - RNA, 23 nt, synthetic construct
  source 1..23: mol_type = other RNA
tgttatttccagcatgctaaatc

SEQ ID NO: 3136 - RNA, 23 nt, synthetic construct
  source 1..23: mol_type = other RNA
tagttatttccagcatgctaaat

SEQ ID NO: 3137 - RNA, 23 nt, synthetic construct
  source 1..23: mol_type = other RNA
tcagttatttccagcatgctaaa

SEQ ID NO: 3138 - RNA, 23 nt, synthetic construct
  source 1..23: mol_type = other RNA
tccagttatttccagcatgctaa

SEQ ID NO: 3139 - RNA, 23 nt, synthetic construct
  source 1..23: mol_type = other RNA
tgccagttatttccagcatgcta

SEQ ID NO: 3140 - RNA, 23 nt, synthetic construct
  source 1..23: mol_type = other RNA
ttgccagttatttccagcatgct

SEQ ID NO: 3141 - RNA, 23 nt, synthetic construct
  source 1..23: mol_type = other RNA
tctgccagttatttccagcatgc

SEQ ID NO: 3142 - RNA, 23 nt, synthetic construct
  source 1..23: mol_type = other RNA
tactgccagttatttccagcatg

SEQ ID NO: 3143 - RNA, 23 nt, synthetic construct
  source 1..23: mol_type = other RNA
ttactgccagttatttccagcat

SEQ ID NO: 3144 - RNA, 23 nt, synthetic construct
  source 1..23: mol_type = other RNA
tttactgccagttatttccagca

SEQ ID NO: 3145 - RNA, 23 nt, synthetic construct
  source 1..23: mol_type = other RNA
tattactgccagttatttccagc

SEQ ID NO: 3146 - RNA, 23 nt, synthetic construct
  source 1..23: mol_type = other RNA
tgattactgccagttatttccag

SEQ ID NO: 3147 - RNA, 23 nt, synthetic construct
  source 1..23: mol_type = other RNA
ttgattactgccagttatttcca

SEQ ID NO: 3148 - RNA, 23 nt, synthetic construct
  source 1..23: mol_type = other RNA
tttgattactgccagttatttcc

SEQ ID NO: 3149 - RNA, 23 nt, synthetic construct
  source 1..23: mol_type = other RNA
ttttgattactgccagttatttc

SEQ ID NO: 3150 - RNA, 23 nt, synthetic construct
  source 1..23: mol_type = other RNA
tgtttgattactgccagttattt

SEQ ID NO: 3151 - RNA, 23 nt, synthetic construct
  source 1..23: mol_type = other RNA
ttcgtttgattactgccagttat

SEQ ID NO: 3152 - RNA, 23 nt, synthetic construct
  source 1..23: mol_type = other RNA
tttcgtttgattactgccagtta

SEQ ID NO: 3153 - RNA, 23 nt, synthetic construct
  source 1..23: mol_type = other RNA
tcttcgtttgattactgccagtt

SEQ ID NO: 3154 - RNA, 23 nt, synthetic construct
  source 1..23: mol_type = other RNA
ttcttcgtttgattactgccagt

SEQ ID NO: 3155 - RNA, 23 nt, synthetic construct
  source 1..23: mol_type = other RNA
tgtcttcgtttgattactgccag

SEQ ID NO: 3156 - RNA, 23 nt, synthetic construct
  source 1..23: mol_type = other RNA
ttgtcttcgtttgattactgcca

SEQ ID NO: 3157 - RNA, 23 nt, synthetic construct
  source 1..23: mol_type = other RNA
tagtgtcttcgtttgattactgc

SEQ ID NO: 3158 - RNA, 23 nt, synthetic construct
  source 1..23: mol_type = other RNA
tgacagtgtcttcgtttgattac

SEQ ID NO: 3159 - RNA, 23 nt, synthetic construct
  source 1..23: mol_type = other RNA
tggacagtgtcttcgtttgatta

SEQ ID NO: 3160 - RNA, 23 nt, synthetic construct
  source 1..23: mol_type = other RNA
taaaatgccgaggtttggcgtag

SEQ ID NO: 3161 - RNA, 23 nt, synthetic construct
  source 1..23: mol_type = other RNA
taaaaatgccgaggtttggcgta

SEQ ID NO: 3162 - RNA, 23 nt, synthetic construct
  source 1..23: mol_type = other RNA
taaaaaatgccgaggtttggcgt

SEQ ID NO: 3163 - RNA, 23 nt, synthetic construct
  source 1..23: mol_type = other RNA
tcaaaaaatgccgaggtttggcg

SEQ ID NO: 3164 - RNA, 23 nt, synthetic construct
  source 1..23: mol_type = other RNA
tacaaaaaatgccgaggtttggc

SEQ ID NO: 3165 - RNA, 23 nt, synthetic construct
  source 1..23: mol_type = other RNA
tcacaaaaaatgccgaggtttgg

SEQ ID NO: 3166 - RNA, 23 nt, synthetic construct
  source 1..23: mol_type = other RNA
tacacaaaaaatgccgaggtttg

SEQ ID NO: 3167 - RNA, 23 nt, synthetic construct
  source 1..23: mol_type = other RNA
taacacaaaaaatgccgaggttt

SEQ ID NO: 3168 - RNA, 23 nt, synthetic construct
  source 1..23: mol_type = other RNA
ttaacacaaaaaatgccgaggtt

SEQ ID NO: 3169 - RNA, 23 nt, synthetic construct
  source 1..23: mol_type = other RNA
tataacacaaaaaatgccgaggt

SEQ ID NO: 3170 - RNA, 23 nt, synthetic construct
  source 1..23: mol_type = other RNA
taataacacaaaaaatgccgagg

SEQ ID NO: 3171 - RNA, 23 nt, synthetic construct
  source 1..23: mol_type = other RNA
taaaataacacaaaaaatgccga

SEQ ID NO: 3172 - RNA, 23 nt, synthetic construct
  source 1..23: mol_type = other RNA
tgaaaataacacaaaaaatgccg

SEQ ID NO: 3173 - RNA, 23 nt, synthetic construct
  source 1..23: mol_type = other RNA
tagaaaataacacaaaaaatgcc

SEQ ID NO: 3174 - RNA, 23 nt, synthetic construct
  source 1..23: mol_type = other RNA
tcagtcagaaaataacacaaaaa

SEQ ID NO: 3175 - RNA, 23 nt, synthetic construct
  source 1..23: mol_type = other RNA
tgcagtcagaaaataacacaaaa

SEQ ID NO: 3176 - RNA, 23 nt, synthetic construct
  source 1..23: mol_type = other RNA
tagcagtcagaaaataacacaaa

SEQ ID NO: 3177 - RNA, 23 nt, synthetic construct
  source 1..23: mol_type = other RNA
tcagcagtcagaaaataacacaa

SEQ ID NO: 3178 - RNA, 23 nt, synthetic construct
  source 1..23: mol_type = other RNA
tccagcagtcagaaaataacaca

SEQ ID NO: 3179 - RNA, 23 nt, synthetic construct
  source 1..23: mol_type = other RNA
ttccagcagtcagaaaataacac

SEQ ID NO: 3180 - RNA, 23 nt, synthetic construct
  source 1..23: mol_type = other RNA
tatccagcagtcagaaaataaca

SEQ ID NO: 3181 - RNA, 23 nt, synthetic construct
  source 1..23: mol_type = other RNA
taatccagcagtcagaaaataac

SEQ ID NO: 3182 - RNA, 23 nt, synthetic construct
  source 1..23: mol_type = other RNA
tgaatccagcagtcagaaaataa

SEQ ID NO: 3183 - RNA, 23 nt, synthetic construct
  source 1..23: mol_type = other RNA
ttacagaatccagcagtcagaaa

SEQ ID NO: 3184 - RNA, 23 nt, synthetic construct
  source 1..23: mol_type = other RNA
tcatagctatgtcaccttactac

SEQ ID NO: 3185 - RNA, 23 nt, synthetic construct
  source 1..23: mol_type = other RNA
ttcatagctatgtcaccttacta

SEQ ID NO: 3186 - RNA, 23 nt, synthetic construct
  source 1..23: mol_type = other RNA
tgtcatagctatgtcaccttact

SEQ ID NO: 3187 - RNA, 23 nt, synthetic construct
  source 1..23: mol_type = other RNA
ttgtcatagctatgtcaccttac

SEQ ID NO: 3188 - RNA, 23 nt, synthetic construct
  source 1..23: mol_type = other RNA
tatgtcatagctatgtcacctta

SEQ ID NO: 3189 - RNA, 23 nt, synthetic construct
  source 1..23: mol_type = other RNA
taatgtcatagctatgtcacctt

SEQ ID NO: 3190 - RNA, 23 nt, synthetic construct
  source 1..23: mol_type = other RNA
taaatgtcatagctatgtcacct

SEQ ID NO: 3191 - RNA, 23 nt, synthetic construct
  source 1..23: mol_type = other RNA
tcaaatgtcatagctatgtcacc

SEQ ID NO: 3192 - RNA, 23 nt, synthetic construct
  source 1..23: mol_type = other RNA
taacaaatgtcatagctatgtca

SEQ ID NO: 3193 - RNA, 23 nt, synthetic construct
  source 1..23: mol_type = other RNA
ttaacaaatgtcatagctatgtc

SEQ ID NO: 3194 - RNA, 23 nt, synthetic construct
  source 1..23: mol_type = other RNA
tttaacaaatgtcatagctatgt

SEQ ID NO: 3195 - RNA, 23 nt, synthetic construct
  source 1..23: mol_type = other RNA
ttttaacaaatgtcatagctatg

SEQ ID NO: 3196 - RNA, 23 nt, synthetic construct
  source 1..23: mol_type = other RNA
tttttaacaaatgtcatagctat

SEQ ID NO: 3197 - RNA, 23 nt, synthetic construct
  source 1..23: mol_type = other RNA
ttttttaacaaatgtcatagcta

SEQ ID NO: 3198 - RNA, 23 nt, synthetic construct
  source 1..23: mol_type = other RNA
tatttttaacaaatgtcatagct

SEQ ID NO: 3199 - RNA, 23 nt, synthetic construct
  source 1..23: mol_type = other RNA
ttatttttaacaaatgtcatagc

SEQ ID NO: 3200 - RNA, 23 nt, synthetic construct
  source 1..23: mol_type = other RNA
tttatttttaacaaatgtcatag

SEQ ID NO: 3201 - RNA, 23 nt, synthetic construct
  source 1..23: mol_type = other RNA
ttttatttttaacaaatgtcata

SEQ ID NO: 3202 - RNA, 23 nt, synthetic construct
  source 1..23: mol_type = other RNA
tgtttatttttaacaaatgtcat

SEQ ID NO: 3203 - RNA, 23 nt, synthetic construct
  source 1..23: mol_type = other RNA
tagtttatttttaacaaatgtca

SEQ ID NO: 3204 - RNA, 23 nt, synthetic construct
  source 1..23: mol_type = other RNA
tagttaagtacagagtttatttt

SEQ ID NO: 3205 - RNA, 23 nt, synthetic construct
  source 1..23: mol_type = other RNA
taagttaagtacagagtttattt

SEQ ID NO: 3206 - RNA, 23 nt, synthetic construct
  source 1..23: mol_type = other RNA
taaagttaagtacagagtttatt

SEQ ID NO: 3207 - RNA, 23 nt, synthetic construct
  source 1..23: mol_type = other RNA
tcaaagttaagtacagagtttat

SEQ ID NO: 3208 - RNA, 23 nt, synthetic construct
  source 1..23: mol_type = other RNA
ttcaaagttaagtacagagttta

SEQ ID NO: 3209 - RNA, 23 nt, synthetic construct
  source 1..23: mol_type = other RNA
tatcaaagttaagtacagagttt

SEQ ID NO: 3210 - RNA, 23 nt, synthetic construct
  source 1..23: mol_type = other RNA
taatcaaagttaagtacagagtt

SEQ ID NO: 3211 - RNA, 23 nt, synthetic construct
  source 1..23: mol_type = other RNA
taaatcaaagttaagtacagagt

SEQ ID NO: 3212 - RNA, 23 nt, synthetic construct
  source 1..23: mol_type = other RNA
tcaaatcaaagttaagtacagag

SEQ ID NO: 3213 - RNA, 23 nt, synthetic construct
  source 1..23: mol_type = other RNA
ttcaaatcaaagttaagtacaga

SEQ ID NO: 3214 - RNA, 23 nt, synthetic construct
  source 1..23: mol_type = other RNA
tctcaaatcaaagttaagtacag

SEQ ID NO: 3215 - RNA, 23 nt, synthetic construct
  source 1..23: mol_type = other RNA
tactcaaatcaaagttaagtaca

SEQ ID NO: 3216 - RNA, 23 nt, synthetic construct
  source 1..23: mol_type = other RNA
ttactcaaatcaaagttaagtac

SEQ ID NO: 3217 - RNA, 23 nt, synthetic construct
  source 1..23: mol_type = other RNA
tccaaaatttactcaaatcaaag

SEQ ID NO: 3218 - RNA, 23 nt, synthetic construct
  source 1..23: mol_type = other RNA
tccaaaaccaaaatttactcaaa

SEQ ID NO: 3219 - RNA, 23 nt, synthetic construct
  source 1..23: mol_type = other RNA
taccaaaaccaaaatttactcaa

SEQ ID NO: 3220 - RNA, 23 nt, synthetic construct
  source 1..23: mol_type = other RNA
tgaccaaaaccaaaatttactca

SEQ ID NO: 3221 - RNA, 23 nt, synthetic construct
  source 1..23: mol_type = other RNA
tagaccaaaaccaaaatttactc

SEQ ID NO: 3222 - RNA, 23 nt, synthetic construct
  source 1..23: mol_type = other RNA
taagaccaaaaccaaaatttact

SEQ ID NO: 3223 - RNA, 23 nt, synthetic construct
  source 1..23: mol_type = other RNA
tgaagaccaaaaccaaaatttac

SEQ ID NO: 3224 - RNA, 23 nt, synthetic construct
  source 1..23: mol_type = other RNA
tttgaagaccaaaaccaaaattt

SEQ ID NO: 3225 - RNA, 23 nt, synthetic construct
  source 1..23: mol_type = other RNA
ttgttgaagaccaaaaccaaaat

SEQ ID NO: 3226 - RNA, 23 nt, synthetic construct
  source 1..23: mol_type = other RNA
tatgttgaagaccaaaaccaaaa

SEQ ID NO: 3227 - RNA, 23 nt, synthetic construct
  source 1..23: mol_type = other RNA
taatgttgaagaccaaaaccaaa

SEQ ID NO: 3228 - RNA, 23 nt, synthetic construct
  source 1..23: mol_type = other RNA
taaatgttgaagaccaaaaccaa

SEQ ID NO: 3229 - RNA, 23 nt, synthetic construct
  source 1..23: mol_type = other RNA
taaaatgttgaagaccaaaacca

SEQ ID NO: 3230 - RNA, 23 nt, synthetic construct
  source 1..23: mol_type = other RNA
tgaaaatgttgaagaccaaaacc

SEQ ID NO: 3231 - RNA, 23 nt, synthetic construct
  source 1..23: mol_type = other RNA
ttgaaaatgttgaagaccaaaac

SEQ ID NO: 3232 - RNA, 23 nt, synthetic construct
  source 1..23: mol_type = other RNA
tatgaaaatgttgaagaccaaaa

SEQ ID NO: 3233 - RNA, 23 nt, synthetic construct
  source 1..23: mol_type = other RNA
tcatgaaaatgttgaagaccaaa

SEQ ID NO: 3234 - RNA, 23 nt, synthetic construct
  source 1..23: mol_type = other RNA
tgcatgaaaatgttgaagaccaa

SEQ ID NO: 3235 - RNA, 23 nt, synthetic construct
  source 1..23: mol_type = other RNA
tagcatgaaaatgttgaagacca

SEQ ID NO: 3236 - RNA, 23 nt, synthetic construct
  source 1..23: mol_type = other RNA
tagagcatgaaaatgttgaagac

SEQ ID NO: 3237 - RNA, 23 nt, synthetic construct
  source 1..23: mol_type = other RNA
taagagcatgaaaatgttgaaga

SEQ ID NO: 3238 - RNA, 23 nt, synthetic construct
  source 1..23: mol_type = other RNA
taaagagcatgaaaatgttgaag

SEQ ID NO: 3239 - RNA, 23 nt, synthetic construct
  source 1..23: mol_type = other RNA
tcaaagagcatgaaaatgttgaa

SEQ ID NO: 3240 - RNA, 23 nt, synthetic construct
  source 1..23: mol_type = other RNA
tacaaagagcatgaaaatgttga

SEQ ID NO: 3241 - RNA, 23 nt, synthetic construct
  source 1..23: mol_type = other RNA
taacaaagagcatgaaaatgttg

SEQ ID NO: 3242 - RNA, 23 nt, synthetic construct
  source 1..23: mol_type = other RNA
tgaacaaagagcatgaaaatgtt

SEQ ID NO: 3243 - RNA, 23 nt, synthetic construct
  source 1..23: mol_type = other RNA
ttgaacaaagagcatgaaaatgt

SEQ ID NO: 3244 - RNA, 23 nt, synthetic construct
  source 1..23: mol_type = other RNA
tgtgaacaaagagcatgaaaatg

SEQ ID NO: 3245 - RNA, 23 nt, synthetic construct
  source 1..23: mol_type = other RNA
tggtgaacaaagagcatgaaaat

SEQ ID NO: 3246 - RNA, 23 nt, synthetic construct
  source 1..23: mol_type = other RNA
tttatcaaaagcagctaaatccc

SEQ ID NO: 3247 - RNA, 23 nt, synthetic construct
  source 1..23: mol_type = other RNA
tcttatcaaaagcagctaaatcc

SEQ ID NO: 3248 - RNA, 23 nt, synthetic construct
  source 1..23: mol_type = other RNA
ttccttatcaaaagcagctaaat

SEQ ID NO: 3249 - RNA, 23 nt, synthetic construct
  source 1..23: mol_type = other RNA
tttccttatcaaaagcagctaaa

SEQ ID NO: 3250 - RNA, 23 nt, synthetic construct
  source 1..23: mol_type = other RNA
tgttccttatcaaaagcagctaa

SEQ ID NO: 3251 - RNA, 23 nt, synthetic construct
  source 1..23: mol_type = other RNA
ttgttccttatcaaaagcagcta

SEQ ID NO: 3252 - RNA, 23 nt, synthetic construct
  source 1..23: mol_type = other RNA
ttttgtgcagctgttccttatca

SEQ ID NO: 3253 - RNA, 23 nt, synthetic construct
  source 1..23: mol_type = other RNA
ttagctgatgaggtaaatgcgtg

SEQ ID NO: 3254 - RNA, 23 nt, synthetic construct
  source 1..23: mol_type = other RNA
tttagctgatgaggtaaatgcgt

SEQ ID NO: 3255 - RNA, 23 nt, synthetic construct
  source 1..23: mol_type = other RNA
tgttagctgatgaggtaaatgcg

SEQ ID NO: 3256 - RNA, 23 nt, synthetic construct
  source 1..23: mol_type = other RNA
tagtaaaaatgcatgtcaagccc

SEQ ID NO: 3257 - RNA, 23 nt, synthetic construct
  source 1..23: mol_type = other RNA
tcagtaaaaatgcatgtcaagcc

SEQ ID NO: 3258 - RNA, 23 nt, synthetic construct
  source 1..23: mol_type = other RNA
tacagtaaaaatgcatgtcaagc

SEQ ID NO: 3259 - RNA, 23 nt, synthetic construct
  source 1..23: mol_type = other RNA
tgacagtaaaaatgcatgtcaag

SEQ ID NO: 3260 - RNA, 23 nt, synthetic construct
  source 1..23: mol_type = other RNA
tagacagtaaaaatgcatgtcaa

SEQ ID NO: 3261 - RNA, 23 nt, synthetic construct
  source 1..23: mol_type = other RNA
taagacagtaaaaatgcatgtca

SEQ ID NO: 3262 - RNA, 23 nt, synthetic construct
  source 1..23: mol_type = other RNA
taaagacagtaaaaatgcatgtc

SEQ ID NO: 3263 - RNA, 23 nt, synthetic construct
  source 1..23: mol_type = other RNA
ttaaagacagtaaaaatgcatgt

SEQ ID NO: 3264 - RNA, 23 nt, synthetic construct
  source 1..23: mol_type = other RNA
tataaagacagtaaaaatgcatg

SEQ ID NO: 3265 - RNA, 23 nt, synthetic construct
  source 1..23: mol_type = other RNA
taataaagacagtaaaaatgcat

SEQ ID NO: 3266 - RNA, 23 nt, synthetic construct
  source 1..23: mol_type = other RNA
tgaataaagacagtaaaaatgca

SEQ ID NO: 3267 - RNA, 23 nt, synthetic construct
  source 1..23: mol_type = other RNA
tggaataaagacagtaaaaatgc

SEQ ID NO: 3268 - RNA, 23 nt, synthetic construct
  source 1..23: mol_type = other RNA
taggaataaagacagtaaaaatg

SEQ ID NO: 3269 - RNA, 23 nt, synthetic construct
  source 1..23: mol_type = other RNA
tcaggaataaagacagtaaaaat

SEQ ID NO: 3270 - RNA, 23 nt, synthetic construct
  source 1..23: mol_type = other RNA
ttcaggaataaagacagtaaaaa

SEQ ID NO: 3271 - RNA, 23 nt, synthetic construct
  source 1..23: mol_type = other RNA
ttgtcaggaataaagacagtaaa

SEQ ID NO: 3272 - RNA, 23 nt, synthetic construct
  source 1..23: mol_type = other RNA
tgtgtcaggaataaagacagtaa

SEQ ID NO: 3273 - RNA, 23 nt, synthetic construct
  source 1..23: mol_type = other RNA
tagtgtcaggaataaagacagta

SEQ ID NO: 3274 - RNA, 23 nt, synthetic construct
  source 1..23: mol_type = other RNA
ttcagtgtcaggaataaagacag

SEQ ID NO: 3275 - RNA, 23 nt, synthetic construct
  source 1..23: mol_type = other RNA
taaaacattcatctcagtgtcag

SEQ ID NO: 3276 - RNA, 23 nt, synthetic construct
  source 1..23: mol_type = other RNA
tgaaaacattcatctcagtgtca

SEQ ID NO: 3277 - RNA, 23 nt, synthetic construct
  source 1..23: mol_type = other RNA
ttgaaaacattcatctcagtgtc

SEQ ID NO: 3278 - RNA, 23 nt, synthetic construct
  source 1..23: mol_type = other RNA
tttgaaaacattcatctcagtgt

SEQ ID NO: 3279 - RNA, 23 nt, synthetic construct
  source 1..23: mol_type = other RNA
ttttgaaaacattcatctcagtg

SEQ ID NO: 3280 - RNA, 23 nt, synthetic construct
  source 1..23: mol_type = other RNA
tctttgaaaacattcatctcagt

SEQ ID NO: 3281 - RNA, 23 nt, synthetic construct
  source 1..23: mol_type = other RNA
tgctttgaaaacattcatctcag

SEQ ID NO: 3282 - RNA, 23 nt, synthetic construct
  source 1..23: mol_type = other RNA
tagctttgaaaacattcatctca

SEQ ID NO: 3283 - RNA, 23 nt, synthetic construct
  source 1..23: mol_type = other RNA
tgttgcagctttgaaaacattca

SEQ ID NO: 3284 - RNA, 23 nt, synthetic construct
  source 1..23: mol_type = other RNA
ttgttgcagctttgaaaacattc

SEQ ID NO: 3285 - RNA, 23 nt, synthetic construct
  source 1..23: mol_type = other RNA
tatgttgcagctttgaaaacatt

SEQ ID NO: 3286 - RNA, 23 nt, synthetic construct
  source 1..23: mol_type = other RNA
tcatgttgcagctttgaaaacat

SEQ ID NO: 3287 - RNA, 23 nt, synthetic construct
  source 1..23: mol_type = other RNA
ttcccaataacagaatcggtttg

SEQ ID NO: 3288 - RNA, 23 nt, synthetic construct
  source 1..23: mol_type = other RNA
tttcccaataacagaatcggttt

SEQ ID NO: 3289 - RNA, 23 nt, synthetic construct
  source 1..23: mol_type = other RNA
tattcccaataacagaatcggtt

SEQ ID NO: 3290 - RNA, 23 nt, synthetic construct
  source 1..23: mol_type = other RNA
tcattcccaataacagaatcggt

SEQ ID NO: 3291 - RNA, 23 nt, synthetic construct
  source 1..23: mol_type = other RNA
ttcattcccaataacagaatcgg

SEQ ID NO: 3292 - RNA, 23 nt, synthetic construct
  source 1..23: mol_type = other RNA
tttcattcccaataacagaatcg

SEQ ID NO: 3293 - RNA, 23 nt, synthetic construct
  source 1..23: mol_type = other RNA
ttttcattcccaataacagaatc

SEQ ID NO: 3294 - RNA, 23 nt, synthetic construct
  source 1..23: mol_type = other RNA
tatttcattcccaataacagaat

SEQ ID NO: 3295 - RNA, 23 nt, synthetic construct
  source 1..23: mol_type = other RNA
tgatttcattcccaataacagaa

SEQ ID NO: 3296 - RNA, 23 nt, synthetic construct
  source 1..23: mol_type = other RNA
tagatttcattcccaataacaga

SEQ ID NO: 3297 - RNA, 23 nt, synthetic construct
  source 1..23: mol_type = other RNA
tcagatttcattcccaataacag

SEQ ID NO: 3298 - RNA, 23 nt, synthetic construct
  source 1..23: mol_type = other RNA
tacagatttcattcccaataaca

SEQ ID NO: 3299 - RNA, 23 nt, synthetic construct
  source 1..23: mol_type = other RNA
ttgacagatttcattcccaataa

SEQ ID NO: 3300 - RNA, 23 nt, synthetic construct
  source 1..23: mol_type = other RNA
tactccatcatatacagctctct

SEQ ID NO: 3301 - RNA, 23 nt, synthetic construct
  source 1..23: mol_type = other RNA
tttcactccatcatatacagctc

SEQ ID NO: 3302 - RNA, 23 nt, synthetic construct
  source 1..23: mol_type = other RNA
ttggtcttgtgttacacatccat

SEQ ID NO: 3303 - RNA, 23 nt, synthetic construct
  source 1..23: mol_type = other RNA
tttggtcttgtgttacacatcca

SEQ ID NO: 3304 - RNA, 23 nt, synthetic construct
  source 1..23: mol_type = other RNA
tcagttggtcttgtgttacacat

SEQ ID NO: 3305 - RNA, 23 nt, synthetic construct
  source 1..23: mol_type = other RNA
ttcagttggtcttgtgttacaca

SEQ ID NO: 3306 - RNA, 23 nt, synthetic construct
  source 1..23: mol_type = other RNA
ttctcagttggtcttgtgttaca

SEQ ID NO: 3307 - RNA, 23 nt, synthetic construct
  source 1..23: mol_type = other RNA
ttaacattcagactctcagttgg

SEQ ID NO: 3308 - RNA, 23 nt, synthetic construct
  source 1..23: mol_type = other RNA
tataacattcagactctcagttg

SEQ ID NO: 3309 - RNA, 23 nt, synthetic construct
  source 1..23: mol_type = other RNA
taataacattcagactctcagtt

SEQ ID NO: 3310 - RNA, 23 nt, synthetic construct
  source 1..23: mol_type = other RNA
tagaataacattcagactctcag

SEQ ID NO: 3311 - RNA, 23 nt, synthetic construct
  source 1..23: mol_type = other RNA
tccagaataacattcagactctc

SEQ ID NO: 3312 - RNA, 23 nt, synthetic construct
  source 1..23: mol_type = other RNA
ttcatttacatgctcttggcacc

SEQ ID NO: 3313 - RNA, 23 nt, synthetic construct
  source 1..23: mol_type = other RNA
tttcatttacatgctcttggcac

SEQ ID NO: 3314 - RNA, 23 nt, synthetic construct
  source 1..23: mol_type = other RNA
tgttcatttacatgctcttggca

SEQ ID NO: 3315 - RNA, 23 nt, synthetic construct
  source 1..23: mol_type = other RNA
ttgttcatttacatgctcttggc

SEQ ID NO: 3316 - RNA, 23 nt, synthetic construct
  source 1..23: mol_type = other RNA
tttgttcatttacatgctcttgg

SEQ ID NO: 3317 - RNA, 23 nt, synthetic construct
  source 1..23: mol_type = other RNA
tgttgttcatttacatgctcttg

SEQ ID NO: 3318 - RNA, 23 nt, synthetic construct
  source 1..23: mol_type = other RNA
ttgttgttcatttacatgctctt

SEQ ID NO: 3319 - RNA, 23 nt, synthetic construct
  source 1..23: mol_type = other RNA
tttgttgttcatttacatgctct

SEQ ID NO: 3320 - RNA, 23 nt, synthetic construct
  source 1..23: mol_type = other RNA
tcttgttgttcatttacatgctc

SEQ ID NO: 3321 - RNA, 23 nt, synthetic construct
  source 1..23: mol_type = other RNA
tgcttgttgttcatttacatgct

SEQ ID NO: 3322 - RNA, 23 nt, synthetic construct
  source 1..23: mol_type = other RNA
ttgcttgttgttcatttacatgc

SEQ ID NO: 3323 - RNA, 23 nt, synthetic construct
  source 1..23: mol_type = other RNA
tttgcttgttgttcatttacatg

SEQ ID NO: 3324 - RNA, 23 nt, synthetic construct
  source 1..23: mol_type = other RNA
ttttgcttgttgttcatttacat

SEQ ID NO: 3325 - RNA, 23 nt, synthetic construct
  source 1..23: mol_type = other RNA
tatttgcttgttgttcatttaca

SEQ ID NO: 3326 - RNA, 23 nt, synthetic construct
  source 1..23: mol_type = other RNA
ttatttgcttgttgttcatttac

SEQ ID NO: 3327 - RNA, 23 nt, synthetic construct
  source 1..23: mol_type = other RNA
tatatttgcttgttgttcattta

SEQ ID NO: 3328 - RNA, 23 nt, synthetic construct
  source 1..23: mol_type = other RNA
taatatttgcttgttgttcattt

SEQ ID NO: 3329 - RNA, 23 nt, synthetic construct
  source 1..23: mol_type = other RNA
tcaatatttgcttgttgttcatt

SEQ ID NO: 3330 - RNA, 23 nt, synthetic construct
  source 1..23: mol_type = other RNA
ttcaatatttgcttgttgttcat

SEQ ID NO: 3331 - RNA, 23 nt, synthetic construct
  source 1..23: mol_type = other RNA
tttcaatatttgcttgttgttca

SEQ ID NO: 3332 - RNA, 23 nt, synthetic construct
  source 1..23: mol_type = other RNA
tcttcaatatttgcttgttgttc

SEQ ID NO: 3333 - RNA, 23 nt, synthetic construct
  source 1..23: mol_type = other RNA
tccttcaatatttgcttgttgtt

SEQ ID NO: 3334 - RNA, 23 nt, synthetic construct
  source 1..23: mol_type = other RNA
taccttcaatatttgcttgttgt

SEQ ID NO: 3335 - RNA, 23 nt, synthetic construct
  source 1..23: mol_type = other RNA
tcaccttcaatatttgcttgttg

SEQ ID NO: 3336 - RNA, 23 nt, synthetic construct
  source 1..23: mol_type = other RNA
tttagcaatgggaaataagtggt

SEQ ID NO: 3337 - RNA, 23 nt, synthetic construct
  source 1..23: mol_type = other RNA
tattagcaatgggaaataagtgg

SEQ ID NO: 3338 - RNA, 23 nt, synthetic construct
  source 1..23: mol_type = other RNA
taattagcaatgggaaataagtg

SEQ ID NO: 3339 - RNA, 23 nt, synthetic construct
  source 1..23: mol_type = other RNA
tcaattagcaatgggaaataagt

SEQ ID NO: 3340 - RNA, 23 nt, synthetic construct
  source 1..23: mol_type = other RNA
tggcaattagcaatgggaaataa

SEQ ID NO: 3341 - RNA, 23 nt, synthetic construct
  source 1..23: mol_type = other RNA
ttgtttcaaaaccgggcaggcaa

SEQ ID NO: 3342 - RNA, 23 nt, synthetic construct
  source 1..23: mol_type = other RNA
ttactgcagactgtttcaaaacc

SEQ ID NO: 3343 - RNA, 23 nt, synthetic construct
  source 1..23: mol_type = other RNA
ttgtactgcagactgtttcaaaa

SEQ ID NO: 3344 - RNA, 23 nt, synthetic construct
  source 1..23: mol_type = other RNA
ttaaacatgtatctctcccacag

SEQ ID NO: 3345 - RNA, 23 nt, synthetic construct
  source 1..23: mol_type = other RNA
ttctaaacatgtatctctcccac

SEQ ID NO: 3346 - RNA, 23 nt, synthetic construct
  source 1..23: mol_type = other RNA
tttctaaacatgtatctctccca

SEQ ID NO: 3347 - RNA, 23 nt, synthetic construct
  source 1..23: mol_type = other RNA
tcttctaaacatgtatctctccc

SEQ ID NO: 3348 - RNA, 23 nt, synthetic construct
  source 1..23: mol_type = other RNA
ttccttctaaacatgtatctctc

SEQ ID NO: 3349 - RNA, 23 nt, synthetic construct
  source 1..23: mol_type = other RNA
tttccttctaaacatgtatctct

SEQ ID NO: 3350 - RNA, 23 nt, synthetic construct
  source 1..23: mol_type = other RNA
tcttccttctaaacatgtatctc

SEQ ID NO: 3351 - RNA, 23 nt, synthetic construct
  source 1..23: mol_type = other RNA
ttcttccttctaaacatgtatct

SEQ ID NO: 3352 - RNA, 23 nt, synthetic construct
  source 1..23: mol_type = other RNA
tttctcttccttctaaacatgta

SEQ ID NO: 3353 - RNA, 23 nt, synthetic construct
  source 1..23: mol_type = other RNA
tctttctcttccttctaaacatg

SEQ ID NO: 3354 - RNA, 23 nt, synthetic construct
  source 1..23: mol_type = other RNA
tcctttctcttccttctaaacat

SEQ ID NO: 3355 - RNA, 23 nt, synthetic construct
  source 1..23: mol_type = other RNA
tgtcctttctcttccttctaaac

SEQ ID NO: 3356 - RNA, 23 nt, synthetic construct
  source 1..23: mol_type = other RNA
ttgtcctttctcttccttctaaa

SEQ ID NO: 3357 - RNA, 23 nt, synthetic construct
  source 1..23: mol_type = other RNA
tttgtcctttctcttccttctaa

SEQ ID NO: 3358 - RNA, 23 nt, synthetic construct
  source 1..23: mol_type = other RNA
ttttgtcctttctcttccttcta

SEQ ID NO: 3359 - RNA, 23 nt, synthetic construct
  source 1..23: mol_type = other RNA
taatggtaaaacgtgtgcctttg

SEQ ID NO: 3360 - RNA, 23 nt, synthetic construct
  source 1..23: mol_type = other RNA
taaatggtaaaacgtgtgccttt

SEQ ID NO: 3361 - RNA, 23 nt, synthetic construct
  source 1..23: mol_type = other RNA
ttaaatggtaaaacgtgtgcctt

SEQ ID NO: 3362 - RNA, 23 nt, synthetic construct
  source 1..23: mol_type = other RNA
tttaaatggtaaaacgtgtgcct

SEQ ID NO: 3363 - RNA, 23 nt, synthetic construct
  source 1..23: mol_type = other RNA
ttttaaatggtaaaacgtgtgcc

SEQ ID NO: 3364 - RNA, 23 nt, synthetic construct
  source 1..23: mol_type = other RNA
tttttaaatggtaaaacgtgtgc

SEQ ID NO: 3365 - RNA, 23 nt, synthetic construct
  source 1..23: mol_type = other RNA
tattttaaatggtaaaacgtgtg

SEQ ID NO: 3366 - RNA, 23 nt, synthetic construct
  source 1..23: mol_type = other RNA
ttattttaaatggtaaaacgtgt

SEQ ID NO: 3367 - RNA, 23 nt, synthetic construct
  source 1..23: mol_type = other RNA
tatattttaaatggtaaaacgtg

SEQ ID NO: 3368 - RNA, 23 nt, synthetic construct
  source 1..23: mol_type = other RNA
taatattttaaatggtaaaacgt

SEQ ID NO: 3369 - RNA, 23 nt, synthetic construct
  source 1..23: mol_type = other RNA
tcaatattttaaatggtaaaacg

SEQ ID NO: 3370 - RNA, 23 nt, synthetic construct
  source 1..23: mol_type = other RNA
tacaatattttaaatggtaaaac

SEQ ID NO: 3371 - RNA, 23 nt, synthetic construct
  source 1..23: mol_type = other RNA
ttttggtaacaatattttaaatg

SEQ ID NO: 3372 - RNA, 23 nt, synthetic construct
  source 1..23: mol_type = other RNA
tgtttggtaacaatattttaaat

SEQ ID NO: 3373 - RNA, 23 nt, synthetic construct
  source 1..23: mol_type = other RNA
ttgtttggtaacaatattttaaa

SEQ ID NO: 3374 - RNA, 23 nt, synthetic construct
  source 1..23: mol_type = other RNA
tttgtttggtaacaatattttaa

SEQ ID NO: 3375 - RNA, 23 nt, synthetic construct
  source 1..23: mol_type = other RNA
ttttgtttggtaacaatatttta

SEQ ID NO: 3376 - RNA, 23 nt, synthetic construct
  source 1..23: mol_type = other RNA
tttttgtttggtaacaatatttt

SEQ ID NO: 3377 - RNA, 23 nt, synthetic construct
  source 1..23: mol_type = other RNA
ttttttgtttggtaacaatattt

SEQ ID NO: 3378 - RNA, 23 nt, synthetic construct
  source 1..23: mol_type = other RNA
tatttttgtttggtaacaatatt

SEQ ID NO: 3379 - RNA, 23 nt, synthetic construct
  source 1..23: mol_type = other RNA
ttatttttgtttggtaacaatat

SEQ ID NO: 3380 - RNA, 23 nt, synthetic construct
  source 1..23: mol_type = other RNA
tatatttttgtttggtaacaata

SEQ ID NO: 3381 - RNA, 23 nt, synthetic construct
  source 1..23: mol_type = other RNA
tgatatttttgtttggtaacaat

SEQ ID NO: 3382 - RNA, 23 nt, synthetic construct
  source 1..23: mol_type = other RNA
tggatatttttgtttggtaacaa

SEQ ID NO: 3383 - RNA, 23 nt, synthetic construct
  source 1..23: mol_type = other RNA
ttggatatttttgtttggtaaca

SEQ ID NO: 3384 - RNA, 23 nt, synthetic construct
  source 1..23: mol_type = other RNA
tatggatatttttgtttggtaac

SEQ ID NO: 3385 - RNA, 23 nt, synthetic construct
  source 1..23: mol_type = other RNA
tgaatggatatttttgtttggta

SEQ ID NO: 3386 - RNA, 23 nt, synthetic construct
  source 1..23: mol_type = other RNA
ttgaatggatatttttgtttggt

SEQ ID NO: 3387 - RNA, 23 nt, synthetic construct
  source 1..23: mol_type = other RNA
tttgaatggatatttttgtttgg

SEQ ID NO: 3388 - RNA, 23 nt, synthetic construct
  source 1..23: mol_type = other RNA
tgtattttgaatggatatttttg

SEQ ID NO: 3389 - RNA, 23 nt, synthetic construct
  source 1..23: mol_type = other RNA
ttgtattttgaatggatattttt

SEQ ID NO: 3390 - RNA, 23 nt, synthetic construct
  source 1..23: mol_type = other RNA
tttgtattttgaatggatatttt

SEQ ID NO: 3391 - RNA, 23 nt, synthetic construct
  source 1..23: mol_type = other RNA
tattgtattttgaatggatattt

SEQ ID NO: 3392 - RNA, 23 nt, synthetic construct
  source 1..23: mol_type = other RNA
taattgtattttgaatggatatt

SEQ ID NO: 3393 - RNA, 23 nt, synthetic construct
  source 1..23: mol_type = other RNA
taaattgtattttgaatggatat

SEQ ID NO: 3394 - RNA, 23 nt, synthetic construct
  source 1..23: mol_type = other RNA
ttaaattgtattttgaatggata

SEQ ID NO: 3395 - RNA, 23 nt, synthetic construct
  source 1..23: mol_type = other RNA
tttaaattgtattttgaatggat

SEQ ID NO: 3396 - RNA, 23 nt, synthetic construct
  source 1..23: mol_type = other RNA
tgttaaattgtattttgaatgga

SEQ ID NO: 3397 - RNA, 23 nt, synthetic construct
  source 1..23: mol_type = other RNA
ttgttaaattgtattttgaatgg

SEQ ID NO: 3398 - RNA, 23 nt, synthetic construct
  source 1..23: mol_type = other RNA
tttgttaaattgtattttgaatg

SEQ ID NO: 3399 - RNA, 23 nt, synthetic construct
  source 1..23: mol_type = other RNA
tattgttaaattgtattttgaat

SEQ ID NO: 3400 - RNA, 23 nt, synthetic construct
  source 1..23: mol_type = other RNA
tactgttgcattgttaaattgta

SEQ ID NO: 3401 - RNA, 23 nt, synthetic construct
  source 1..23: mol_type = other RNA
tatttctctgctgtaagatgact

SEQ ID NO: 3402 - RNA, 23 nt, synthetic construct
  source 1..23: mol_type = other RNA
tcatttctctgctgtaagatgac

SEQ ID NO: 3403 - RNA, 23 nt, synthetic construct
  source 1..23: mol_type = other RNA
tgcatttctctgctgtaagatga

SEQ ID NO: 3404 - RNA, 23 nt, synthetic construct
  source 1..23: mol_type = other RNA
ttgcatttctctgctgtaagatg

SEQ ID NO: 3405 - RNA, 23 nt, synthetic construct
  source 1..23: mol_type = other RNA
tctgcatttctctgctgtaagat

SEQ ID NO: 3406 - RNA, 23 nt, synthetic construct
  source 1..23: mol_type = other RNA
ttctgcatttctctgctgtaaga

SEQ ID NO: 3407 - RNA, 23 nt, synthetic construct
  source 1..23: mol_type = other RNA
tctctgcatttctctgctgtaag

SEQ ID NO: 3408 - RNA, 23 nt, synthetic construct
  source 1..23: mol_type = other RNA
ttctctgcatttctctgctgtaa

SEQ ID NO: 3409 - RNA, 23 nt, synthetic construct
  source 1..23: mol_type = other RNA
tttctctgcatttctctgctgta

SEQ ID NO: 3410 - RNA, 23 nt, synthetic construct
  source 1..23: mol_type = other RNA
ttttctctgcatttctctgctgt

SEQ ID NO: 3411 - RNA, 23 nt, synthetic construct
  source 1..23: mol_type = other RNA
tttttctctgcatttctctgctg

SEQ ID NO: 3412 - RNA, 23 nt, synthetic construct
  source 1..23: mol_type = other RNA
tcttttctctgcatttctctgct

SEQ ID NO: 3413 - RNA, 23 nt, synthetic construct
  source 1..23: mol_type = other RNA
tgcttttctctgcatttctctgc

SEQ ID NO: 3414 - RNA, 23 nt, synthetic construct
  source 1..23: mol_type = other RNA
ttgcttttctctgcatttctctg

SEQ ID NO: 3415 - RNA, 23 nt, synthetic construct
  source 1..23: mol_type = other RNA
tttgcttttctctgcatttctct

SEQ ID NO: 3416 - RNA, 23 nt, synthetic construct
  source 1..23: mol_type = other RNA
ttttgcttttctctgcatttctc

SEQ ID NO: 3417 - RNA, 23 nt, synthetic construct
  source 1..23: mol_type = other RNA
tttttgcttttctctgcatttct

SEQ ID NO: 3418 - RNA, 23 nt, synthetic construct
  source 1..23: mol_type = other RNA
tgttttgcttttctctgcatttc

SEQ ID NO: 3419 - RNA, 23 nt, synthetic construct
  source 1..23: mol_type = other RNA
tagttttgcttttctctgcattt

SEQ ID NO: 3420 - RNA, 23 nt, synthetic construct
  source 1..23: mol_type = other RNA
tcagttttgcttttctctgcatt

SEQ ID NO: 3421 - RNA, 23 nt, synthetic construct
  source 1..23: mol_type = other RNA
tgcagttttgcttttctctgcat

SEQ ID NO: 3422 - RNA, 23 nt, synthetic construct
  source 1..23: mol_type = other RNA
ttgcagttttgcttttctctgca

SEQ ID NO: 3423 - RNA, 23 nt, synthetic construct
  source 1..23: mol_type = other RNA
tttgcagttttgcttttctctgc

SEQ ID NO: 3424 - RNA, 23 nt, synthetic construct
  source 1..23: mol_type = other RNA
tacttgcagttttgcttttctct

SEQ ID NO: 3425 - RNA, 23 nt, synthetic construct
  source 1..23: mol_type = other RNA
ttcacttgcagttttgcttttct

SEQ ID NO: 3426 - RNA, 23 nt, synthetic construct
  source 1..23: mol_type = other RNA
tgtcacttgcagttttgcttttc

SEQ ID NO: 3427 - RNA, 23 nt, synthetic construct
  source 1..23: mol_type = other RNA
tagtcacttgcagttttgctttt

SEQ ID NO: 3428 - RNA, 23 nt, synthetic construct
  source 1..23: mol_type = other RNA
tttcacagtcacttgcagttttg

SEQ ID NO: 3429 - RNA, 23 nt, synthetic construct
  source 1..23: mol_type = other RNA
tattcacagtcacttgcagtttt

SEQ ID NO: 3430 - RNA, 23 nt, synthetic construct
  source 1..23: mol_type = other RNA
ttattcacagtcacttgcagttt

SEQ ID NO: 3431 - RNA, 23 nt, synthetic construct
  source 1..23: mol_type = other RNA
tttattcacagtcacttgcagtt

SEQ ID NO: 3432 - RNA, 23 nt, synthetic construct
  source 1..23: mol_type = other RNA
ttttattcacagtcacttgcagt

SEQ ID NO: 3433 - RNA, 23 nt, synthetic construct
  source 1..23: mol_type = other RNA
tctttattcacagtcacttgcag

SEQ ID NO: 3434 - RNA, 23 nt, synthetic construct
  source 1..23: mol_type = other RNA
tcctttattcacagtcacttgca

SEQ ID NO: 3435 - RNA, 23 nt, synthetic construct
  source 1..23: mol_type = other RNA
tttcaccctttattcacagtcac

SEQ ID NO: 3436 - RNA, 23 nt, synthetic construct
  source 1..23: mol_type = other RNA
tattcaccctttattcacagtca

SEQ ID NO: 3437 - RNA, 23 nt, synthetic construct
  source 1..23: mol_type = other RNA
ttacattcaccctttattcacag

SEQ ID NO: 3438 - RNA, 23 nt, synthetic construct
  source 1..23: mol_type = other RNA
tctacattcaccctttattcaca

SEQ ID NO: 3439 - RNA, 23 nt, synthetic construct
  source 1..23: mol_type = other RNA
tactacattcaccctttattcac

SEQ ID NO: 3440 - RNA, 23 nt, synthetic construct
  source 1..23: mol_type = other RNA
tgagactacattcaccctttatt

SEQ ID NO: 3441 - RNA, 23 nt, synthetic construct
  source 1..23: mol_type = other RNA
tttgagactacattcacccttta

SEQ ID NO: 3442 - RNA, 23 nt, synthetic construct
  source 1..23: mol_type = other RNA
ttttgagactacattcacccttt

SEQ ID NO: 3443 - RNA, 23 nt, synthetic construct
  source 1..23: mol_type = other RNA
taaacacagctctttgaggattt

SEQ ID NO: 3444 - RNA, 23 nt, synthetic construct
  source 1..23: mol_type = other RNA
ttaaacacagctctttgaggatt

SEQ ID NO: 3445 - RNA, 23 nt, synthetic construct
  source 1..23: mol_type = other RNA
tataaacacagctctttgaggat

SEQ ID NO: 3446 - RNA, 23 nt, synthetic construct
  source 1..23: mol_type = other RNA
taataaacacagctctttgagga

SEQ ID NO: 3447 - RNA, 23 nt, synthetic construct
  source 1..23: mol_type = other RNA
taaataaacacagctctttgagg

SEQ ID NO: 3448 - RNA, 23 nt, synthetic construct
  source 1..23: mol_type = other RNA
tgaaataaacacagctctttgag

SEQ ID NO: 3449 - RNA, 23 nt, synthetic construct
  source 1..23: mol_type = other RNA
ttgaaataaacacagctctttga

SEQ ID NO: 3450 - RNA, 23 nt, synthetic construct
  source 1..23: mol_type = other RNA
ttcaatgaaataaacacagctct

SEQ ID NO: 3451 - RNA, 23 nt, synthetic construct
  source 1..23: mol_type = other RNA
tgtcaatgaaataaacacagctc

SEQ ID NO: 3452 - RNA, 23 nt, synthetic construct
  source 1..23: mol_type = other RNA
ttttgtcaatgaaataaacacag

SEQ ID NO: 3453 - RNA, 23 nt, synthetic construct
  source 1..23: mol_type = other RNA
taatctatttgtcaatgaaataa

SEQ ID NO: 3454 - RNA, 23 nt, synthetic construct
  source 1..23: mol_type = other RNA
ttaatctatttgtcaatgaaata

SEQ ID NO: 3455 - RNA, 23 nt, synthetic construct
  source 1..23: mol_type = other RNA
tataatctatttgtcaatgaaat

SEQ ID NO: 3456 - RNA, 23 nt, synthetic construct
  source 1..23: mol_type = other RNA
taataatctatttgtcaatgaaa

SEQ ID NO: 3457 - RNA, 23 nt, synthetic construct
  source 1..23: mol_type = other RNA
taaataatctatttgtcaatgaa

SEQ ID NO: 3458 - RNA, 23 nt, synthetic construct
  source 1..23: mol_type = other RNA
tcaaataatctatttgtcaatga

SEQ ID NO: 3459 - RNA, 23 nt, synthetic construct
  source 1..23: mol_type = other RNA
tacaaataatctatttgtcaatg

SEQ ID NO: 3460 - RNA, 23 nt, synthetic construct
  source 1..23: mol_type = other RNA
ttacaaataatctatttgtcaat

SEQ ID NO: 3461 - RNA, 23 nt, synthetic construct
  source 1..23: mol_type = other RNA
tatacaaataatctatttgtcaa

SEQ ID NO: 3462 - RNA, 23 nt, synthetic construct
  source 1..23: mol_type = other RNA
taatacaaataatctatttgtca

SEQ ID NO: 3463 - RNA, 23 nt, synthetic construct
  source 1..23: mol_type = other RNA
tgaatacaaataatctatttgtc

SEQ ID NO: 3464 - RNA, 23 nt, synthetic construct
  source 1..23: mol_type = other RNA
ttgaatacaaataatctatttgt

SEQ ID NO: 3465 - RNA, 21 nt, synthetic construct
  source 1..21: mol_type = other RNA
  modified_base 1: mod_base = OTHER; note = 2'-O-methylguanosine-3'-phosphate
  modified_base 2: mod_base = OTHER; note = 2'-O-methylguanosine-3'-phosphate
  modified_base 3: mod_base = OTHER; note = 2'-O-methyladenosine-3'-phosphate
  modified_base 4: mod_base = OTHER; note = 2'-O-methylcytidine-3'-phosphate
  modified_base 5: mod_base = OTHER; note = 2'-O-methylcytidine-3'-phosphate
  modified_base 6: mod_base = OTHER; note = 2'-O-methylcytidine-3'-phosphate
  modified_base 7: mod_base = OTHER; note = 2'-deoxy-2'-fluoroadenosine-3'-phosphate
  modified_base 8: mod_base = OTHER; note = 2'-O-methylcytidine-3'-phosphate
  modified_base 9: mod_base = OTHER; note = 2'-deoxy-2'-fluorouridine-3'-phosphate
  modified_base 10: mod_base = OTHER; note = 2'-deoxy-2'-fluorouridine-3'-phosphate
  modified_base 11: mod_base = OTHER; note = 2'-deoxy-2'-fluorouridine-3'-phosphate
  modified_base 12: mod_base = OTHER; note = 2'-O-methylcytidine-3'-phosphate
  modified_base 13: mod_base = OTHER; note = 2'-O-methyluridine-3'-phosphate
  modified_base 14: mod_base = OTHER; note = 2'-O-methylguanosine-3'-phosphate
  modified_base 15: mod_base = OTHER; note = 2'-O-methylguanosine-3'-phosphate
  modified_base 16: mod_base = OTHER; note = 2'-O-methylguanosine-3'-phosphate
  modified_base 17: mod_base = OTHER; note = 2'-O-methylcytidine-3'-phosphate
  modified_base 18: mod_base = OTHER; note = 2'-O-methyladenosine-3'-phosphate
  modified_base 19: mod_base = OTHER; note = 2'-O-methylcytidine-3'-phosphate
  modified_base 20: mod_base = OTHER; note = 2'-O-methyluridine-3'-phosphate
  modified_base 21: mod_base = OTHER; note = 2'-O-methyladenosine
ggacccactttctgggcacta

SEQ ID NO: 3466 - RNA, 21 nt, synthetic construct
  source 1..21: mol_type = other RNA
  modified_base 1: mod_base = OTHER; note = 2'-O-methylguanosine-3'-phosphate
  modified_base 2: mod_base = OTHER; note = 2'-O-methyladenosine-3'-phosphate
  modified_base 3: mod_base = OTHER; note = 2'-O-methylcytidine-3'-phosphate
  modified_base 4: mod_base = OTHER; note = 2'-O-methylcytidine-3'-phosphate
  modified_base 5: mod_base = OTHER; note = 2'-O-methylcytidine-3'-phosphate
  modified_base 6: mod_base = OTHER; note = 2'-O-methyladenosine-3'-phosphate
  modified_base 7: mod_base = OTHER; note = 2'-deoxy-2'-fluorocytidine-3'-phosphate
  modified_base 8: mod_base = OTHER; note = 2'-O-methyluridine-3'-phosphate
  modified_base 9: mod_base = OTHER; note = 2'-deoxy-2'-fluorouridine-3'-phosphate
  modified_base 10: mod_base = OTHER; note = 2'-deoxy-2'-fluorouridine-3'-phosphate
  modified_base 11: mod_base = OTHER; note = 2'-deoxy-2'-fluorocytidine-3'-phosphate
  modified_base 12: mod_base = OTHER; note = 2'-O-methyluridine-3'-phosphate
  modified_base 13: mod_base = OTHER; note = 2'-O-methylguanosine-3'-phosphate
  modified_base 14: mod_base = OTHER; note = 2'-O-methylguanosine-3'-phosphate
  modified_base 15: mod_base = OTHER; note = 2'-O-methylguanosine-3'-phosphate
  modified_base 16: mod_base = OTHER; note = 2'-O-methylcytidine-3'-phosphate
  modified_base 17: mod_base = OTHER; note = 2'-O-methyladenosine-3'-phosphate
  modified_base 18: mod_base = OTHER; note = 2'-O-methylcytidine-3'-phosphate
  modified_base 19: mod_base = OTHER; note = 2'-O-methyluridine-3'-phosphate
  modified_base 20: mod_base = OTHER; note = 2'-O-methylguanosine-3'-phosphate
  modified_base 21: mod_base = OTHER; note = 2'-O-methyladenosine
gacccactttctgggcactga

SEQ ID NO: 3467 - RNA, 21 nt, synthetic construct
  source 1..21: mol_type = other RNA
  modified_base 1: mod_base = OTHER; note = 2'-O-methyladenosine-3'-phosphate
  modified_base 2: mod_base = OTHER; note = 2'-O-methylcytidine-3'-phosphate
  modified_base 3: mod_base = OTHER; note = 2'-O-methylcytidine-3'-phosphate
  modified_base 4: mod_base = OTHER; note = 2'-O-methylcytidine-3'-phosphate
  modified_base 5: mod_base = OTHER; note = 2'-O-methyladenosine-3'-phosphate
  modified_base 6: mod_base = OTHER; note = 2'-O-methylcytidine-3'-phosphate
  modified_base 7: mod_base = OTHER; note = 2'-deoxy-2'-fluorouridine-3'-phosphate
  modified_base 8: mod_base = OTHER; note = 2'-O-methyluridine-3'-phosphate
  modified_base 9: mod_base = OTHER; note = 2'-deoxy-2'-fluorouridine-3'-phosphate
  modified_base 10: mod_base = OTHER; note = 2'-deoxy-2'-fluorocytidine-3'-phosphate
  modified_base 11: mod_base = OTHER; note = 2'-deoxy-2'-fluorouridine-3'-phosphate
  modified_base 12: mod_base = OTHER; note = 2'-O-methylguanosine-3'-phosphate
  modified_base 13: mod_base = OTHER; note = 2'-O-methylguanosine-3'-phosphate
  modified_base 14: mod_base = OTHER; note = 2'-O-methylguanosine-3'-phosphate
  modified_base 15: mod_base = OTHER; note = 2'-O-methylcytidine-3'-phosphate
  modified_base 16: mod_base = OTHER; note = 2'-O-methyladenosine-3'-phosphate
  modified_base 17: mod_base = OTHER; note = 2'-O-methylcytidine-3'-phosphate
  modified_base 18: mod_base = OTHER; note = 2'-O-methyluridine-3'-phosphate
  modified_base 19: mod_base = OTHER; note = 2'-O-methylguanosine-3'-phosphate
  modified_base 20: mod_base = OTHER; note = 2'-O-methylcytidine-3'-phosphate
  modified_base 21: mod_base = OTHER; note = 2'-O-methyladenosine
acccactttctgggcactgca

SEQ ID NO: 3468 - RNA, 21 nt, synthetic construct
  source 1..21: mol_type = other RNA
  modified_base 1: mod_base = OTHER; note = 2'-O-methylcytidine-3'-phosphate
  modified_base 2: mod_base = OTHER; note = 2'-O-methyladenosine-3'-phosphate
  modified_base 3: mod_base = OTHER; note = 2'-O-methylguanosine-3'-phosphate
  modified_base 4: mod_base = OTHER; note = 2'-O-methyluridine-3'-phosphate
  modified_base 5: mod_base = OTHER; note = 2'-O-methylcytidine-3'-phosphate
  modified_base 6: mod_base = OTHER; note = 2'-O-methylcytidine-3'-phosphate
  modified_base 7: mod_base = OTHER; note = 2'-deoxy-2'-fluorocytidine-3'-phosphate
  modified_base 8: mod_base = OTHER; note = 2'-O-methyladenosine-3'-phosphate
  modified_base 9: mod_base = OTHER; note = 2'-deoxy-2'-fluoroadenosine-3'-phosphate
  modified_base 10: mod_base = OTHER; note = 2'-deoxy-2'-fluoroadenosine-3'-phosphate
  modified_base 11: mod_base = OTHER; note = 2'-deoxy-2'-fluoroadenosine-3'-phosphate
  modified_base 12: mod_base = OTHER; note = 2'-O-methyluridine-3'-phosphate
  modified_base 13: mod_base = OTHER; note = 2'-O-methylguanosine-3'-phosphate
  modified_base 14: mod_base = OTHER; note = 2'-O-methylguanosine-3'-phosphate
  modified_base 15: mod_base = OTHER; note = 2'-O-methyladenosine-3'-phosphate
  modified_base 16: mod_base = OTHER; note = 2'-O-methyladenosine-3'-phosphate
  modified_base 17: mod_base = OTHER; note = 2'-O-methylcytidine-3'-phosphate
  modified_base 18: mod_base = OTHER; note = 2'-O-methyladenosine-3'-phosphate
  modified_base 19: mod_base = OTHER; note = 2'-O-methyluridine-3'-phosphate
  modified_base 20: mod_base = OTHER; note = 2'-O-methyladenosine-3'-phosphate
  modified_base 21: mod_base = OTHER; note = 2'-O-methyladenosine
cagtcccaaaatggaacataa

SEQ ID NO: 3469 - RNA, 21 nt, synthetic construct
  source 1..21: mol_type = other RNA
  modified_base 1: mod_base = OTHER; note = 2'-O-methyladenosine-3'-phosphate
  modified_base 2: mod_base = OTHER; note = 2'-O-methylguanosine-3'-phosphate
  modified_base 3: mod_base = OTHER; note = 2'-O-methyluridine-3'-phosphate
  modified_base 4: mod_base = OTHER; note = 2'-O-methylcytidine-3'-phosphate
  modified_base 5: mod_base = OTHER; note = 2'-O-methylcytidine-3'-phosphate
  modified_base 6: mod_base = OTHER; note = 2'-O-methylcytidine-3'-phosphate
  modified_base 7: mod_base = OTHER; note = 2'-deoxy-2'-fluoroadenosine-3'-phosphate
  modified_base 8: mod_base = OTHER; note = 2'-O-methyladenosine-3'-phosphate
  modified_base 9: mod_base = OTHER; note = 2'-deoxy-2'-fluoroadenosine-3'-phosphate
  modified_base 10: mod_base = OTHER; note = 2'-deoxy-2'-fluoroadenosine-3'-phosphate
  modified_base 11: mod_base = OTHER; note = 2'-deoxy-2'-fluorouridine-3'-phosphate
  modified_base 12: mod_base = OTHER; note = 2'-O-methylguanosine-3'-phosphate
  modified_base 13: mod_base = OTHER; note = 2'-O-methylguanosine-3'-phosphate
  modified_base 14: mod_base = OTHER; note = 2'-O-methyladenosine-3'-phosphate
  modified_base 15: mod_base = OTHER; note = 2'-O-methyladenosine-3'-phosphate
  modified_base 16: mod_base = OTHER; note = 2'-O-methylcytidine-3'-phosphate
  modified_base 17: mod_base = OTHER; note = 2'-O-methyladenosine-3'-phosphate
  modified_base 18: mod_base = OTHER; note = 2'-O-methyluridine-3'-phosphate
  modified_base 19: mod_base = OTHER; note = 2'-O-methyladenosine-3'-phosphate
  modified_base 20: mod_base = OTHER; note = 2'-O-methyladenosine-3'-phosphate
  modified_base 21: mod_base = OTHER; note = 2'-O-methyladenosine
agtcccaaaatggaacataaa

SEQ ID NO: 3470 - RNA, 21 nt, synthetic construct
  source 1..21: mol_type = other RNA
  modified_base 1: mod_base = OTHER; note = 2'-O-methylguanosine-3'-phosphate
  modified_base 2: mod_base = OTHER; note = 2'-O-methyluridine-3'-phosphate
  modified_base 3: mod_base = OTHER; note = 2'-O-methylcytidine-3'-phosphate
  modified_base 4: mod_base = OTHER; note = 2'-O-methylcytidine-3'-phosphate
  modified_base 5: mod_base = OTHER; note = 2'-O-methylcytidine-3'-phosphate
  modified_base 6: mod_base = OTHER; note = 2'-O-methyladenosine-3'-phosphate
  modified_base 7: mod_base = OTHER; note = 2'-deoxy-2'-fluoroadenosine-3'-phosphate
  modified_base 8: mod_base = OTHER; note = 2'-O-methyladenosine-3'-phosphate
  modified_base 9: mod_base = OTHER; note = 2'-deoxy-2'-fluoroadenosine-3'-phosphate
  modified_base 10: mod_base = OTHER; note = 2'-deoxy-2'-fluorouridine-3'-phosphate
  modified_base 11: mod_base = OTHER; note = 2'-deoxy-2'-fluoroguanosine-3'-phosphate
  modified_base 12: mod_base = OTHER; note = 2'-O-methylguanosine-3'-phosphate
  modified_base 13: mod_base = OTHER; note = 2'-O-methyladenosine-3'-phosphate
  modified_base 14: mod_base = OTHER; note = 2'-O-methyladenosine-3'-phosphate
  modified_base 15: mod_base = OTHER; note = 2'-O-methylcytidine-3'-phosphate
  modified_base 16: mod_base = OTHER; note = 2'-O-methyladenosine-3'-phosphate
  modified_base 17: mod_base = OTHER; note = 2'-O-methyluridine-3'-phosphate
  modified_base 18: mod_base = OTHER; note = 2'-O-methyladenosine-3'-phosphate
  modified_base 19: mod_base = OTHER; note = 2'-O-methyladenosine-3'-phosphate
  modified_base 20: mod_base = OTHER; note = 2'-O-methylguanosine-3'-phosphate
  modified_base 21: mod_base = OTHER; note = 2'-O-methyladenosine
gtcccaaaatggaacataaga

SEQ ID NO: 3471 - RNA, 21 nt, synthetic construct
  source 1..21: mol_type = other RNA
  modified_base 1: mod_base = OTHER; note = 2'-O-methyluridine-3'-phosphate
  modified_base 2: mod_base = OTHER; note = 2'-O-methylcytidine-3'-phosphate
  modified_base 3: mod_base = OTHER; note = 2'-O-methylcytidine-3'-phosphate
  modified_base 4: mod_base = OTHER; note = 2'-O-methylcytidine-3'-phosphate
  modified_base 5: mod_base = OTHER; note = 2'-O-methyladenosine-3'-phosphate
  modified_base 6: mod_base = OTHER; note = 2'-O-methyladenosine-3'-phosphate
  modified_base 7: mod_base = OTHER; note = 2'-deoxy-2'-fluoroadenosine-3'-phosphate
  modified_base 8: mod_base = OTHER; note = 2'-O-methyladenosine-3'-phosphate
  modified_base 9: mod_base = OTHER; note = 2'-deoxy-2'-fluorouridine-3'-phosphate
  modified_base 10: mod_base = OTHER; note = 2'-deoxy-2'-fluoroguanosine-3'-phosphate
  modified_base 11: mod_base = OTHER; note = 2'-deoxy-2'-fluoroguanosine-3'-phosphate
  modified_base 12: mod_base = OTHER; note = 2'-O-methyladenosine-3'-phosphate
  modified_base 13: mod_base = OTHER; note = 2'-O-methyladenosine-3'-phosphate
  modified_base 14: mod_base = OTHER; note = 2'-O-methylcytidine-3'-phosphate
  modified_base 15: mod_base = OTHER; note = 2'-O-methyladenosine-3'-phosphate
  modified_base 16: mod_base = OTHER; note = 2'-O-methyluridine-3'-phosphate
  modified_base 17: mod_base = OTHER; note = 2'-O-methyladenosine-3'-phosphate
  modified_base 18: mod_base = OTHER; note = 2'-O-methyladenosine-3'-phosphate
  modified_base 19: mod_base = OTHER; note = 2'-O-methylguanosine-3'-phosphate
  modified_base 20: mod_base = OTHER; note = 2'-O-methylguanosine-3'-phosphate
  modified_base 21: mod_base = OTHER; note = 2'-O-methyladenosine
tcccaaaatggaacataagga

SEQ ID NO: 3472 - RNA, 21 nt, synthetic construct
  source 1..21: mol_type = other RNA
  modified_base 1: mod_base = OTHER; note = 2'-O-methylcytidine-3'-phosphate
  modified_base 2: mod_base = OTHER; note = 2'-O-methylcytidine-3'-phosphate
  modified_base 3: mod_base = OTHER; note = 2'-O-methylcytidine-3'-phosphate
  modified_base 4: mod_base = OTHER; note = 2'-O-methyladenosine-3'-phosphate
  modified_base 5: mod_base = OTHER; note = 2'-O-methyladenosine-3'-phosphate
  modified_base 6: mod_base = OTHER; note = 2'-O-methyladenosine-3'-phosphate
  modified_base 7: mod_base = OTHER; note = 2'-deoxy-2'-fluoroadenosine-3'-phosphate
  modified_base 8: mod_base = OTHER; note = 2'-O-methyluridine-3'-phosphate
  modified_base 9: mod_base = OTHER; note = 2'-deoxy-2'-fluoroguanosine-3'-phosphate
  modified_base 10: mod_base = OTHER; note = 2'-deoxy-2'-fluoroguanosine-3'-phosphate
  modified_base 11: mod_base = OTHER; note = 2'-deoxy-2'-fluoroadenosine-3'-phosphate
  modified_base 12: mod_base = OTHER; note = 2'-O-methyladenosine-3'-phosphate
  modified_base 13: mod_base = OTHER; note = 2'-O-methylcytidine-3'-phosphate
  modified_base 14: mod_base = OTHER; note = 2'-O-methyladenosine-3'-phosphate
  modified_base 15: mod_base = OTHER; note = 2'-O-methyluridine-3'-phosphate
  modified_base 16: mod_base = OTHER; note = 2'-O-methyladenosine-3'-phosphate
  modified_base 17: mod_base = OTHER; note = 2'-O-methyladenosine-3'-phosphate
  modified_base 18: mod_base = OTHER; note = 2'-O-methylguanosine-3'-phosphate
  modified_base 19: mod_base = OTHER; note = 2'-O-methylguanosine-3'-phosphate
  modified_base 20: mod_base = OTHER; note = 2'-O-methyladenosine-3'-phosphate
  modified_base 21: mod_base = OTHER; note = 2'-O-methyladenosine
cccaaaatggaacataaggaa

SEQ ID NO: 3473 - RNA, 21 nt, synthetic construct
  source 1..21: mol_type = other RNA
  modified_base 1: mod_base = OTHER; note = 2'-O-methylcytidine-3'-phosphate
  modified_base 2: mod_base = OTHER; note = 2'-O-methylcytidine-3'-phosphate
  modified_base 3: mod_base = OTHER; note = 2'-O-methyladenosine-3'-phosphate
  modified_base 4: mod_base = OTHER; note = 2'-O-methyladenosine-3'-phosphate
  modified_base 5: mod_base = OTHER; note = 2'-O-methyladenosine-3'-phosphate
  modified_base 6: mod_base = OTHER; note = 2'-O-methyladenosine-3'-phosphate
  modified_base 7: mod_base = OTHER; note = 2'-deoxy-2'-fluorouridine-3'-phosphate
  modified_base 8: mod_base = OTHER; note = 2'-O-methylguanosine-3'-phosphate
  modified_base 9: mod_base = OTHER; note = 2'-deoxy-2'-fluoroguanosine-3'-phosphate
  modified_base 10: mod_base = OTHER; note = 2'-deoxy-2'-fluoroadenosine-3'-phosphate
  modified_base 11: mod_base = OTHER; note = 2'-deoxy-2'-fluoroadenosine-3'-phosphate
  modified_base 12: mod_base = OTHER; note = 2'-O-methylcytidine-3'-phosphate
  modified_base 13: mod_base = OTHER; note = 2'-O-methyladenosine-3'-phosphate
  modified_base 14: mod_base = OTHER; note = 2'-O-methyluridine-3'-phosphate
  modified_base 15: mod_base = OTHER; note = 2'-O-methyladenosine-3'-phosphate
  modified_base 16: mod_base = OTHER; note = 2'-O-methyladenosine-3'-phosphate
  modified_base 17: mod_base = OTHER; note = 2'-O-methylguanosine-3'-phosphate
  modified_base 18: mod_base = OTHER; note = 2'-O-methylguanosine-3'-phosphate
  modified_base 19: mod_base = OTHER; note = 2'-O-methyladenosine-3'-phosphate
  modified_base 20: mod_base = OTHER; note = 2'-O-methyladenosine-3'-phosphate
  modified_base 21: mod_base = OTHER; note = 2'-O-methyladenosine
ccaaaatggaacataaggaaa

SEQ ID NO: 3474 - RNA, 21 nt, synthetic construct
  source 1..21: mol_type = other RNA
  modified_base 1: mod_base = OTHER; note = 2'-O-methylcytidine-3'-phosphate
  modified_base 2: mod_base = OTHER; note = 2'-O-methyladenosine-3'-phosphate
  modified_base 3: mod_base = OTHER; note = 2'-O-methyladenosine-3'-phosphate
  modified_base 4: mod_base = OTHER; note = 2'-O-methyladenosine-3'-phosphate
  modified_base 5: mod_base = OTHER; note = 2'-O-methyladenosine-3'-phosphate
  modified_base 6: mod_base = OTHER; note = 2'-O-methyluridine-3'-phosphate
  modified_base 7: mod_base = OTHER; note = 2'-deoxy-2'-fluoroguanosine-3'-phosphate
  modified_base 8: mod_base = OTHER; note = 2'-O-methylguanosine-3'-phosphate
  modified_base 9: mod_base = OTHER; note = 2'-deoxy-2'-fluoroadenosine-3'-phosphate
  modified_base 10: mod_base = OTHER; note = 2'-deoxy-2'-fluoroadenosine-3'-phosphate
  modified_base 11: mod_base = OTHER; note = 2'-deoxy-2'-fluorocytidine-3'-phosphate
  modified_base 12: mod_base = OTHER; note = 2'-O-methyladenosine-3'-phosphate
  modified_base 13: mod_base = OTHER; note = 2'-O-methyluridine-3'-phosphate
  modified_base 14: mod_base = OTHER; note = 2'-O-methyladenosine-3'-phosphate
  modified_base 15: mod_base = OTHER; note = 2'-O-methyladenosine-3'-phosphate
  modified_base 16: mod_base = OTHER; note = 2'-O-methylguanosine-3'-phosphate
  modified_base 17: mod_base = OTHER; note = 2'-O-methylguanosine-3'-phosphate
  modified_base 18: mod_base = OTHER; note = 2'-O-methyladenosine-3'-phosphate
  modified_base 19: mod_base = OTHER; note = 2'-O-methyladenosine-3'-phosphate
  modified_base 20: mod_base = OTHER; note = 2'-O-methylguanosine-3'-phosphate
  modified_base 21: mod_base = OTHER; note = 2'-O-methyladenosine
caaaatggaacataaggaaga

SEQ ID NO: 3475 - RNA, 21 nt, synthetic construct
  source 1..21: mol_type = other RNA
  modified_base 1: mod_base = OTHER; note = 2'-O-methyladenosine-3'-phosphate
  modified_base 2: mod_base = OTHER; note = 2'-O-methyladenosine-3'-phosphate
  modified_base 3: mod_base = OTHER; note = 2'-O-methyladenosine-3'-phosphate
  modified_base 4: mod_base = OTHER; note = 2'-O-methyladenosine-3'-phosphate
  modified_base 5: mod_base = OTHER; note = 2'-O-methyluridine-3'-phosphate
  modified_base 6: mod_base = OTHER; note = 2'-O-methylguanosine-3'-phosphate
  modified_base 7: mod_base = OTHER; note = 2'-deoxy-2'-fluoroguanosine-3'-phosphate
  modified_base 8: mod_base = OTHER; note = 2'-O-methyladenosine-3'-phosphate
  modified_base 9: mod_base = OTHER; note = 2'-deoxy-2'-fluoroadenosine-3'-phosphate
  modified_base 10: mod_base = OTHER; note = 2'-deoxy-2'-fluorocytidine-3'-phosphate
  modified_base 11: mod_base = OTHER; note = 2'-deoxy-2'-fluoroadenosine-3'-phosphate
  modified_base 12: mod_base = OTHER; note = 2'-O-methyluridine-3'-phosphate
  modified_base 13: mod_base = OTHER; note = 2'-O-methyladenosine-3'-phosphate
  modified_base 14: mod_base = OTHER; note = 2'-O-methyladenosine-3'-phosphate
  modified_base 15: mod_base = OTHER; note = 2'-O-methylguanosine-3'-phosphate
  modified_base 16: mod_base = OTHER; note = 2'-O-methylguanosine-3'-phosphate
  modified_base 17: mod_base = OTHER; note = 2'-O-methyladenosine-3'-phosphate
  modified_base 18: mod_base = OTHER; note = 2'-O-methyladenosine-3'-phosphate
  modified_base 19: mod_base = OTHER; note = 2'-O-methylguanosine-3'-phosphate
  modified_base 20: mod_base = OTHER; note = 2'-O-methyluridine-3'-phosphate
  modified_base 21: mod_base = OTHER; note = 2'-O-methyladenosine
aaaatggaacataaggaagta

SEQ ID NO: 3476 - RNA, 21 nt, synthetic construct
  source 1..21: mol_type = other RNA
  modified_base 1: mod_base = OTHER; note = 2'-O-methyladenosine-3'-phosphate
  modified_base 2: mod_base = OTHER; note = 2'-O-methyladenosine-3'-phosphate
  modified_base 3: mod_base = OTHER; note = 2'-O-methyladenosine-3'-phosphate
  modified_base 4: mod_base = OTHER; note = 2'-O-methyluridine-3'-phosphate
  modified_base 5: mod_base = OTHER; note = 2'-O-methylguanosine-3'-phosphate
  modified_base 6: mod_base = OTHER; note = 2'-O-methylguanosine-3'-phosphate
  modified_base 7: mod_base = OTHER; note = 2'-deoxy-2'-fluoroadenosine-3'-phosphate
  modified_base 8: mod_base = OTHER; note = 2'-O-methyladenosine-3'-phosphate
  modified_base 9: mod_base = OTHER; note = 2'-deoxy-2'-fluorocytidine-3'-phosphate
  modified_base 10: mod_base = OTHER; note = 2'-deoxy-2'-fluoroadenosine-3'-phosphate
  modified_base 11: mod_base = OTHER; note = 2'-deoxy-2'-fluorouridine-3'-phosphate
  modified_base 12: mod_base = OTHER; note = 2'-O-methyladenosine-3'-phosphate
  modified_base 13: mod_base = OTHER; note = 2'-O-methyladenosine-3'-phosphate
  modified_base 14: mod_base = OTHER; note = 2'-O-methylguanosine-3'-phosphate
  modified_base 15: mod_base = OTHER; note = 2'-O-methylguanosine-3'-phosphate
  modified_base 16: mod_base = OTHER; note = 2'-O-methyladenosine-3'-phosphate
  modified_base 17: mod_base = OTHER; note = 2'-O-methyladenosine-3'-phosphate
  modified_base 18: mod_base = OTHER; note = 2'-O-methylguanosine-3'-phosphate
  modified_base 19: mod_base = OTHER; note = 2'-O-methyluridine-3'-phosphate
  modified_base 20: mod_base = OTHER; note = 2'-O-methylguanosine-3'-phosphate
  modified_base 21: mod_base = OTHER; note = 2'-O-methyladenosine
aaatggaacataaggaagtga

SEQ ID NO: 3477 - RNA, 21 nt, synthetic construct
  source 1..21: mol_type = other RNA
  modified_base 1: mod_base = OTHER; note = 2'-O-methyladenosine-3'-phosphate
  modified_base 2: mod_base = OTHER; note = 2'-O-methyladenosine-3'-phosphate
  modified_base 3: mod_base = OTHER; note = 2'-O-methyluridine-3'-phosphate
  modified_base 4: mod_base = OTHER; note = 2'-O-methylguanosine-3'-phosphate
  modified_base 5: mod_base = OTHER; note = 2'-O-methylguanosine-3'-phosphate
  modified_base 6: mod_base = OTHER; note = 2'-O-methyladenosine-3'-phosphate
  modified_base 7: mod_base = OTHER; note = 2'-deoxy-2'-fluoroadenosine-3'-phosphate
  modified_base 8: mod_base = OTHER; note = 2'-O-methylcytidine-3'-phosphate
  modified_base 9: mod_base = OTHER; note = 2'-deoxy-2'-fluoroadenosine-3'-phosphate
  modified_base 10: mod_base = OTHER; note = 2'-deoxy-2'-fluorouridine-3'-phosphate
  modified_base 11: mod_base = OTHER; note = 2'-deoxy-2'-fluoroadenosine-3'-phosphate
  modified_base 12: mod_base = OTHER; note = 2'-O-methyladenosine-3'-phosphate
  modified_base 13: mod_base = OTHER; note = 2'-O-methylguanosine-3'-phosphate
  modified_base 14: mod_base = OTHER; note = 2'-O-methylguanosine-3'-phosphate
  modified_base 15: mod_base = OTHER; note = 2'-O-methyladenosine-3'-phosphate
  modified_base 16: mod_base = OTHER; note = 2'-O-methyladenosine-3'-phosphate
  modified_base 17: mod_base = OTHER; note = 2'-O-methylguanosine-3'-phosphate
  modified_base 18: mod_base = OTHER; note = 2'-O-methyluridine-3'-phosphate
  modified_base 19: mod_base = OTHER; note = 2'-O-methylguanosine-3'-phosphate
  modified_base 20: mod_base = OTHER; note = 2'-O-methylguanosine-3'-phosphate
  modified_base 21: mod_base = OTHER; note = 2'-O-methyladenosine
aatggaacataaggaagtgga

SEQ ID NO: 3478 - RNA, 21 nt, synthetic construct
  source 1..21: mol_type = other RNA
  modified_base 1: mod_base = OTHER; note = 2'-O-methyladenosine-3'-phosphate
  modified_base 2: mod_base = OTHER; note = 2'-O-methyluridine-3'-phosphate
  modified_base 3: mod_base = OTHER; note = 2'-O-methylguanosine-3'-phosphate
  modified_base 4: mod_base = OTHER; note = 2'-O-methylguanosine-3'-phosphate
  modified_base 5: mod_base = OTHER; note = 2'-O-methyladenosine-3'-phosphate
  modified_base 6: mod_base = OTHER; note = 2'-O-methyladenosine-3'-phosphate
  modified_base 7: mod_base = OTHER; note = 2'-deoxy-2'-fluorocytidine-3'-phosphate
  modified_base 8: mod_base = OTHER; note = 2'-O-methyladenosine-3'-phosphate
  modified_base 9: mod_base = OTHER; note = 2'-deoxy-2'-fluorouridine-3'-phosphate
  modified_base 10: mod_base = OTHER; note = 2'-deoxy-2'-fluoroadenosine-3'-phosphate
  modified_base 11: mod_base = OTHER; note = 2'-deoxy-2'-fluoroadenosine-3'-phosphate
  modified_base 12: mod_base = OTHER; note = 2'-O-methylguanosine-3'-phosphate
  modified_base 13: mod_base = OTHER; note = 2'-O-methylguanosine-3'-phosphate
  modified_base 14: mod_base = OTHER; note = 2'-O-methyladenosine-3'-phosphate
  modified_base 15: mod_base = OTHER; note = 2'-O-methyladenosine-3'-phosphate
  modified_base 16: mod_base = OTHER; note = 2'-O-methylguanosine-3'-phosphate
  modified_base 17: mod_base = OTHER; note = 2'-O-methyluridine-3'-phosphate
  modified_base 18: mod_base = OTHER; note = 2'-O-methylguanosine-3'-phosphate
  modified_base 19: mod_base = OTHER; note = 2'-O-methylguanosine-3'-phosphate
  modified_base 20: mod_base = OTHER; note = 2'-O-methyluridine-3'-phosphate
  modified_base 21: mod_base = OTHER; note = 2'-O-methyladenosine
atggaacataaggaagtggta

SEQ ID NO: 3479 - RNA, 21 nt, synthetic construct
  source 1..21: mol_type = other RNA
  modified_base 1: mod_base = OTHER; note = 2'-O-methyluridine-3'-phosphate
  modified_base 2: mod_base = OTHER; note = 2'-O-methylguanosine-3'-phosphate
  modified_base 3: mod_base = OTHER; note = 2'-O-methylguanosine-3'-phosphate
  modified_base 4: mod_base = OTHER; note = 2'-O-methyladenosine-3'-phosphate
  modified_base 5: mod_base = OTHER; note = 2'-O-methyladenosine-3'-phosphate
  modified_base 6: mod_base = OTHER; note = 2'-O-methylcytidine-3'-phosphate
  modified_base 7: mod_base = OTHER; note = 2'-deoxy-2'-fluoroadenosine-3'-phosphate
  modified_base 8: mod_base = OTHER; note = 2'-O-methyluridine-3'-phosphate
  modified_base 9: mod_base = OTHER; note = 2'-deoxy-2'-fluoroadenosine-3'-phosphate
  modified_base 10: mod_base = OTHER; note = 2'-deoxy-2'-fluoroadenosine-3'-phosphate
  modified_base 11: mod_base = OTHER; note = 2'-deoxy-2'-fluoroguanosine-3'-phosphate
  modified_base 12: mod_base = OTHER; note = 2'-O-methylguanosine-3'-phosphate
  modified_base 13: mod_base = OTHER; note = 2'-O-methyladenosine-3'-phosphate
  modified_base 14: mod_base = OTHER; note = 2'-O-methyladenosine-3'-phosphate
  modified_base 15: mod_base = OTHER; note = 2'-O-methylguanosine-3'-phosphate
  modified_base 16: mod_base = OTHER; note = 2'-O-methyluridine-3'-phosphate
  modified_base 17: mod_base = OTHER; note = 2'-O-methylguanosine-3'-phosphate
  modified_base 18: mod_base = OTHER; note = 2'-O-methylguanosine-3'-phosphate
  modified_base 19: mod_base = OTHER; note = 2'-O-methyluridine-3'-phosphate
  modified_base 20: mod_base = OTHER; note = 2'-O-methyluridine-3'-phosphate
  modified_base 21: mod_base = OTHER; note = 2'-O-methyladenosine
tggaacataaggaagtggtta

SEQ ID NO: 3480 - RNA, 21 nt, synthetic construct
  source 1..21: mol_type = other RNA
  modified_base 1: mod_base = OTHER; note = 2'-O-methylcytidine-3'-phosphate
  modified_base 2: mod_base = OTHER; note = 2'-O-methylcytidine-3'-phosphate
  modified_base 3: mod_base = OTHER; note = 2'-O-methyluridine-3'-phosphate
  modified_base 4: mod_base = OTHER; note = 2'-O-methylcytidine-3'-phosphate
  modified_base 5: mod_base = OTHER; note = 2'-O-methyluridine-3'-phosphate
  modified_base 6: mod_base = OTHER; note = 2'-O-methylguanosine-3'-phosphate
  modified_base 7: mod_base = OTHER; note = 2'-deoxy-2'-fluoroguanosine-3'-phosphate
  modified_base 8: mod_base = OTHER; note = 2'-O-methyladenosine-3'-phosphate
  modified_base 9: mod_base = OTHER; note = 2'-deoxy-2'-fluorouridine-3'-phosphate
  modified_base 10: mod_base = OTHER; note = 2'-deoxy-2'-fluoroguanosine-3'-phosphate
  modified_base 11: mod_base = OTHER; note = 2'-deoxy-2'-fluoroadenosine-3'-phosphate
  modified_base 12: mod_base = OTHER; note = 2'-O-methylcytidine-3'-phosphate
  modified_base 13: mod_base = OTHER; note = 2'-O-methyluridine-3'-phosphate
  modified_base 14: mod_base = OTHER; note = 2'-O-methyladenosine-3'-phosphate
  modified_base 15: mod_base = OTHER; note = 2'-O-methyluridine-3'-phosphate
  modified_base 16: mod_base = OTHER; note = 2'-O-methylguanosine-3'-phosphate
  modified_base 17: mod_base = OTHER; note = 2'-O-methyluridine-3'-phosphate
  modified_base 18: mod_base = OTHER; note = 2'-O-methylguanosine-3'-phosphate
  modified_base 19: mod_base = OTHER; note = 2'-O-methyladenosine-3'-phosphate
  modified_base 20: mod_base = OTHER; note = 2'-O-methyladenosine-3'-phosphate
  modified_base 21: mod_base = OTHER; note = 2'-O-methyladenosine
cctctggatgactatgtgaaa

SEQ ID NO: 3481 - RNA, 21 nt, synthetic construct
  source 1..21: mol_type = other RNA
  modified_base 1: mod_base = OTHER; note = 2'-O-methyluridine-3'-phosphate
  modified_base 2: mod_base = OTHER; note = 2'-O-methyladenosine-3'-phosphate
  modified_base 3: mod_base = OTHER; note = 2'-O-methyladenosine-3'-phosphate
  modified_base 4: mod_base = OTHER; note = 2'-O-methylguanosine-3'-phosphate
  modified_base 5: mod_base = OTHER; note = 2'-O-methyladenosine-3'-phosphate
  modified_base 6: mod_base = OTHER; note = 2'-O-methyladenosine-3'-phosphate
  modified_base 7: mod_base = OTHER; note = 2'-deoxy-2'-fluoroguanosine-3'-phosphate
  modified_base 8: mod_base = OTHER; note = 2'-O-methylcytidine-3'-phosphate
  modified_base 9: mod_base = OTHER; note = 2'-deoxy-2'-fluoroadenosine-3'-phosphate
  modified_base 10: mod_base = OTHER; note = 2'-deoxy-2'-fluoroguanosine-3'-phosphate
  modified_base 11: mod_base = OTHER; note = 2'-deoxy-2'-fluorocytidine-3'-phosphate
  modified_base 12: mod_base = OTHER; note = 2'-O-methyluridine-3'-phosphate
  modified_base 13: mod_base = OTHER; note = 2'-O-methylguanosine-3'-phosphate
  modified_base 14: mod_base = OTHER; note = 2'-O-methylguanosine-3'-phosphate
  modified_base 15: mod_base = OTHER; note = 2'-O-methylguanosine-3'-phosphate
  modified_base 16: mod_base = OTHER; note = 2'-O-methyladenosine-3'-phosphate
  modified_base 17: mod_base = OTHER; note = 2'-O-methylguanosine-3'-phosphate
  modified_base 18: mod_base = OTHER; note = 2'-O-methylcytidine-3'-phosphate
  modified_base 19: mod_base = OTHER; note = 2'-O-methyladenosine-3'-phosphate
  modified_base 20: mod_base = OTHER; note = 2'-O-methylguanosine-3'-phosphate
  modified_base 21: mod_base = OTHER; note = 2'-O-methyladenosine
taagaagcagctgggagcaga

SEQ ID NO: 3482 - RNA, 21 nt, synthetic construct
  source 1..21: mol_type = other RNA
  modified_base 1: mod_base = OTHER; note = 2'-O-methyladenosine-3'-phosphate
  modified_base 2: mod_base = OTHER; note = 2'-O-methylguanosine-3'-phosphate
  modified_base 3: mod_base = OTHER; note = 2'-O-methylcytidine-3'-phosphate
  modified_base 4: mod_base = OTHER; note = 2'-O-methyladenosine-3'-phosphate
  modified_base 5: mod_base = OTHER; note = 2'-O-methylguanosine-3'-phosphate
  modified_base 6: mod_base = OTHER; note = 2'-O-methylcytidine-3'-phosphate
  modified_base 7: mod_base = OTHER; note = 2'-deoxy-2'-fluorouridine-3'-phosphate
  modified_base 8: mod_base = OTHER; note = 2'-O-methylguanosine-3'-phosphate
  modified_base 9: mod_base = OTHER; note = 2'-deoxy-2'-fluoroguanosine-3'-phosphate
  modified_base 10: mod_base = OTHER; note = 2'-deoxy-2'-fluoroguanosine-3'-phosphate
  modified_base 11: mod_base = OTHER; note = 2'-deoxy-2'-fluoroadenosine-3'-phosphate
  modified_base 12: mod_base = OTHER; note = 2'-O-methylguanosine-3'-phosphate
  modified_base 13: mod_base = OTHER; note = 2'-O-methylcytidine-3'-phosphate
  modified_base 14: mod_base = OTHER; note = 2'-O-methyladenosine-3'-phosphate
  modified_base 15: mod_base = OTHER; note = 2'-O-methylguanosine-3'-phosphate
  modified_base 16: mod_base = OTHER; note = 2'-O-methylguanosine-3'-phosphate
  modified_base 17: mod_base = OTHER; note = 2'-O-methyladenosine-3'-phosphate
  modified_base 18: mod_base = OTHER; note = 2'-O-methyladenosine-3'-phosphate
  modified_base 19: mod_base = OTHER; note = 2'-O-methylguanosine-3'-phosphate
  modified_base 20: mod_base = OTHER; note = 2'-O-methyluridine-3'-phosphate
  modified_base 21: mod_base = OTHER; note = 2'-O-methyladenosine
agcagctgggagcaggaagta

SEQ ID NO: 3483 - RNA, 21 nt, synthetic construct
  source 1..21: mol_type = other RNA
  modified_base 1: mod_base = OTHER; note = 2'-O-methyladenosine-3'-phosphate
  modified_base 2: mod_base = OTHER; note = 2'-O-methylguanosine-3'-phosphate
  modified_base 3: mod_base = OTHER; note = 2'-O-methylcytidine-3'-phosphate
  modified_base 4: mod_base = OTHER; note = 2'-O-methyluridine-3'-phosphate
  modified_base 5: mod_base = OTHER; note = 2'-O-methylguanosine-3'-phosphate
  modified_base 6: mod_base = OTHER; note = 2'-O-methylguanosine-3'-phosphate
  modified_base 7: mod_base = OTHER; note = 2'-deoxy-2'-fluoroguanosine-3'-phosphate
  modified_base 8: mod_base = OTHER; note = 2'-O-methyladenosine-3'-phosphate
  modified_base 9: mod_base = OTHER; note = 2'-deoxy-2'-fluoroguanosine-3'-phosphate
  modified_base 10: mod_base = OTHER; note = 2'-deoxy-2'-fluorocytidine-3'-phosphate
  modified_base 11: mod_base = OTHER; note = 2'-deoxy-2'-fluoroadenosine-3'-phosphate
  modified_base 12: mod_base = OTHER; note = 2'-O-methylguanosine-3'-phosphate
  modified_base 13: mod_base = OTHER; note = 2'-O-methylguanosine-3'-phosphate
  modified_base 14: mod_base = OTHER; note = 2'-O-methyladenosine-3'-phosphate
  modified_base 15: mod_base = OTHER; note = 2'-O-methyladenosine-3'-phosphate
  modified_base 16: mod_base = OTHER; note = 2'-O-methylguanosine-3'-phosphate
  modified_base 17: mod_base = OTHER; note = 2'-O-methyluridine-3'-phosphate
  modified_base 18: mod_base = OTHER; note = 2'-O-methyladenosine-3'-phosphate
  modified_base 19: mod_base = OTHER; note = 2'-O-methyluridine-3'-phosphate
  modified_base 20: mod_base = OTHER; note = 2'-O-methyladenosine-3'-phosphate
  modified_base 21: mod_base = OTHER; note = 2'-O-methyladenosine
agctgggagcaggaagtataa

SEQ ID NO: 3484 - RNA, 21 nt, synthetic construct
  source 1..21: mol_type = other RNA
  modified_base 1: mod_base = OTHER; note = 2'-O-methylcytidine-3'-phosphate
  modified_base 2: mod_base = OTHER; note = 2'-O-methyluridine-3'-phosphate
  modified_base 3: mod_base = OTHER; note = 2'-O-methylguanosine-3'-phosphate
  modified_base 4: mod_base = OTHER; note = 2'-O-methylguanosine-3'-phosphate
  modified_base 5: mod_base = OTHER; note = 2'-O-methylguanosine-3'-phosphate
  modified_base 6: mod_base = OTHER; note = 2'-O-methyladenosine-3'-phosphate
  modified_base 7: mod_base = OTHER; note = 2'-deoxy-2'-fluoroguanosine-3'-phosphate
  modified_base 8: mod_base = OTHER; note = 2'-O-methylcytidine-3'-phosphate
  modified_base 9: mod_base = OTHER; note = 2'-deoxy-2'-fluoroadenosine-3'-phosphate
  modified_base 10: mod_base = OTHER; note = 2'-deoxy-2'-fluoroguanosine-3'-phosphate
  modified_base 11: mod_base = OTHER; note = 2'-deoxy-2'-fluoroguanosine-3'-phosphate
  modified_base 12: mod_base = OTHER; note = 2'-O-methyladenosine-3'-phosphate
  modified_base 13: mod_base = OTHER; note = 2'-O-methyladenosine-3'-phosphate
  modified_base 14: mod_base = OTHER; note = 2'-O-methylguanosine-3'-phosphate
  modified_base 15: mod_base = OTHER; note = 2'-O-methyluridine-3'-phosphate
  modified_base 16: mod_base = OTHER; note = 2'-O-methyladenosine-3'-phosphate
  modified_base 17: mod_base = OTHER; note = 2'-O-methyluridine-3'-phosphate
  modified_base 18: mod_base = OTHER; note = 2'-O-methyladenosine-3'-phosphate
  modified_base 19: mod_base = OTHER; note = 2'-O-methylguanosine-3'-phosphate
  modified_base 20: mod_base = OTHER; note = 2'-O-methyladenosine-3'-phosphate
  modified_base 21: mod_base = OTHER; note = 2'-O-methyladenosine
ctgggagcaggaagtatagaa

SEQ ID NO: 3485 - RNA, 21 nt, synthetic construct
  source 1..21: mol_type = other RNA
  modified_base 1: mod_base = OTHER; note = 2'-O-methyluridine-3'-phosphate
  modified_base 2: mod_base = OTHER; note = 2'-O-methylguanosine-3'-phosphate
  modified_base 3: mod_base = OTHER; note = 2'-O-methylguanosine-3'-phosphate
  modified_base 4: mod_base = OTHER; note = 2'-O-methylguanosine-3'-phosphate
  modified_base 5: mod_base = OTHER; note = 2'-O-methyladenosine-3'-phosphate
  modified_base 6: mod_base = OTHER; note = 2'-O-methylguanosine-3'-phosphate
  modified_base 7: mod_base = OTHER; note = 2'-deoxy-2'-fluorocytidine-3'-phosphate
  modified_base 8: mod_base = OTHER; note = 2'-O-methyladenosine-3'-phosphate
  modified_base 9: mod_base = OTHER; note = 2'-deoxy-2'-fluoroguanosine-3'-phosphate
  modified_base 10: mod_base = OTHER; note = 2'-deoxy-2'-fluoroguanosine-3'-phosphate
  modified_base 11: mod_base = OTHER; note = 2'-deoxy-2'-fluoroadenosine-3'-phosphate
  modified_base 12: mod_base = OTHER; note = 2'-O-methyladenosine-3'-phosphate
  modified_base 13: mod_base = OTHER; note = 2'-O-methylguanosine-3'-phosphate
  modified_base 14: mod_base = OTHER; note = 2'-O-methyluridine-3'-phosphate
  modified_base 15: mod_base = OTHER; note = 2'-O-methyladenosine-3'-phosphate
  modified_base 16: mod_base = OTHER; note = 2'-O-methyluridine-3'-phosphate
  modified_base 17: mod_base = OTHER; note = 2'-O-methyladenosine-3'-phosphate
  modified_base 18: mod_base = OTHER; note = 2'-O-methylguanosine-3'-phosphate
  modified_base 19: mod_base = OTHER; note = 2'-O-methyladenosine-3'-phosphate
  modified_base 20: mod_base = OTHER; note = 2'-O-methyladenosine-3'-phosphate
  modified_base 21: mod_base = OTHER; note = 2'-O-methyladenosine
tgggagcaggaagtatagaaa

SEQ ID NO: 3486 - RNA, 21 nt, synthetic construct
  source 1..21: mol_type = other RNA
  modified_base 1: mod_base = OTHER; note = 2'-O-methylguanosine-3'-phosphate
  modified_base 2: mod_base = OTHER; note = 2'-O-methylguanosine-3'-phosphate
  modified_base 3: mod_base = OTHER; note = 2'-O-methylguanosine-3'-phosphate
  modified_base 4: mod_base = OTHER; note = 2'-O-methyladenosine-3'-phosphate
  modified_base 5: mod_base = OTHER; note = 2'-O-methylguanosine-3'-phosphate
  modified_base 6: mod_base = OTHER; note = 2'-O-methylcytidine-3'-phosphate
  modified_base 7: mod_base = OTHER; note = 2'-deoxy-2'-fluoroadenosine-3'-phosphate
  modified_base 8: mod_base = OTHER; note = 2'-O-methylguanosine-3'-phosphate
  modified_base 9: mod_base = OTHER; note = 2'-deoxy-2'-fluoroguanosine-3'-phosphate
  modified_base 10: mod_base = OTHER; note = 2'-deoxy-2'-fluoroadenosine-3'-phosphate
  modified_base 11: mod_base = OTHER; note = 2'-deoxy-2'-fluoroadenosine-3'-phosphate
  modified_base 12: mod_base = OTHER; note = 2'-O-methylguanosine-3'-phosphate
  modified_base 13: mod_base = OTHER; note = 2'-O-methyluridine-3'-phosphate
  modified_base 14: mod_base = OTHER; note = 2'-O-methyladenosine-3'-phosphate
  modified_base 15: mod_base = OTHER; note = 2'-O-methyluridine-3'-phosphate
  modified_base 16: mod_base = OTHER; note = 2'-O-methyladenosine-3'-phosphate
  modified_base 17: mod_base = OTHER; note = 2'-O-methylguanosine-3'-phosphate
  modified_base 18: mod_base = OTHER; note = 2'-O-methyladenosine-3'-phosphate
  modified_base 19: mod_base = OTHER; note = 2'-O-methyladenosine-3'-phosphate
  modified_base 20: mod_base = OTHER; note = 2'-O-methylguanosine-3'-phosphate
  modified_base 21: mod_base = OTHER; note = 2'-O-methyladenosine
gggagcaggaagtatagaaga

SEQ ID NO: 3487 - RNA, 21 nt, synthetic construct
  source 1..21: mol_type = other RNA
  modified_base 1: mod_base = OTHER; note = 2'-O-methylguanosine-3'-phosphate
  modified_base 2: mod_base = OTHER; note = 2'-O-methylguanosine-3'-phosphate
  modified_base 3: mod_base = OTHER; note = 2'-O-methyladenosine-3'-phosphate
  modified_base 4: mod_base = OTHER; note = 2'-O-methylguanosine-3'-phosphate
  modified_base 5: mod_base = OTHER; note = 2'-O-methylcytidine-3'-phosphate
  modified_base 6: mod_base = OTHER; note = 2'-O-methyladenosine-3'-phosphate
  modified_base 7: mod_base = OTHER; note = 2'-deoxy-2'-fluoroguanosine-3'-phosphate
  modified_base 8: mod_base = OTHER; note = 2'-O-methylguanosine-3'-phosphate
  modified_base 9: mod_base = OTHER; note = 2'-deoxy-2'-fluoroadenosine-3'-phosphate
  modified_base 10: mod_base = OTHER; note = 2'-deoxy-2'-fluoroadenosine-3'-phosphate
  modified_base 11: mod_base = OTHER; note = 2'-deoxy-2'-fluoroguanosine-3'-phosphate
  modified_base 12: mod_base = OTHER; note = 2'-O-methyluridine-3'-phosphate
  modified_base 13: mod_base = OTHER; note = 2'-O-methyladenosine-3'-phosphate
  modified_base 14: mod_base = OTHER; note = 2'-O-methyluridine-3'-phosphate
  modified_base 15: mod_base = OTHER; note = 2'-O-methyladenosine-3'-phosphate
  modified_base 16: mod_base = OTHER; note = 2'-O-methylguanosine-3'-phosphate
  modified_base 17: mod_base = OTHER; note = 2'-O-methyladenosine-3'-phosphate
  modified_base 18: mod_base = OTHER; note = 2'-O-methyladenosine-3'-phosphate
  modified_base 19: mod_base = OTHER; note = 2'-O-methylguanosine-3'-phosphate
  modified_base 20: mod_base = OTHER; note = 2'-O-methyladenosine-3'-phosphate
  modified_base 21: mod_base = OTHER; note = 2'-O-methyladenosine
ggagcaggaagtatagaagaa

SEQ ID NO: 3488 - RNA, 21 nt, synthetic construct
  source 1..21: mol_type = other RNA
  modified_base 1: mod_base = OTHER; note = 2'-O-methylguanosine-3'-phosphate
  modified_base 2: mod_base = OTHER; note = 2'-O-methyladenosine-3'-phosphate
  modified_base 3: mod_base = OTHER; note = 2'-O-methylguanosine-3'-phosphate
  modified_base 4: mod_base = OTHER; note = 2'-O-methylcytidine-3'-phosphate
  modified_base 5: mod_base = OTHER; note = 2'-O-methyladenosine-3'-phosphate
  modified_base 6: mod_base = OTHER; note = 2'-O-methylguanosine-3'-phosphate
  modified_base 7: mod_base = OTHER; note = 2'-deoxy-2'-fluoroguanosine-3'-phosphate
  modified_base 8: mod_base = OTHER; note = 2'-O-methyladenosine-3'-phosphate
  modified_base 9: mod_base = OTHER; note = 2'-deoxy-2'-fluoroadenosine-3'-phosphate
  modified_base 10: mod_base = OTHER; note = 2'-deoxy-2'-fluoroguanosine-3'-phosphate
  modified_base 11: mod_base = OTHER; note = 2'-deoxy-2'-fluorouridine-3'-phosphate
  modified_base 12: mod_base = OTHER; note = 2'-O-methyladenosine-3'-phosphate
  modified_base 13: mod_base = OTHER; note = 2'-O-methyluridine-3'-phosphate
  modified_base 14: mod_base = OTHER; note = 2'-O-methyladenosine-3'-phosphate
  modified_base 15: mod_base = OTHER; note = 2'-O-methylguanosine-3'-phosphate
  modified_base 16: mod_base = OTHER; note = 2'-O-methyladenosine-3'-phosphate
  modified_base 17: mod_base = OTHER; note = 2'-O-methyladenosine-3'-phosphate
  modified_base 18: mod_base = OTHER; note = 2'-O-methylguanosine-3'-phosphate
  modified_base 19: mod_base = OTHER; note = 2'-O-methyladenosine-3'-phosphate
  modified_base 20: mod_base = OTHER; note = 2'-O-methyladenosine-3'-phosphate
  modified_base 21: mod_base = OTHER; note = 2'-O-methyladenosine
gagcaggaagtatagaagaaa

SEQ ID NO: 3489 - RNA, 21 nt, synthetic construct
  source 1..21: mol_type = other RNA
  modified_base 1: mod_base = OTHER; note = 2'-O-methyladenosine-3'-phosphate
  modified_base 2: mod_base = OTHER; note = 2'-O-methylguanosine-3'-phosphate
  modified_base 3: mod_base = OTHER; note = 2'-O-methylcytidine-3'-phosphate
  modified_base 4: mod_base = OTHER; note = 2'-O-methyladenosine-3'-phosphate
  modified_base 5: mod_base = OTHER; note = 2'-O-methylguanosine-3'-phosphate
  modified_base 6: mod_base = OTHER; note = 2'-O-methylguanosine-3'-phosphate
  modified_base 7: mod_base = OTHER; note = 2'-deoxy-2'-fluoroadenosine-3'-phosphate
  modified_base 8: mod_base = OTHER; note = 2'-O-methyladenosine-3'-phosphate
  modified_base 9: mod_base = OTHER; note = 2'-deoxy-2'-fluoroguanosine-3'-phosphate
  modified_base 10: mod_base = OTHER; note = 2'-deoxy-2'-fluorouridine-3'-phosphate
  modified_base 11: mod_base = OTHER; note = 2'-deoxy-2'-fluoroadenosine-3'-phosphate
  modified_base 12: mod_base = OTHER; note = 2'-O-methyluridine-3'-phosphate
  modified_base 13: mod_base = OTHER; note = 2'-O-methyladenosine-3'-phosphate
  modified_base 14: mod_base = OTHER; note = 2'-O-methylguanosine-3'-phosphate
  modified_base 15: mod_base = OTHER; note = 2'-O-methyladenosine-3'-phosphate
  modified_base 16: mod_base = OTHER; note = 2'-O-methyladenosine-3'-phosphate
  modified_base 17: mod_base = OTHER; note = 2'-O-methylguanosine-3'-phosphate
  modified_base 18: mod_base = OTHER; note = 2'-O-methyladenosine-3'-phosphate
  modified_base 19: mod_base = OTHER; note = 2'-O-methyladenosine-3'-phosphate
  modified_base 20: mod_base = OTHER; note = 2'-O-methyluridine-3'-phosphate
  modified_base 21: mod_base = OTHER; note = 2'-O-methyladenosine
agcaggaagtatagaagaata

SEQ ID NO: 3490 - RNA, 21 nt, synthetic construct
  source 1..21: mol_type = other RNA
  modified_base 1: mod_base = OTHER; note = 2'-O-methylguanosine-3'-phosphate
  modified_base 2: mod_base = OTHER; note = 2'-O-methylcytidine-3'-phosphate
  modified_base 3: mod_base = OTHER; note = 2'-O-methyladenosine-3'-phosphate
  modified_base 4: mod_base = OTHER; note = 2'-O-methylguanosine-3'-phosphate
  modified_base 5: mod_base = OTHER; note = 2'-O-methylguanosine-3'-phosphate
  modified_base 6: mod_base = OTHER; note = 2'-O-methyladenosine-3'-phosphate
  modified_base 7: mod_base = OTHER; note = 2'-deoxy-2'-fluoroadenosine-3'-phosphate
  modified_base 8: mod_base = OTHER; note = 2'-O-methylguanosine-3'-phosphate
  modified_base 9: mod_base = OTHER; note = 2'-deoxy-2'-fluorouridine-3'-phosphate
  modified_base 10: mod_base = OTHER; note = 2'-deoxy-2'-fluoroadenosine-3'-phosphate
  modified_base 11: mod_base = OTHER; note = 2'-deoxy-2'-fluorouridine-3'-phosphate
  modified_base 12: mod_base = OTHER; note = 2'-O-methyladenosine-3'-phosphate
  modified_base 13: mod_base = OTHER; note = 2'-O-methylguanosine-3'-phosphate
  modified_base 14: mod_base = OTHER; note = 2'-O-methyladenosine-3'-phosphate
  modified_base 15: mod_base = OTHER; note = 2'-O-methyladenosine-3'-phosphate
  modified_base 16: mod_base = OTHER; note = 2'-O-methylguanosine-3'-phosphate
  modified_base 17: mod_base = OTHER; note = 2'-O-methyladenosine-3'-phosphate
  modified_base 18: mod_base = OTHER; note = 2'-O-methyladenosine-3'-phosphate
  modified_base 19: mod_base = OTHER; note = 2'-O-methyluridine-3'-phosphate
  modified_base 20: mod_base = OTHER; note = 2'-O-methylguanosine-3'-phosphate
  modified_base 21: mod_base = OTHER; note = 2'-O-methyladenosine
gcaggaagtatagaagaatga

SEQ ID NO: 3491 - RNA, 21 nt, synthetic construct
  source 1..21: mol_type = other RNA
  modified_base 1: mod_base = OTHER; note = 2'-O-methylcytidine-3'-phosphate
  modified_base 2: mod_base = OTHER; note = 2'-O-methyladenosine-3'-phosphate
  modified_base 3: mod_base = OTHER; note = 2'-O-methylguanosine-3'-phosphate
  modified_base 4: mod_base = OTHER; note = 2'-O-methylguanosine-3'-phosphate
  modified_base 5: mod_base = OTHER; note = 2'-O-methyladenosine-3'-phosphate
  modified_base 6: mod_base = OTHER; note = 2'-O-methyladenosine-3'-phosphate
  modified_base 7: mod_base = OTHER; note = 2'-deoxy-2'-fluoroguanosine-3'-phosphate
  modified_base 8: mod_base = OTHER; note = 2'-O-methyluridine-3'-phosphate
  modified_base 9: mod_base = OTHER; note = 2'-deoxy-2'-fluoroadenosine-3'-phosphate
  modified_base 10: mod_base = OTHER; note = 2'-deoxy-2'-fluorouridine-3'-phosphate
  modified_base 11: mod_base = OTHER; note = 2'-deoxy-2'-fluoroadenosine-3'-phosphate
  modified_base 12: mod_base = OTHER; note = 2'-O-methylguanosine-3'-phosphate
  modified_base 13: mod_base = OTHER; note = 2'-O-methyladenosine-3'-phosphate
  modified_base 14: mod_base = OTHER; note = 2'-O-methyladenosine-3'-phosphate
  modified_base 15: mod_base = OTHER; note = 2'-O-methylguanosine-3'-phosphate
  modified_base 16: mod_base = OTHER; note = 2'-O-methyladenosine-3'-phosphate
  modified_base 17: mod_base = OTHER; note = 2'-O-methyladenosine-3'-phosphate
  modified_base 18: mod_base = OTHER; note = 2'-O-methyluridine-3'-phosphate
  modified_base 19: mod_base = OTHER; note = 2'-O-methylguanosine-3'-phosphate
  modified_base 20: mod_base = OTHER; note = 2'-O-methyluridine-3'-phosphate
  modified_base 21: mod_base = OTHER; note = 2'-O-methyladenosine
caggaagtatagaagaatgta

SEQ ID NO: 3492 - RNA, 21 nt, synthetic construct
  source 1..21: mol_type = other RNA
  modified_base 1: mod_base = OTHER; note = 2'-O-methyladenosine-3'-phosphate
  modified_base 2: mod_base = OTHER; note = 2'-O-methylguanosine-3'-phosphate
  modified_base 3: mod_base = OTHER; note = 2'-O-methylguanosine-3'-phosphate
  modified_base 4: mod_base = OTHER; note = 2'-O-methyladenosine-3'-phosphate
  modified_base 5: mod_base = OTHER; note = 2'-O-methyladenosine-3'-phosphate
  modified_base 6: mod_base = OTHER; note = 2'-O-methylguanosine-3'-phosphate
  modified_base 7: mod_base = OTHER; note = 2'-deoxy-2'-fluorouridine-3'-phosphate
  modified_base 8: mod_base = OTHER; note = 2'-O-methyladenosine-3'-phosphate
  modified_base 9: mod_base = OTHER; note = 2'-deoxy-2'-fluorouridine-3'-phosphate
  modified_base 10: mod_base = OTHER; note = 2'-deoxy-2'-fluoroadenosine-3'-phosphate
  modified_base 11: mod_base = OTHER; note = 2'-deoxy-2'-fluoroguanosine-3'-phosphate
  modified_base 12: mod_base = OTHER; note = 2'-O-methyladenosine-3'-phosphate
  modified_base 13: mod_base = OTHER; note = 2'-O-methyladenosine-3'-phosphate
  modified_base 14: mod_base = OTHER; note = 2'-O-methylguanosine-3'-phosphate
  modified_base 15: mod_base = OTHER; note = 2'-O-methyladenosine-3'-phosphate
  modified_base 16: mod_base = OTHER; note = 2'-O-methyladenosine-3'-phosphate
  modified_base 17: mod_base = OTHER; note = 2'-O-methyluridine-3'-phosphate
  modified_base 18: mod_base = OTHER; note = 2'-O-methylguanosine-3'-phosphate
  modified_base 19: mod_base = OTHER; note = 2'-O-methyluridine-3'-phosphate
  modified_base 20: mod_base = OTHER; note = 2'-O-methylguanosine-3'-phosphate
  modified_base 21: mod_base = OTHER; note = 2'-O-methyladenosine
aggaagtatagaagaatgtga

SEQ ID NO: 3493 - RNA, 21 nt, synthetic construct
  source 1..21: mol_type = other RNA
  modified_base 1: mod_base = OTHER; note = 2'-O-methylguanosine-3'-phosphate
  modified_base 2: mod_base = OTHER; note = 2'-O-methylguanosine-3'-phosphate
  modified_base 3: mod_base = OTHER; note = 2'-O-methyladenosine-3'-phosphate
  modified_base 4: mod_base = OTHER; note = 2'-O-methyladenosine-3'-phosphate
  modified_base 5: mod_base = OTHER; note = 2'-O-methylguanosine-3'-phosphate
  modified_base 6: mod_base = OTHER; note = 2'-O-methyluridine-3'-phosphate
  modified_base 7: mod_base = OTHER; note = 2'-deoxy-2'-fluoroadenosine-3'-phosphate
  modified_base 8: mod_base = OTHER; note = 2'-O-methyluridine-3'-phosphate
  modified_base 9: mod_base = OTHER; note = 2'-deoxy-2'-fluoroadenosine-3'-phosphate
  modified_base 10: mod_base = OTHER; note = 2'-deoxy-2'-fluoroguanosine-3'-phosphate
  modified_base 11: mod_base = OTHER; note = 2'-deoxy-2'-fluoroadenosine-3'-phosphate
  modified_base 12: mod_base = OTHER; note = 2'-O-methyladenosine-3'-phosphate
  modified_base 13: mod_base = OTHER; note = 2'-O-methylguanosine-3'-phosphate
  modified_base 14: mod_base = OTHER; note = 2'-O-methyladenosine-3'-phosphate
  modified_base 15: mod_base = OTHER; note = 2'-O-methyladenosine-3'-phosphate
  modified_base 16: mod_base = OTHER; note = 2'-O-methyluridine-3'-phosphate
  modified_base 17: mod_base = OTHER; note = 2'-O-methylguanosine-3'-phosphate
  modified_base 18: mod_base = OTHER; note = 2'-O-methyluridine-3'-phosphate
  modified_base 19: mod_base = OTHER; note = 2'-O-methylguanosine-3'-phosphate
  modified_base 20: mod_base = OTHER; note = 2'-O-methylcytidine-3'-phosphate
  modified_base 21: mod_base = OTHER; note = 2'-O-methyladenosine
ggaagtatagaagaatgtgca

SEQ ID NO: 3494 - RNA, 21 nt, synthetic construct
  source 1..21: mol_type = other RNA
  modified_base 1: mod_base = OTHER; note = 2'-O-methylguanosine-3'-phosphate
  modified_base 2: mod_base = OTHER; note = 2'-O-methyladenosine-3'-phosphate
  modified_base 3: mod_base = OTHER; note = 2'-O-methyladenosine-3'-phosphate
  modified_base 4: mod_base = OTHER; note = 2'-O-methylguanosine-3'-phosphate
  modified_base 5: mod_base = OTHER; note = 2'-O-methyluridine-3'-phosphate
  modified_base 6: mod_base = OTHER; note = 2'-O-methyladenosine-3'-phosphate
  modified_base 7: mod_base = OTHER; note = 2'-deoxy-2'-fluorouridine-3'-phosphate
  modified_base 8: mod_base = OTHER; note = 2'-O-methyladenosine-3'-phosphate
  modified_base 9: mod_base = OTHER; note = 2'-deoxy-2'-fluoroguanosine-3'-phosphate
  modified_base 10: mod_base = OTHER; note = 2'-deoxy-2'-fluoroadenosine-3'-phosphate
  modified_base 11: mod_base = OTHER; note = 2'-deoxy-2'-fluoroadenosine-3'-phosphate
  modified_base 12: mod_base = OTHER; note = 2'-O-methylguanosine-3'-phosphate
  modified_base 13: mod_base = OTHER; note = 2'-O-methyladenosine-3'-phosphate
  modified_base 14: mod_base = OTHER; note = 2'-O-methyladenosine-3'-phosphate
  modified_base 15: mod_base = OTHER; note = 2'-O-methyluridine-3'-phosphate
  modified_base 16: mod_base = OTHER; note = 2'-O-methylguanosine-3'-phosphate
  modified_base 17: mod_base = OTHER; note = 2'-O-methyluridine-3'-phosphate
  modified_base 18: mod_base = OTHER; note = 2'-O-methylguanosine-3'-phosphate
  modified_base 19: mod_base = OTHER; note = 2'-O-methylcytidine-3'-phosphate
  modified_base 20: mod_base = OTHER; note = 2'-O-methyladenosine-3'-phosphate
  modified_base 21: mod_base = OTHER; note = 2'-O-methyladenosine
gaagtatagaagaatgtgcaa

SEQ ID NO: 3495 - RNA, 21 nt, synthetic construct
  source 1..21: mol_type = other RNA
  modified_base 1: mod_base = OTHER; note = 2'-O-methyladenosine-3'-phosphate
  modified_base 2: mod_base = OTHER; note = 2'-O-methyladenosine-3'-phosphate
  modified_base 3: mod_base = OTHER; note = 2'-O-methylguanosine-3'-phosphate
  modified_base 4: mod_base = OTHER; note = 2'-O-methyluridine-3'-phosphate
  modified_base 5: mod_base = OTHER; note = 2'-O-methyladenosine-3'-phosphate
  modified_base 6: mod_base = OTHER; note = 2'-O-methyluridine-3'-phosphate
  modified_base 7: mod_base = OTHER; note = 2'-deoxy-2'-fluoroadenosine-3'-phosphate
  modified_base 8: mod_base = OTHER; note = 2'-O-methylguanosine-3'-phosphate
  modified_base 9: mod_base = OTHER; note = 2'-deoxy-2'-fluoroadenosine-3'-phosphate
  modified_base 10: mod_base = OTHER; note = 2'-deoxy-2'-fluoroadenosine-3'-phosphate
  modified_base 11: mod_base = OTHER; note = 2'-deoxy-2'-fluoroguanosine-3'-phosphate
  modified_base 12: mod_base = OTHER; note = 2'-O-methyladenosine-3'-phosphate
  modified_base 13: mod_base = OTHER; note = 2'-O-methyladenosine-3'-phosphate
  modified_base 14: mod_base = OTHER; note = 2'-O-methyluridine-3'-phosphate
  modified_base 15: mod_base = OTHER; note = 2'-O-methylguanosine-3'-phosphate
  modified_base 16: mod_base = OTHER; note = 2'-O-methyluridine-3'-phosphate
  modified_base 17: mod_base = OTHER; note = 2'-O-methylguanosine-3'-phosphate
  modified_base 18: mod_base = OTHER; note = 2'-O-methylcytidine-3'-phosphate
  modified_base 19: mod_base = OTHER; note = 2'-O-methyladenosine-3'-phosphate
  modified_base 20: mod_base = OTHER; note = 2'-O-methylguanosine-3'-phosphate
  modified_base 21: mod_base = OTHER; note = 2'-O-methyladenosine
aagtatagaagaatgtgcaga

SEQ ID NO: 3496 - RNA, 21 nt, synthetic construct
  source 1..21: mol_type = other RNA
  modified_base 1: mod_base = OTHER; note = 2'-O-methyladenosine-3'-phosphate
  modified_base 2: mod_base = OTHER; note = 2'-O-methylguanosine-3'-phosphate
  modified_base 3: mod_base = OTHER; note = 2'-O-methyluridine-3'-phosphate
  modified_base 4: mod_base = OTHER; note = 2'-O-methyladenosine-3'-phosphate
  modified_base 5: mod_base = OTHER; note = 2'-O-methyluridine-3'-phosphate
  modified_base 6: mod_base = OTHER; note = 2'-O-methyladenosine-3'-phosphate
  modified_base 7: mod_base = OTHER; note = 2'-deoxy-2'-fluoroguanosine-3'-phosphate
  modified_base 8: mod_base = OTHER; note = 2'-O-methyladenosine-3'-phosphate
  modified_base 9: mod_base = OTHER; note = 2'-deoxy-2'-fluoroadenosine-3'-phosphate
  modified_base 10: mod_base = OTHER; note = 2'-deoxy-2'-fluoroguanosine-3'-phosphate
  modified_base 11: mod_base = OTHER; note = 2'-deoxy-2'-fluoroadenosine-3'-phosphate
  modified_base 12: mod_base = OTHER; note = 2'-O-methyladenosine-3'-phosphate
  modified_base 13: mod_base = OTHER; note = 2'-O-methyluridine-3'-phosphate
  modified_base 14: mod_base = OTHER; note = 2'-O-methylguanosine-3'-phosphate
  modified_base 15: mod_base = OTHER; note = 2'-O-methyluridine-3'-phosphate
  modified_base 16: mod_base = OTHER; note = 2'-O-methylguanosine-3'-phosphate
  modified_base 17: mod_base = OTHER; note = 2'-O-methylcytidine-3'-phosphate
  modified_base 18: mod_base = OTHER; note = 2'-O-methyladenosine-3'-phosphate
  modified_base 19: mod_base = OTHER; note = 2'-O-methylguanosine-3'-phosphate
  modified_base 20: mod_base = OTHER; note = 2'-O-methylcytidine-3'-phosphate
  modified_base 21: mod_base = OTHER; note = 2'-O-methyladenosine
agtatagaagaatgtgcagca

SEQ ID NO: 3497 - RNA, 21 nt, synthetic construct
  source 1..21: mol_type = other RNA
  modified_base 1: mod_base = OTHER; note = 2'-O-methylguanosine-3'-phosphate
  modified_base 2: mod_base = OTHER; note = 2'-O-methyluridine-3'-phosphate
  modified_base 3: mod_base = OTHER; note = 2'-O-methyladenosine-3'-phosphate
  modified_base 4: mod_base = OTHER; note = 2'-O-methyluridine-3'-phosphate
  modified_base 5: mod_base = OTHER; note = 2'-O-methyladenosine-3'-phosphate
  modified_base 6: mod_base = OTHER; note = 2'-O-methylguanosine-3'-phosphate
  modified_base 7: mod_base = OTHER; note = 2'-deoxy-2'-fluoroadenosine-3'-phosphate
  modified_base 8: mod_base = OTHER; note = 2'-O-methyladenosine-3'-phosphate
  modified_base 9: mod_base = OTHER; note = 2'-deoxy-2'-fluoroguanosine-3'-phosphate
  modified_base 10: mod_base = OTHER; note = 2'-deoxy-2'-fluoroadenosine-3'-phosphate
  modified_base 11: mod_base = OTHER; note = 2'-deoxy-2'-fluoroadenosine-3'-phosphate
  modified_base 12: mod_base = OTHER; note = 2'-O-methyluridine-3'-phosphate
  modified_base 13: mod_base = OTHER; note = 2'-O-methylguanosine-3'-phosphate
  modified_base 14: mod_base = OTHER; note = 2'-O-methyluridine-3'-phosphate
  modified_base 15: mod_base = OTHER; note = 2'-O-methylguanosine-3'-phosphate
  modified_base 16: mod_base = OTHER; note = 2'-O-methylcytidine-3'-phosphate
  modified_base 17: mod_base = OTHER; note = 2'-O-methyladenosine-3'-phosphate
  modified_base 18: mod_base = OTHER; note = 2'-O-methylguanosine-3'-phosphate
  modified_base 19: mod_base = OTHER; note = 2'-O-methylcytidine-3'-phosphate
  modified_base 20: mod_base = OTHER; note = 2'-O-methyladenosine-3'-phosphate
  modified_base 21: mod_base = OTHER; note = 2'-O-methyladenosine
gtatagaagaatgtgcagcaa

SEQ ID NO: 3498 - RNA, 21 nt, synthetic construct
  source 1..21: mol_type = other RNA
  modified_base 1: mod_base = OTHER; note = 2'-O-methyluridine-3'-phosphate
  modified_base 2: mod_base = OTHER; note = 2'-O-methyladenosine-3'-phosphate
  modified_base 3: mod_base = OTHER; note = 2'-O-methyluridine-3'-phosphate
  modified_base 4: mod_base = OTHER; note = 2'-O-methyladenosine-3'-phosphate
  modified_base 5: mod_base = OTHER; note = 2'-O-methylguanosine-3'-phosphate
  modified_base 6: mod_base = OTHER; note = 2'-O-methyladenosine-3'-phosphate
  modified_base 7: mod_base = OTHER; note = 2'-deoxy-2'-fluoroadenosine-3'-phosphate
  modified_base 8: mod_base = OTHER; note = 2'-O-methylguanosine-3'-phosphate
  modified_base 9: mod_base = OTHER; note = 2'-deoxy-2'-fluoroadenosine-3'-phosphate
  modified_base 10: mod_base = OTHER; note = 2'-deoxy-2'-fluoroadenosine-3'-phosphate
  modified_base 11: mod_base = OTHER; note = 2'-deoxy-2'-fluorouridine-3'-phosphate
  modified_base 12: mod_base = OTHER; note = 2'-O-methylguanosine-3'-phosphate
  modified_base 13: mod_base = OTHER; note = 2'-O-methyluridine-3'-phosphate
  modified_base 14: mod_base = OTHER; note = 2'-O-methylguanosine-3'-phosphate
  modified_base 15: mod_base = OTHER; note = 2'-O-methylcytidine-3'-phosphate
  modified_base 16: mod_base = OTHER; note = 2'-O-methyladenosine-3'-phosphate
  modified_base 17: mod_base = OTHER; note = 2'-O-methylguanosine-3'-phosphate
  modified_base 18: mod_base = OTHER; note = 2'-O-methylcytidine-3'-phosphate
  modified_base 19: mod_base = OTHER; note = 2'-O-methyladenosine-3'-phosphate
  modified_base 20: mod_base = OTHER; note = 2'-O-methyladenosine-3'-phosphate
  modified_base 21: mod_base = OTHER; note = 2'-O-methyladenosine
tatagaagaatgtgcagcaaa

SEQ ID NO: 3499 - RNA, 21 nt, synthetic construct
  source 1..21: mol_type = other RNA
  modified_base 1: mod_base = OTHER; note = 2'-O-methyluridine-3'-phosphate
  modified_base 2: mod_base = OTHER; note = 2'-O-methylcytidine-3'-phosphate
  modified_base 3: mod_base = OTHER; note = 2'-O-methylcytidine-3'-phosphate
  modified_base 4: mod_base = OTHER; note = 2'-O-methyladenosine-3'-phosphate
  modified_base 5: mod_base = OTHER; note = 2'-O-methyladenosine-3'-phosphate
  modified_base 6: mod_base = OTHER; note = 2'-O-methyluridine-3'-phosphate
  modified_base 7: mod_base = OTHER; note = 2'-deoxy-2'-fluoroadenosine-3'-phosphate
  modified_base 8: mod_base = OTHER; note = 2'-O-methyluridine-3'-phosphate
  modified_base 9: mod_base = OTHER; note = 2'-deoxy-2'-fluorocytidine-3'-phosphate
  modified_base 10: mod_base = OTHER; note = 2'-deoxy-2'-fluoroadenosine-3'-phosphate
  modified_base 11: mod_base = OTHER; note = 2'-deoxy-2'-fluorocytidine-3'-phosphate
  modified_base 12: mod_base = OTHER; note = 2'-O-methyladenosine-3'-phosphate
  modified_base 13: mod_base = OTHER; note = 2'-O-methylguanosine-3'-phosphate
  modified_base 14: mod_base = OTHER; note = 2'-O-methyluridine-3'-phosphate
  modified_base 15: mod_base = OTHER; note = 2'-O-methyladenosine-3'-phosphate
  modified_base 16: mod_base = OTHER; note = 2'-O-methyladenosine-3'-phosphate
  modified_base 17: mod_base = OTHER; note = 2'-O-methyladenosine-3'-phosphate
  modified_base 18: mod_base = OTHER; note = 2'-O-methylguanosine-3'-phosphate
  modified_base 19: mod_base = OTHER; note = 2'-O-methyladenosine-3'-phosphate
  modified_base 20: mod_base = OTHER; note = 2'-O-methylguanosine-3'-phosphate
  modified_base 21: mod_base = OTHER; note = 2'-O-methyladenosine
tccaatatcacagtaaagaga

SEQ ID NO: 3500 - RNA, 21 nt, synthetic construct
  source 1..21: mol_type = other RNA
  modified_base 1: mod_base = OTHER; note = 2'-O-methylcytidine-3'-phosphate
  modified_base 2: mod_base = OTHER; note = 2'-O-methylcytidine-3'-phosphate
  modified_base 3: mod_base = OTHER; note = 2'-O-methyladenosine-3'-phosphate
  modified_base 4: mod_base = OTHER; note = 2'-O-methyladenosine-3'-phosphate
  modified_base 5: mod_base = OTHER; note = 2'-O-methyluridine-3'-phosphate
  modified_base 6: mod_base = OTHER; note = 2'-O-methyladenosine-3'-phosphate
  modified_base 7: mod_base = OTHER; note = 2'-deoxy-2'-fluorouridine-3'-phosphate
  modified_base 8: mod_base = OTHER; note = 2'-O-methylcytidine-3'-phosphate
  modified_base 9: mod_base = OTHER; note = 2'-deoxy-2'-fluoroadenosine-3'-phosphate
  modified_base 10: mod_base = OTHER; note = 2'-deoxy-2'-fluorocytidine-3'-phosphate
  modified_base 11: mod_base = OTHER; note = 2'-deoxy-2'-fluoroadenosine-3'-phosphate
  modified_base 12: mod_base = OTHER; note = 2'-O-methylguanosine-3'-phosphate
  modified_base 13: mod_base = OTHER; note = 2'-O-methyluridine-3'-phosphate
  modified_base 14: mod_base = OTHER; note = 2'-O-methyladenosine-3'-phosphate
  modified_base 15: mod_base = OTHER; note = 2'-O-methyladenosine-3'-phosphate
  modified_base 16: mod_base = OTHER; note = 2'-O-methyladenosine-3'-phosphate
  modified_base 17: mod_base = OTHER; note = 2'-O-methylguanosine-3'-phosphate
  modified_base 18: mod_base = OTHER; note = 2'-O-methyladenosine-3'-phosphate
  modified_base 19: mod_base = OTHER; note = 2'-O-methylguanosine-3'-phosphate
  modified_base 20: mod_base = OTHER; note = 2'-O-methylcytidine-3'-phosphate
  modified_base 21: mod_base = OTHER; note = 2'-O-methyladenosine
ccaatatcacagtaaagagca

SEQ ID NO: 3501 - RNA, 21 nt, synthetic construct
  source 1..21: mol_type = other RNA
  modified_base 1: mod_base = OTHER; note = 2'-O-methylcytidine-3'-phosphate
  modified_base 2: mod_base = OTHER; note = 2'-O-methyladenosine-3'-phosphate
  modified_base 3: mod_base = OTHER; note = 2'-O-methyladenosine-3'-phosphate
  modified_base 4: mod_base = OTHER; note = 2'-O-methyluridine-3'-phosphate
  modified_base 5: mod_base = OTHER; note = 2'-O-methyladenosine-3'-phosphate
  modified_base 6: mod_base = OTHER; note = 2'-O-methyluridine-3'-phosphate
  modified_base 7: mod_base = OTHER; note = 2'-deoxy-2'-fluorocytidine-3'-phosphate
  modified_base 8: mod_base = OTHER; note = 2'-O-methyladenosine-3'-phosphate
  modified_base 9: mod_base = OTHER; note = 2'-deoxy-2'-fluorocytidine-3'-phosphate
  modified_base 10: mod_base = OTHER; note = 2'-deoxy-2'-fluoroadenosine-3'-phosphate
  modified_base 11: mod_base = OTHER; note = 2'-deoxy-2'-fluoroguanosine-3'-phosphate
  modified_base 12: mod_base = OTHER; note = 2'-O-methyluridine-3'-phosphate
  modified_base 13: mod_base = OTHER; note = 2'-O-methyladenosine-3'-phosphate
  modified_base 14: mod_base = OTHER; note = 2'-O-methyladenosine-3'-phosphate
  modified_base 15: mod_base = OTHER; note = 2'-O-methyladenosine-3'-phosphate
  modified_base 16: mod_base = OTHER; note = 2'-O-methylguanosine-3'-phosphate
  modified_base 17: mod_base = OTHER; note = 2'-O-methyladenosine-3'-phosphate
  modified_base 18: mod_base = OTHER; note = 2'-O-methylguanosine-3'-phosphate
  modified_base 19: mod_base = OTHER; note = 2'-O-methylcytidine-3'-phosphate
  modified_base 20: mod_base = OTHER; note = 2'-O-methyladenosine-3'-phosphate
  modified_base 21: mod_base = OTHER; note = 2'-O-methyladenosine
caatatcacagtaaagagcaa

SEQ ID NO: 3502 - RNA, 21 nt, synthetic construct
  source 1..21: mol_type = other RNA
  modified_base 1: mod_base = OTHER; note = 2'-O-methyladenosine-3'-phosphate
  modified_base 2: mod_base = OTHER; note = 2'-O-methyladenosine-3'-phosphate
  modified_base 3: mod_base = OTHER; note = 2'-O-methyluridine-3'-phosphate
  modified_base 4: mod_base = OTHER; note = 2'-O-methyladenosine-3'-phosphate
  modified_base 5: mod_base = OTHER; note = 2'-O-methyluridine-3'-phosphate
  modified_base 6: mod_base = OTHER; note = 2'-O-methylcytidine-3'-phosphate
  modified_base 7: mod_base = OTHER; note = 2'-deoxy-2'-fluoroadenosine-3'-phosphate
  modified_base 8: mod_base = OTHER; note = 2'-O-methylcytidine-3'-phosphate
  modified_base 9: mod_base = OTHER; note = 2'-deoxy-2'-fluoroadenosine-3'-phosphate
  modified_base 10: mod_base = OTHER; note = 2'-deoxy-2'-fluoroguanosine-3'-phosphate
  modified_base 11: mod_base = OTHER; note = 2'-deoxy-2'-fluorouridine-3'-phosphate
  modified_base 12: mod_base = OTHER; note = 2'-O-methyladenosine-3'-phosphate
  modified_base 13: mod_base = OTHER; note = 2'-O-methyladenosine-3'-phosphate
  modified_base 14: mod_base = OTHER; note = 2'-O-methyladenosine-3'-phosphate
  modified_base 15: mod_base = OTHER; note = 2'-O-methylguanosine-3'-phosphate
  modified_base 16: mod_base = OTHER; note = 2'-O-methyladenosine-3'-phosphate
  modified_base 17: mod_base = OTHER; note = 2'-O-methylguanosine-3'-phosphate
  modified_base 18: mod_base = OTHER; note = 2'-O-methylcytidine-3'-phosphate
  modified_base 19: mod_base = OTHER; note = 2'-O-methyladenosine-3'-phosphate
  modified_base 20: mod_base = OTHER; note = 2'-O-methyladenosine-3'-phosphate
  modified_base 21: mod_base = OTHER; note = 2'-O-methyladenosine
aatatcacagtaaagagcaaa

SEQ ID NO: 3503 - RNA, 21 nt, synthetic construct
  source 1..21: mol_type = other RNA
  modified_base 1: mod_base = OTHER; note = 2'-O-methyladenosine-3'-phosphate
  modified_base 2: mod_base = OTHER; note = 2'-O-methyluridine-3'-phosphate
  modified_base 3: mod_base = OTHER; note = 2'-O-methyladenosine-3'-phosphate
  modified_base 4: mod_base = OTHER; note = 2'-O-methyluridine-3'-phosphate
  modified_base 5: mod_base = OTHER; note = 2'-O-methylcytidine-3'-phosphate
  modified_base 6: mod_base = OTHER; note = 2'-O-methyladenosine-3'-phosphate
  modified_base 7: mod_base = OTHER; note = 2'-deoxy-2'-fluorocytidine-3'-phosphate
  modified_base 8: mod_base = OTHER; note = 2'-O-methyladenosine-3'-phosphate
  modified_base 9: mod_base = OTHER; note = 2'-deoxy-2'-fluoroguanosine-3'-phosphate
  modified_base 10: mod_base = OTHER; note = 2'-deoxy-2'-fluorouridine-3'-phosphate
  modified_base 11: mod_base = OTHER; note = 2'-deoxy-2'-fluoroadenosine-3'-phosphate
  modified_base 12: mod_base = OTHER; note = 2'-O-methyladenosine-3'-phosphate
  modified_base 13: mod_base = OTHER; note = 2'-O-methyladenosine-3'-phosphate
  modified_base 14: mod_base = OTHER; note = 2'-O-methylguanosine-3'-phosphate
  modified_base 15: mod_base = OTHER; note = 2'-O-methyladenosine-3'-phosphate
  modified_base 16: mod_base = OTHER; note = 2'-O-methylguanosine-3'-phosphate
  modified_base 17: mod_base = OTHER; note = 2'-O-methylcytidine-3'-phosphate
  modified_base 18: mod_base = OTHER; note = 2'-O-methyladenosine-3'-phosphate
  modified_base 19: mod_base = OTHER; note = 2'-O-methyladenosine-3'-phosphate
  modified_base 20: mod_base = OTHER; note = 2'-O-methylcytidine-3'-phosphate
  modified_base 21: mod_base = OTHER; note = 2'-O-methyladenosine
atatcacagtaaagagcaaca

SEQ ID NO: 3504 - RNA, 21 nt, synthetic construct
  source 1..21: mol_type = other RNA
  modified_base 1: mod_base = OTHER; note = 2'-O-methyluridine-3'-phosphate
  modified_base 2: mod_base = OTHER; note = 2'-O-methyladenosine-3'-phosphate
  modified_base 3: mod_base = OTHER; note = 2'-O-methyluridine-3'-phosphate
  modified_base 4: mod_base = OTHER; note = 2'-O-methylcytidine-3'-phosphate
  modified_base 5: mod_base = OTHER; note = 2'-O-methyladenosine-3'-phosphate
  modified_base 6: mod_base = OTHER; note = 2'-O-methylcytidine-3'-phosphate
  modified_base 7: mod_base = OTHER; note = 2'-deoxy-2'-fluoroadenosine-3'-phosphate
  modified_base 8: mod_base = OTHER; note = 2'-O-methylguanosine-3'-phosphate
  modified_base 9: mod_base = OTHER; note = 2'-deoxy-2'-fluorouridine-3'-phosphate
  modified_base 10: mod_base = OTHER; note = 2'-deoxy-2'-fluoroadenosine-3'-phosphate
  modified_base 11: mod_base = OTHER; note = 2'-deoxy-2'-fluoroadenosine-3'-phosphate
  modified_base 12: mod_base = OTHER; note = 2'-O-methyladenosine-3'-phosphate
  modified_base 13: mod_base = OTHER; note = 2'-O-methylguanosine-3'-phosphate
  modified_base 14: mod_base = OTHER; note = 2'-O-methyladenosine-3'-phosphate
  modified_base 15: mod_base = OTHER; note = 2'-O-methylguanosine-3'-phosphate
  modified_base 16: mod_base = OTHER; note = 2'-O-methylcytidine-3'-phosphate
  modified_base 17: mod_base = OTHER; note = 2'-O-methyladenosine-3'-phosphate
  modified_base 18: mod_base = OTHER; note = 2'-O-methyladenosine-3'-phosphate
  modified_base 19: mod_base = OTHER; note = 2'-O-methylcytidine-3'-phosphate
  modified_base 20: mod_base = OTHER; note = 2'-O-methyladenosine-3'-phosphate
  modified_base 21: mod_base = OTHER; note = 2'-O-methyladenosine
tatcacagtaaagagcaacaa

SEQ ID NO: 3505 - RNA, 21 nt, synthetic construct
  source 1..21: mol_type = other RNA
  modified_base 1: mod_base = OTHER; note = 2'-O-methyladenosine-3'-phosphate
  modified_base 2: mod_base = OTHER; note = 2'-O-methyluridine-3'-phosphate
  modified_base 3: mod_base = OTHER; note = 2'-O-methylcytidine-3'-phosphate
  modified_base 4: mod_base = OTHER; note = 2'-O-methyladenosine-3'-phosphate
  modified_base 5: mod_base = OTHER; note = 2'-O-methylcytidine-3'-phosphate
  modified_base 6: mod_base = OTHER; note = 2'-O-methyladenosine-3'-phosphate
  modified_base 7: mod_base = OTHER; note = 2'-deoxy-2'-fluoroguanosine-3'-phosphate
  modified_base 8: mod_base = OTHER; note = 2'-O-methyluridine-3'-phosphate
  modified_base 9: mod_base = OTHER; note = 2'-deoxy-2'-fluoroadenosine-3'-phosphate
  modified_base 10: mod_base = OTHER; note = 2'-deoxy-2'-fluoroadenosine-3'-phosphate
  modified_base 11: mod_base = OTHER; note = 2'-deoxy-2'-fluoroadenosine-3'-phosphate
  modified_base 12: mod_base = OTHER; note = 2'-O-methylguanosine-3'-phosphate
  modified_base 13: mod_base = OTHER; note = 2'-O-methyladenosine-3'-phosphate
  modified_base 14: mod_base = OTHER; note = 2'-O-methylguanosine-3'-phosphate
  modified_base 15: mod_base = OTHER; note = 2'-O-methylcytidine-3'-phosphate
  modified_base 16: mod_base = OTHER; note = 2'-O-methyladenosine-3'-phosphate
  modified_base 17: mod_base = OTHER; note = 2'-O-methyladenosine-3'-phosphate
  modified_base 18: mod_base = OTHER; note = 2'-O-methylcytidine-3'-phosphate
  modified_base 19: mod_base = OTHER; note = 2'-O-methyladenosine-3'-phosphate
  modified_base 20: mod_base = OTHER; note = 2'-O-methyladenosine-3'-phosphate
  modified_base 21: mod_base = OTHER; note = 2'-O-methyladenosine
atcacagtaaagagcaacaaa

SEQ ID NO: 3506 - RNA, 21 nt, synthetic construct
  source 1..21: mol_type = other RNA
  modified_base 1: mod_base = OTHER; note = 2'-O-methyluridine-3'-phosphate
  modified_base 2: mod_base = OTHER; note = 2'-O-methylcytidine-3'-phosphate
  modified_base 3: mod_base = OTHER; note = 2'-O-methyladenosine-3'-phosphate
  modified_base 4: mod_base = OTHER; note = 2'-O-methylcytidine-3'-phosphate
  modified_base 5: mod_base = OTHER; note = 2'-O-methyladenosine-3'-phosphate
  modified_base 6: mod_base = OTHER; note = 2'-O-methylguanosine-3'-phosphate
  modified_base 7: mod_base = OTHER; note = 2'-deoxy-2'-fluorouridine-3'-phosphate
  modified_base 8: mod_base = OTHER; note = 2'-O-methyladenosine-3'-phosphate
  modified_base 9: mod_base = OTHER; note = 2'-deoxy-2'-fluoroadenosine-3'-phosphate
  modified_base 10: mod_base = OTHER; note = 2'-deoxy-2'-fluoroadenosine-3'-phosphate
  modified_base 11: mod_base = OTHER; note = 2'-deoxy-2'-fluoroguanosine-3'-phosphate
  modified_base 12: mod_base = OTHER; note = 2'-O-methyladenosine-3'-phosphate
  modified_base 13: mod_base = OTHER; note = 2'-O-methylguanosine-3'-phosphate
  modified_base 14: mod_base = OTHER; note = 2'-O-methylcytidine-3'-phosphate
  modified_base 15: mod_base = OTHER; note = 2'-O-methyladenosine-3'-phosphate
  modified_base 16: mod_base = OTHER; note = 2'-O-methyladenosine-3'-phosphate
  modified_base 17: mod_base = OTHER; note = 2'-O-methylcytidine-3'-phosphate
  modified_base 18: mod_base = OTHER; note = 2'-O-methyladenosine-3'-phosphate
  modified_base 19: mod_base = OTHER; note = 2'-O-methyladenosine-3'-phosphate
  modified_base 20: mod_base = OTHER; note = 2'-O-methyluridine-3'-phosphate
  modified_base 21: mod_base = OTHER; note = 2'-O-methyladenosine
tcacagtaaagagcaacaata

SEQ ID NO: 3507 - RNA, 21 nt, synthetic construct
  source 1..21: mol_type = other RNA
  modified_base 1: mod_base = OTHER; note = 2'-O-methylcytidine-3'-phosphate
  modified_base 2: mod_base = OTHER; note = 2'-O-methyladenosine-3'-phosphate
  modified_base 3: mod_base = OTHER; note = 2'-O-methylcytidine-3'-phosphate
  modified_base 4: mod_base = OTHER; note = 2'-O-methyladenosine-3'-phosphate
  modified_base 5: mod_base = OTHER; note = 2'-O-methylguanosine-3'-phosphate
  modified_base 6: mod_base = OTHER; note = 2'-O-methyluridine-3'-phosphate
  modified_base 7: mod_base = OTHER; note = 2'-deoxy-2'-fluoroadenosine-3'-phosphate
  modified_base 8: mod_base = OTHER; note = 2'-O-methyladenosine-3'-phosphate
  modified_base 9: mod_base = OTHER; note = 2'-deoxy-2'-fluoroadenosine-3'-phosphate
  modified_base 10: mod_base = OTHER; note = 2'-deoxy-2'-fluoroguanosine-3'-phosphate
  modified_base 11: mod_base = OTHER; note = 2'-deoxy-2'-fluoroadenosine-3'-phosphate
  modified_base 12: mod_base = OTHER; note = 2'-O-methylguanosine-3'-phosphate
  modified_base 13: mod_base = OTHER; note = 2'-O-methylcytidine-3'-phosphate
  modified_base 14: mod_base = OTHER; note = 2'-O-methyladenosine-3'-phosphate
  modified_base 15: mod_base = OTHER; note = 2'-O-methyladenosine-3'-phosphate
  modified_base 16: mod_base = OTHER; note = 2'-O-methylcytidine-3'-phosphate
  modified_base 17: mod_base = OTHER; note = 2'-O-methyladenosine-3'-phosphate
  modified_base 18: mod_base = OTHER; note = 2'-O-methyladenosine-3'-phosphate
  modified_base 19: mod_base = OTHER; note = 2'-O-methyluridine-3'-phosphate
  modified_base 20: mod_base = OTHER; note = 2'-O-methylguanosine-3'-phosphate
  modified_base 21: mod_base = OTHER; note = 2'-O-methyladenosine
cacagtaaagagcaacaatga

SEQ ID NO: 3508 - RNA, 21 nt, synthetic construct
  source 1..21: mol_type = other RNA
  modified_base 1: mod_base = OTHER; note = 2'-O-methyladenosine-3'-phosphate
  modified_base 2: mod_base = OTHER; note = 2'-O-methylcytidine-3'-phosphate
  modified_base 3: mod_base = OTHER; note = 2'-O-methyladenosine-3'-phosphate
  modified_base 4: mod_base = OTHER; note = 2'-O-methylguanosine-3'-phosphate
  modified_base 5: mod_base = OTHER; note = 2'-O-methyluridine-3'-phosphate
  modified_base 6: mod_base = OTHER; note = 2'-O-methyladenosine-3'-phosphate
  modified_base 7: mod_base = OTHER; note = 2'-deoxy-2'-fluoroadenosine-3'-phosphate
  modified_base 8: mod_base = OTHER; note = 2'-O-methyladenosine-3'-phosphate
  modified_base 9: mod_base = OTHER; note = 2'-deoxy-2'-fluoroguanosine-3'-phosphate
  modified_base 10: mod_base = OTHER; note = 2'-deoxy-2'-fluoroadenosine-3'-phosphate
  modified_base 11: mod_base = OTHER; note = 2'-deoxy-2'-fluoroguanosine-3'-phosphate
  modified_base 12: mod_base = OTHER; note = 2'-O-methylcytidine-3'-phosphate
  modified_base 13: mod_base = OTHER; note = 2'-O-methyladenosine-3'-phosphate
  modified_base 14: mod_base = OTHER; note = 2'-O-methyladenosine-3'-phosphate
  modified_base 15: mod_base = OTHER; note = 2'-O-methylcytidine-3'-phosphate
  modified_base 16: mod_base = OTHER; note = 2'-O-methyladenosine-3'-phosphate
  modified_base 17: mod_base = OTHER; note = 2'-O-methyladenosine-3'-phosphate
  modified_base 18: mod_base = OTHER; note = 2'-O-methyluridine-3'-phosphate
  modified_base 19: mod_base = OTHER; note = 2'-O-methylguanosine-3'-phosphate
  modified_base 20: mod_base = OTHER; note = 2'-O-methyluridine-3'-phosphate
  modified_base 21: mod_base = OTHER; note = 2'-O-methyladenosine
acagtaaagagcaacaatgta

SEQ ID NO: 3509 - RNA, 21 nt, synthetic construct
  source 1..21: mol_type = other RNA
  modified_base 1: mod_base = OTHER; note = 2'-O-methylcytidine-3'-phosphate
  modified_base 2: mod_base = OTHER; note = 2'-O-methyladenosine-3'-phosphate
  modified_base 3: mod_base = OTHER; note = 2'-O-methylguanosine-3'-phosphate
  modified_base 4: mod_base = OTHER; note = 2'-O-methyluridine-3'-phosphate
  modified_base 5: mod_base = OTHER; note = 2'-O-methyladenosine-3'-phosphate
  modified_base 6: mod_base = OTHER; note = 2'-O-methyladenosine-3'-phosphate
  modified_base 7: mod_base = OTHER; note = 2'-deoxy-2'-fluoroadenosine-3'-phosphate
  modified_base 8: mod_base = OTHER; note = 2'-O-methylguanosine-3'-phosphate
  modified_base 9: mod_base = OTHER; note = 2'-deoxy-2'-fluoroadenosine-3'-phosphate
  modified_base 10: mod_base = OTHER; note = 2'-deoxy-2'-fluoroguanosine-3'-phosphate
  modified_base 11: mod_base = OTHER; note = 2'-deoxy-2'-fluorocytidine-3'-phosphate
  modified_base 12: mod_base = OTHER; note = 2'-O-methyladenosine-3'-phosphate
  modified_base 13: mod_base = OTHER; note = 2'-O-methyladenosine-3'-phosphate
  modified_base 14: mod_base = OTHER; note = 2'-O-methylcytidine-3'-phosphate
  modified_base 15: mod_base = OTHER; note = 2'-O-methyladenosine-3'-phosphate
  modified_base 16: mod_base = OTHER; note = 2'-O-methyladenosine-3'-phosphate
  modified_base 17: mod_base = OTHER; note = 2'-O-methyluridine-3'-phosphate
  modified_base 18: mod_base = OTHER; note = 2'-O-methylguanosine-3'-phosphate
  modified_base 19: mod_base = OTHER; note = 2'-O-methyluridine-3'-phosphate
  modified_base 20: mod_base = OTHER; note = 2'-O-methylguanosine-3'-phosphate
  modified_base 21: mod_base = OTHER; note = 2'-O-methyladenosine
cagtaaagagcaacaatgtga

SEQ ID NO: 3510 - RNA, 21 nt, synthetic construct
  source 1..21: mol_type = other RNA
  modified_base 1: mod_base = OTHER; note = 2'-O-methyladenosine-3'-phosphate
  modified_base 2: mod_base = OTHER; note = 2'-O-methylguanosine-3'-phosphate
  modified_base 3: mod_base = OTHER; note = 2'-O-methyluridine-3'-phosphate
  modified_base 4: mod_base = OTHER; note = 2'-O-methyladenosine-3'-phosphate
  modified_base 5: mod_base = OTHER; note = 2'-O-methyladenosine-3'-phosphate
  modified_base 6: mod_base = OTHER; note = 2'-O-methyladenosine-3'-phosphate
  modified_base 7: mod_base = OTHER; note = 2'-deoxy-2'-fluoroguanosine-3'-phosphate
  modified_base 8: mod_base = OTHER; note = 2'-O-methyladenosine-3'-phosphate
  modified_base 9: mod_base = OTHER; note = 2'-deoxy-2'-fluoroguanosine-3'-phosphate
  modified_base 10: mod_base = OTHER; note = 2'-deoxy-2'-fluorocytidine-3'-phosphate
  modified_base 11: mod_base = OTHER; note = 2'-deoxy-2'-fluoroadenosine-3'-phosphate
  modified_base 12: mod_base = OTHER; note = 2'-O-methyladenosine-3'-phosphate
  modified_base 13: mod_base = OTHER; note = 2'-O-methylcytidine-3'-phosphate
  modified_base 14: mod_base = OTHER; note = 2'-O-methyladenosine-3'-phosphate
  modified_base 15: mod_base = OTHER; note = 2'-O-methyladenosine-3'-phosphate
  modified_base 16: mod_base = OTHER; note = 2'-O-methyluridine-3'-phosphate
  modified_base 17: mod_base = OTHER; note = 2'-O-methylguanosine-3'-phosphate
  modified_base 18: mod_base = OTHER; note = 2'-O-methyluridine-3'-phosphate
  modified_base 19: mod_base = OTHER; note = 2'-O-methylguanosine-3'-phosphate
  modified_base 20: mod_base = OTHER; note = 2'-O-methyluridine-3'-phosphate
  modified_base 21: mod_base = OTHER; note = 2'-O-methyladenosine
agtaaagagcaacaatgtgta

SEQ ID NO: 3511 - RNA, 21 nt, synthetic construct
  source 1..21: mol_type = other RNA
  modified_base 1: mod_base = OTHER; note = 2'-O-methylguanosine-3'-phosphate
  modified_base 2: mod_base = OTHER; note = 2'-O-methylguanosine-3'-phosphate
  modified_base 3: mod_base = OTHER; note = 2'-O-methyladenosine-3'-phosphate
  modified_base 4: mod_base = OTHER; note = 2'-O-methyluridine-3'-phosphate
  modified_base 5: mod_base = OTHER; note = 2'-O-methylguanosine-3'-phosphate
  modified_base 6: mod_base = OTHER; note = 2'-O-methyladenosine-3'-phosphate
  modified_base 7: mod_base = OTHER; note = 2'-deoxy-2'-fluoroguanosine-3'-phosphate
  modified_base 8: mod_base = OTHER; note = 2'-O-methyladenosine-3'-phosphate
  modified_base 9: mod_base = OTHER; note = 2'-deoxy-2'-fluoroguanosine-3'-phosphate
  modified_base 10: mod_base = OTHER; note = 2'-deoxy-2'-fluoroadenosine-3'-phosphate
  modified_base 11: mod_base = OTHER; note = 2'-deoxy-2'-fluorouridine-3'-phosphate
  modified_base 12: mod_base = OTHER; note = 2'-O-methylguanosine-3'-phosphate
  modified_base 13: mod_base = OTHER; note = 2'-O-methyluridine-3'-phosphate
  modified_base 14: mod_base = OTHER; note = 2'-O-methyladenosine-3'-phosphate
  modified_base 15: mod_base = OTHER; note = 2'-O-methylguanosine-3'-phosphate
  modified_base 16: mod_base = OTHER; note = 2'-O-methyluridine-3'-phosphate
  modified_base 17: mod_base = OTHER; note = 2'-O-methyluridine-3'-phosphate
  modified_base 18: mod_base = OTHER; note = 2'-O-methyluridine-3'-phosphate
  modified_base 19: mod_base = OTHER; note = 2'-O-methyluridine-3'-phosphate
  modified_base 20: mod_base = OTHER; note = 2'-O-methyladenosine-3'-phosphate
  modified_base 21: mod_base = OTHER; note = 2'-O-methyladenosine
ggatgagagatgtagttttaa

SEQ ID NO: 3512 - RNA, 21 nt, synthetic construct
  source 1..21: mol_type = other RNA
  modified_base 1: mod_base = OTHER; note = 2'-O-methylguanosine-3'-phosphate
  modified_base 2: mod_base = OTHER; note = 2'-O-methyladenosine-3'-phosphate
  modified_base 3: mod_base = OTHER; note = 2'-O-methyluridine-3'-phosphate
  modified_base 4: mod_base = OTHER; note = 2'-O-methylguanosine-3'-phosphate
  modified_base 5: mod_base = OTHER; note = 2'-O-methyladenosine-3'-phosphate
  modified_base 6: mod_base = OTHER; note = 2'-O-methylguanosine-3'-phosphate
  modified_base 7: mod_base = OTHER; note = 2'-deoxy-2'-fluoroadenosine-3'-phosphate
  modified_base 8: mod_base = OTHER; note = 2'-O-methylguanosine-3'-phosphate
  modified_base 9: mod_base = OTHER; note = 2'-deoxy-2'-fluoroadenosine-3'-phosphate
  modified_base 10: mod_base = OTHER; note = 2'-deoxy-2'-fluorouridine-3'-phosphate
  modified_base 11: mod_base = OTHER; note = 2'-deoxy-2'-fluoroguanosine-3'-phosphate
  modified_base 12: mod_base = OTHER; note = 2'-O-methyluridine-3'-phosphate
  modified_base 13: mod_base = OTHER; note = 2'-O-methyladenosine-3'-phosphate
  modified_base 14: mod_base = OTHER; note = 2'-O-methylguanosine-3'-phosphate
  modified_base 15: mod_base = OTHER; note = 2'-O-methyluridine-3'-phosphate
  modified_base 16: mod_base = OTHER; note = 2'-O-methyluridine-3'-phosphate
  modified_base 17: mod_base = OTHER; note = 2'-O-methyluridine-3'-phosphate
  modified_base 18: mod_base = OTHER; note = 2'-O-methyluridine-3'-phosphate
  modified_base 19: mod_base = OTHER; note = 2'-O-methyladenosine-3'-phosphate
  modified_base 20: mod_base = OTHER; note = 2'-O-methyluridine-3'-phosphate
  modified_base 21: mod_base = OTHER; note = 2'-O-methyladenosine
gatgagagatgtagttttata

SEQ ID NO: 3513 - RNA, 21 nt, synthetic construct
  source 1..21: mol_type = other RNA
  modified_base 1: mod_base = OTHER; note = 2'-O-methyladenosine-3'-phosphate
  modified_base 2: mod_base = OTHER; note = 2'-O-methyluridine-3'-phosphate
  modified_base 3: mod_base = OTHER; note = 2'-O-methylguanosine-3'-phosphate
  modified_base 4: mod_base = OTHER; note = 2'-O-methyladenosine-3'-phosphate
  modified_base 5: mod_base = OTHER; note = 2'-O-methylguanosine-3'-phosphate
  modified_base 6: mod_base = OTHER; note = 2'-O-methyladenosine-3'-phosphate
  modified_base 7: mod_base = OTHER; note = 2'-deoxy-2'-fluoroguanosine-3'-phosphate
  modified_base 8: mod_base = OTHER; note = 2'-O-methyladenosine-3'-phosphate
  modified_base 9: mod_base = OTHER; note = 2'-deoxy-2'-fluorouridine-3'-phosphate
  modified_base 10: mod_base = OTHER; note = 2'-deoxy-2'-fluoroguanosine-3'-phosphate
  modified_base 11: mod_base = OTHER; note = 2'-deoxy-2'-fluorouridine-3'-phosphate
  modified_base 12: mod_base = OTHER; note = 2'-O-methyladenosine-3'-phosphate
  modified_base 13: mod_base = OTHER; note = 2'-O-methylguanosine-3'-phosphate
  modified_base 14: mod_base = OTHER; note = 2'-O-methyluridine-3'-phosphate
  modified_base 15: mod_base = OTHER; note = 2'-O-methyluridine-3'-phosphate
  modified_base 16: mod_base = OTHER; note = 2'-O-methyluridine-3'-phosphate
  modified_base 17: mod_base = OTHER; note = 2'-O-methyluridine-3'-phosphate
  modified_base 18: mod_base = OTHER; note = 2'-O-methyladenosine-3'-phosphate
  modified_base 19: mod_base = OTHER; note = 2'-O-methyluridine-3'-phosphate
  modified_base 20: mod_base = OTHER; note = 2'-O-methyluridine-3'-phosphate
  modified_base 21: mod_base = OTHER; note = 2'-O-methyladenosine
atgagagatgtagttttatta

SEQ ID NO: 3514 - RNA, 21 nt, synthetic construct
  source 1..21: mol_type = other RNA
  modified_base 1: mod_base = OTHER; note = 2'-O-methyluridine-3'-phosphate
  modified_base 2: mod_base = OTHER; note = 2'-O-methylguanosine-3'-phosphate
  modified_base 3: mod_base = OTHER; note = 2'-O-methyladenosine-3'-phosphate
  modified_base 4: mod_base = OTHER; note = 2'-O-methylguanosine-3'-phosphate
  modified_base 5: mod_base = OTHER; note = 2'-O-methyladenosine-3'-phosphate
  modified_base 6: mod_base = OTHER; note = 2'-O-methylguanosine-3'-phosphate
  modified_base 7: mod_base = OTHER; note = 2'-deoxy-2'-fluoroadenosine-3'-phosphate
  modified_base 8: mod_base = OTHER; note = 2'-O-methyluridine-3'-phosphate
  modified_base 9: mod_base = OTHER; note = 2'-deoxy-2'-fluoroguanosine-3'-phosphate
  modified_base 10: mod_base = OTHER; note = 2'-deoxy-2'-fluorouridine-3'-phosphate
  modified_base 11: mod_base = OTHER; note = 2'-deoxy-2'-fluoroadenosine-3'-phosphate
  modified_base 12: mod_base = OTHER; note = 2'-O-methylguanosine-3'-phosphate
  modified_base 13: mod_base = OTHER; note = 2'-O-methyluridine-3'-phosphate
  modified_base 14: mod_base = OTHER; note = 2'-O-methyluridine-3'-phosphate
  modified_base 15: mod_base = OTHER; note = 2'-O-methyluridine-3'-phosphate
  modified_base 16: mod_base = OTHER; note = 2'-O-methyluridine-3'-phosphate
  modified_base 17: mod_base = OTHER; note = 2'-O-methyladenosine-3'-phosphate
  modified_base 18: mod_base = OTHER; note = 2'-O-methyluridine-3'-phosphate
  modified_base 19: mod_base = OTHER; note = 2'-O-methyluridine-3'-phosphate
  modified_base 20: mod_base = OTHER; note = 2'-O-methyluridine-3'-phosphate
  modified_base 21: mod_base = OTHER; note = 2'-O-methyladenosine
tgagagatgtagttttattta

SEQ ID NO: 3515 - RNA, 21 nt, synthetic construct
  source 1..21: mol_type = other RNA
  modified_base 1: mod_base = OTHER; note = 2'-O-methylguanosine-3'-phosphate
  modified_base 2: mod_base = OTHER; note = 2'-O-methyladenosine-3'-phosphate
  modified_base 3: mod_base = OTHER; note = 2'-O-methylguanosine-3'-phosphate
  modified_base 4: mod_base = OTHER; note = 2'-O-methyladenosine-3'-phosphate
  modified_base 5: mod_base = OTHER; note = 2'-O-methylguanosine-3'-phosphate
  modified_base 6: mod_base = OTHER; note = 2'-O-methyladenosine-3'-phosphate
  modified_base 7: mod_base = OTHER; note = 2'-deoxy-2'-fluorouridine-3'-phosphate
  modified_base 8: mod_base = OTHER; note = 2'-O-methylguanosine-3'-phosphate
  modified_base 9: mod_base = OTHER; note = 2'-deoxy-2'-fluorouridine-3'-phosphate
  modified_base 10: mod_base = OTHER; note = 2'-deoxy-2'-fluoroadenosine-3'-phosphate
  modified_base 11: mod_base = OTHER; note = 2'-deoxy-2'-fluoroguanosine-3'-phosphate
  modified_base 12: mod_base = OTHER; note = 2'-O-methyluridine-3'-phosphate
  modified_base 13: mod_base = OTHER; note = 2'-O-methyluridine-3'-phosphate
  modified_base 14: mod_base = OTHER; note = 2'-O-methyluridine-3'-phosphate
  modified_base 15: mod_base = OTHER; note = 2'-O-methyluridine-3'-phosphate
  modified_base 16: mod_base = OTHER; note = 2'-O-methyladenosine-3'-phosphate
  modified_base 17: mod_base = OTHER; note = 2'-O-methyluridine-3'-phosphate
  modified_base 18: mod_base = OTHER; note = 2'-O-methyluridine-3'-phosphate
  modified_base 19: mod_base = OTHER; note = 2'-O-methyluridine-3'-phosphate
  modified_base 20: mod_base = OTHER; note = 2'-O-methylguanosine-3'-phosphate
  modified_base 21: mod_base = OTHER; note = 2'-O-methyladenosine
gagagatgtagttttatttga

SEQ ID NO: 3516 - RNA, 21 nt, synthetic construct
  source 1..21: mol_type = other RNA
  modified_base 1: mod_base = OTHER; note = 2'-O-methyladenosine-3'-phosphate
  modified_base 2: mod_base = OTHER; note = 2'-O-methylguanosine-3'-phosphate
  modified_base 3: mod_base = OTHER; note = 2'-O-methyladenosine-3'-phosphate
  modified_base 4: mod_base = OTHER; note = 2'-O-methylguanosine-3'-phosphate
  modified_base 5: mod_base = OTHER; note = 2'-O-methyladenosine-3'-phosphate
  modified_base 6: mod_base = OTHER; note = 2'-O-methyluridine-3'-phosphate
  modified_base 7: mod_base = OTHER; note = 2'-deoxy-2'-fluoroguanosine-3'-phosphate
  modified_base 8: mod_base = OTHER; note = 2'-O-methyluridine-3'-phosphate
  modified_base 9: mod_base = OTHER; note = 2'-deoxy-2'-fluoroadenosine-3'-phosphate
  modified_base 10: mod_base = OTHER; note = 2'-deoxy-2'-fluoroguanosine-3'-phosphate
  modified_base 11: mod_base = OTHER; note = 2'-deoxy-2'-fluorouridine-3'-phosphate
  modified_base 12: mod_base = OTHER; note = 2'-O-methyluridine-3'-phosphate
  modified_base 13: mod_base = OTHER; note = 2'-O-methyluridine-3'-phosphate
  modified_base 14: mod_base = OTHER; note = 2'-O-methyluridine-3'-phosphate
  modified_base 15: mod_base = OTHER; note = 2'-O-methyladenosine-3'-phosphate
  modified_base 16: mod_base = OTHER; note = 2'-O-methyluridine-3'-phosphate
  modified_base 17: mod_base = OTHER; note = 2'-O-methyluridine-3'-phosphate
  modified_base 18: mod_base = OTHER; note = 2'-O-methyluridine-3'-phosphate
  modified_base 19: mod_base = OTHER; note = 2'-O-methylguanosine-3'-phosphate
  modified_base 20: mod_base = OTHER; note = 2'-O-methyladenosine-3'-phosphate
  modified_base 21: mod_base = OTHER; note = 2'-O-methyladenosine
agagatgtagttttatttgaa

SEQ ID NO: 3517 - RNA, 21 nt, synthetic construct
  source 1..21: mol_type = other RNA
  modified_base 1: mod_base = OTHER; note = 2'-O-methylguanosine-3'-phosphate
  modified_base 2: mod_base = OTHER; note = 2'-O-methyladenosine-3'-phosphate
  modified_base 3: mod_base = OTHER; note = 2'-O-methylguanosine-3'-phosphate
  modified_base 4: mod_base = OTHER; note = 2'-O-methyladenosine-3'-phosphate
  modified_base 5: mod_base = OTHER; note = 2'-O-methyluridine-3'-phosphate
  modified_base 6: mod_base = OTHER; note = 2'-O-methylguanosine-3'-phosphate
  modified_base 7: mod_base = OTHER; note = 2'-deoxy-2'-fluorouridine-3'-phosphate
  modified_base 8: mod_base = OTHER; note = 2'-O-methyladenosine-3'-phosphate
  modified_base 9: mod_base = OTHER; note = 2'-deoxy-2'-fluoroguanosine-3'-phosphate
  modified_base 10: mod_base = OTHER; note = 2'-deoxy-2'-fluorouridine-3'-phosphate
  modified_base 11: mod_base = OTHER; note = 2'-deoxy-2'-fluorouridine-3'-phosphate
  modified_base 12: mod_base = OTHER; note = 2'-O-methyluridine-3'-phosphate
  modified_base 13: mod_base = OTHER; note = 2'-O-methyluridine-3'-phosphate
  modified_base 14: mod_base = OTHER; note = 2'-O-methyladenosine-3'-phosphate
  modified_base 15: mod_base = OTHER; note = 2'-O-methyluridine-3'-phosphate
  modified_base 16: mod_base = OTHER; note = 2'-O-methyluridine-3'-phosphate
  modified_base 17: mod_base = OTHER; note = 2'-O-methyluridine-3'-phosphate
  modified_base 18: mod_base = OTHER; note = 2'-O-methylguanosine-3'-phosphate
  modified_base 19: mod_base = OTHER; note = 2'-O-methyladenosine-3'-phosphate
  modified_base 20: mod_base = OTHER; note = 2'-O-methyladenosine-3'-phosphate
  modified_base 21: mod_base = OTHER; note = 2'-O-methyladenosine
gagatgtagttttatttgaaa

SEQ ID NO: 3518 - RNA, 21 nt, synthetic construct
  source 1..21: mol_type = other RNA
  modified_base 1: mod_base = OTHER; note = 2'-O-methyladenosine-3'-phosphate
  modified_base 2: mod_base = OTHER; note = 2'-O-methylguanosine-3'-phosphate
  modified_base 3: mod_base = OTHER; note = 2'-O-methyladenosine-3'-phosphate
  modified_base 4: mod_base = OTHER; note = 2'-O-methyluridine-3'-phosphate
  modified_base 5: mod_base = OTHER; note = 2'-O-methylguanosine-3'-phosphate
  modified_base 6: mod_base = OTHER; note = 2'-O-methyluridine-3'-phosphate
  modified_base 7: mod_base = OTHER; note = 2'-deoxy-2'-fluoroadenosine-3'-phosphate
  modified_base 8: mod_base = OTHER; note = 2'-O-methylguanosine-3'-phosphate
  modified_base 9: mod_base = OTHER; note = 2'-deoxy-2'-fluorouridine-3'-phosphate
  modified_base 10: mod_base = OTHER; note = 2'-deoxy-2'-fluorouridine-3'-phosphate
  modified_base 11: mod_base = OTHER; note = 2'-deoxy-2'-fluorouridine-3'-phosphate
  modified_base 12: mod_base = OTHER; note = 2'-O-methyluridine-3'-phosphate
  modified_base 13: mod_base = OTHER; note = 2'-O-methyladenosine-3'-phosphate
  modified_base 14: mod_base = OTHER; note = 2'-O-methyluridine-3'-phosphate
  modified_base 15: mod_base = OTHER; note = 2'-O-methyluridine-3'-phosphate
  modified_base 16: mod_base = OTHER; note = 2'-O-methyluridine-3'-phosphate
  modified_base 17: mod_base = OTHER; note = 2'-O-methylguanosine-3'-phosphate
  modified_base 18: mod_base = OTHER; note = 2'-O-methyladenosine-3'-phosphate
  modified_base 19: mod_base = OTHER; note = 2'-O-methyladenosine-3'-phosphate
  modified_base 20: mod_base = OTHER; note = 2'-O-methyladenosine-3'-phosphate
  modified_base 21: mod_base = OTHER; note = 2'-O-methyladenosine
agatgtagttttatttgaaaa

SEQ ID NO: 3519 - RNA, 21 nt, synthetic construct
  source 1..21: mol_type = other RNA
  modified_base 1: mod_base = OTHER; note = 2'-O-methylguanosine-3'-phosphate
  modified_base 2: mod_base = OTHER; note = 2'-O-methyladenosine-3'-phosphate
  modified_base 3: mod_base = OTHER; note = 2'-O-methyluridine-3'-phosphate
  modified_base 4: mod_base = OTHER; note = 2'-O-methylguanosine-3'-phosphate
  modified_base 5: mod_base = OTHER; note = 2'-O-methyluridine-3'-phosphate
  modified_base 6: mod_base = OTHER; note = 2'-O-methyladenosine-3'-phosphate
  modified_base 7: mod_base = OTHER; note = 2'-deoxy-2'-fluoroguanosine-3'-phosphate
  modified_base 8: mod_base = OTHER; note = 2'-O-methyluridine-3'-phosphate
  modified_base 9: mod_base = OTHER; note = 2'-deoxy-2'-fluorouridine-3'-phosphate
  modified_base 10: mod_base = OTHER; note = 2'-deoxy-2'-fluorouridine-3'-phosphate
  modified_base 11: mod_base = OTHER; note = 2'-deoxy-2'-fluorouridine-3'-phosphate
  modified_base 12: mod_base = OTHER; note = 2'-O-methyladenosine-3'-phosphate
  modified_base 13: mod_base = OTHER; note = 2'-O-methyluridine-3'-phosphate
  modified_base 14: mod_base = OTHER; note = 2'-O-methyluridine-3'-phosphate
  modified_base 15: mod_base = OTHER; note = 2'-O-methyluridine-3'-phosphate
  modified_base 16: mod_base = OTHER; note = 2'-O-methylguanosine-3'-phosphate
  modified_base 17: mod_base = OTHER; note = 2'-O-methyladenosine-3'-phosphate
  modified_base 18: mod_base = OTHER; note = 2'-O-methyladenosine-3'-phosphate
  modified_base 19: mod_base = OTHER; note = 2'-O-methyladenosine-3'-phosphate
  modified_base 20: mod_base = OTHER; note = 2'-O-methyladenosine-3'-phosphate
  modified_base 21: mod_base = OTHER; note = 2'-O-methyladenosine
gatgtagttttatttgaaaaa

SEQ ID NO: 3520 - RNA, 21 nt, synthetic construct
  source 1..21: mol_type = other RNA
  modified_base 1: mod_base = OTHER; note = 2'-O-methyladenosine-3'-phosphate
  modified_base 2: mod_base = OTHER; note = 2'-O-methyluridine-3'-phosphate
  modified_base 3: mod_base = OTHER; note = 2'-O-methylguanosine-3'-phosphate
  modified_base 4: mod_base = OTHER; note = 2'-O-methyluridine-3'-phosphate
  modified_base 5: mod_base = OTHER; note = 2'-O-methyladenosine-3'-phosphate
  modified_base 6: mod_base = OTHER; note = 2'-O-methylguanosine-3'-phosphate
  modified_base 7: mod_base = OTHER; note = 2'-deoxy-2'-fluorouridine-3'-phosphate
  modified_base 8: mod_base = OTHER; note = 2'-O-methyluridine-3'-phosphate
  modified_base 9: mod_base = OTHER; note = 2'-deoxy-2'-fluorouridine-3'-phosphate
  modified_base 10: mod_base = OTHER; note = 2'-deoxy-2'-fluorouridine-3'-phosphate
  modified_base 11: mod_base = OTHER; note = 2'-deoxy-2'-fluoroadenosine-3'-phosphate
  modified_base 12: mod_base = OTHER; note = 2'-O-methyluridine-3'-phosphate
  modified_base 13: mod_base = OTHER; note = 2'-O-methyluridine-3'-phosphate
  modified_base 14: mod_base = OTHER; note = 2'-O-methyluridine-3'-phosphate
  modified_base 15: mod_base = OTHER; note = 2'-O-methylguanosine-3'-phosphate
  modified_base 16: mod_base = OTHER; note = 2'-O-methyladenosine-3'-phosphate
  modified_base 17: mod_base = OTHER; note = 2'-O-methyladenosine-3'-phosphate
  modified_base 18: mod_base = OTHER; note = 2'-O-methyladenosine-3'-phosphate
  modified_base 19: mod_base = OTHER; note = 2'-O-methyladenosine-3'-phosphate
  modified_base 20: mod_base = OTHER; note = 2'-O-methylguanosine-3'-phosphate
  modified_base 21: mod_base = OTHER; note = 2'-O-methyladenosine
atgtagttttatttgaaaaga

SEQ ID NO: 3521 - RNA, 21 nt, synthetic construct
  source 1..21: mol_type = other RNA
  modified_base 1: mod_base = OTHER; note = 2'-O-methyluridine-3'-phosphate
  modified_base 2: mod_base = OTHER; note = 2'-O-methylguanosine-3'-phosphate
  modified_base 3: mod_base = OTHER; note = 2'-O-methyluridine-3'-phosphate
  modified_base 4: mod_base = OTHER; note = 2'-O-methyladenosine-3'-phosphate
  modified_base 5: mod_base = OTHER; note = 2'-O-methylguanosine-3'-phosphate
  modified_base 6: mod_base = OTHER; note = 2'-O-methyluridine-3'-phosphate
  modified_base 7: mod_base = OTHER; note = 2'-deoxy-2'-fluorouridine-3'-phosphate
  modified_base 8: mod_base = OTHER; note = 2'-O-methyluridine-3'-phosphate
  modified_base 9: mod_base = OTHER; note = 2'-deoxy-2'-fluorouridine-3'-phosphate
  modified_base 10: mod_base = OTHER; note = 2'-deoxy-2'-fluoroadenosine-3'-phosphate
  modified_base 11: mod_base = OTHER; note = 2'-deoxy-2'-fluorouridine-3'-phosphate
  modified_base 12: mod_base = OTHER; note = 2'-O-methyluridine-3'-phosphate
  modified_base 13: mod_base = OTHER; note = 2'-O-methyluridine-3'-phosphate
  modified_base 14: mod_base = OTHER; note = 2'-O-methylguanosine-3'-phosphate
  modified_base 15: mod_base = OTHER; note = 2'-O-methyladenosine-3'-phosphate
  modified_base 16: mod_base = OTHER; note = 2'-O-methyladenosine-3'-phosphate
  modified_base 17: mod_base = OTHER; note = 2'-O-methyladenosine-3'-phosphate
  modified_base 18: mod_base = OTHER; note = 2'-O-methyladenosine-3'-phosphate
  modified_base 19: mod_base = OTHER; note = 2'-O-methylguanosine-3'-phosphate
  modified_base 20: mod_base = OTHER; note = 2'-O-methyladenosine-3'-phosphate
  modified_base 21: mod_base = OTHER; note = 2'-O-methyladenosine
tgtagttttatttgaaaagaa

SEQ ID NO: 3522 - RNA, 21 nt, synthetic construct
  source 1..21: mol_type = other RNA
  modified_base 1: mod_base = OTHER; note = 2'-O-methylguanosine-3'-phosphate
  modified_base 2: mod_base = OTHER; note = 2'-O-methyluridine-3'-phosphate
  modified_base 3: mod_base = OTHER; note = 2'-O-methyladenosine-3'-phosphate
  modified_base 4: mod_base = OTHER; note = 2'-O-methylguanosine-3'-phosphate
  modified_base 5: mod_base = OTHER; note = 2'-O-methyluridine-3'-phosphate
  modified_base 6: mod_base = OTHER; note = 2'-O-methyluridine-3'-phosphate
  modified_base 7: mod_base = OTHER; note = 2'-deoxy-2'-fluorouridine-3'-phosphate
  modified_base 8: mod_base = OTHER; note = 2'-O-methyluridine-3'-phosphate
  modified_base 9: mod_base = OTHER; note = 2'-deoxy-2'-fluoroadenosine-3'-phosphate
  modified_base 10: mod_base = OTHER; note = 2'-deoxy-2'-fluorouridine-3'-phosphate
  modified_base 11: mod_base = OTHER; note = 2'-deoxy-2'-fluorouridine-3'-phosphate
  modified_base 12: mod_base = OTHER; note = 2'-O-methyluridine-3'-phosphate
  modified_base 13: mod_base = OTHER; note = 2'-O-methylguanosine-3'-phosphate
  modified_base 14: mod_base = OTHER; note = 2'-O-methyladenosine-3'-phosphate
  modified_base 15: mod_base = OTHER; note = 2'-O-methyladenosine-3'-phosphate
  modified_base 16: mod_base = OTHER; note = 2'-O-methyladenosine-3'-phosphate
  modified_base 17: mod_base = OTHER; note = 2'-O-methyladenosine-3'-phosphate
  modified_base 18: mod_base = OTHER; note = 2'-O-methylguanosine-3'-phosphate
  modified_base 19: mod_base = OTHER; note = 2'-O-methyladenosine-3'-phosphate
  modified_base 20: mod_base = OTHER; note = 2'-O-methyladenosine-3'-phosphate
  modified_base 21: mod_base = OTHER; note = 2'-O-methyladenosine
gtagttttatttgaaaagaaa

SEQ ID NO: 3523 - RNA, 21 nt, synthetic construct
  source 1..21: mol_type = other RNA
  modified_base 1: mod_base = OTHER; note = 2'-O-methyluridine-3'-phosphate
  modified_base 2: mod_base = OTHER; note = 2'-O-methylguanosine-3'-phosphate
  modified_base 3: mod_base = OTHER; note = 2'-O-methyladenosine-3'-phosphate
  modified_base 4: mod_base = OTHER; note = 2'-O-methyladenosine-3'-phosphate
  modified_base 5: mod_base = OTHER; note = 2'-O-methyladenosine-3'-phosphate
  modified_base 6: mod_base = OTHER; note = 2'-O-methyladenosine-3'-phosphate
  modified_base 7: mod_base = OTHER; note = 2'-deoxy-2'-fluoroguanosine-3'-phosphate
  modified_base 8: mod_base = OTHER; note = 2'-O-methyladenosine-3'-phosphate
  modified_base 9: mod_base = OTHER; note = 2'-deoxy-2'-fluoroadenosine-3'-phosphate
  modified_base 10: mod_base = OTHER; note = 2'-deoxy-2'-fluoroadenosine-3'-phosphate
  modified_base 11: mod_base = OTHER; note = 2'-deoxy-2'-fluoroguanosine-3'-phosphate
  modified_base 12: mod_base = OTHER; note = 2'-O-methyluridine-3'-phosphate
  modified_base 13: mod_base = OTHER; note = 2'-O-methylguanosine-3'-phosphate
  modified_base 14: mod_base = OTHER; note = 2'-O-methyluridine-3'-phosphate
  modified_base 15: mod_base = OTHER; note = 2'-O-methyladenosine-3'-phosphate
  modified_base 16: mod_base = OTHER; note = 2'-O-methyluridine-3'-phosphate
  modified_base 17: mod_base = OTHER; note = 2'-O-methylcytidine-3'-phosphate
  modified_base 18: mod_base = OTHER; note = 2'-O-methyluridine-3'-phosphate
  modified_base 19: mod_base = OTHER; note = 2'-O-methylcytidine-3'-phosphate
  modified_base 20: mod_base = OTHER; note = 2'-O-methyluridine-3'-phosphate
  modified_base 21: mod_base = OTHER; note = 2'-O-methyladenosine
tgaaaagaaagtgtatctcta

SEQ ID NO: 3524 - RNA, 21 nt, synthetic construct
  source 1..21: mol_type = other RNA
  modified_base 1: mod_base = OTHER; note = 2'-O-methylguanosine-3'-phosphate
  modified_base 2: mod_base = OTHER; note = 2'-O-methyladenosine-3'-phosphate
  modified_base 3: mod_base = OTHER; note = 2'-O-methyladenosine-3'-phosphate
  modified_base 4: mod_base = OTHER; note = 2'-O-methyladenosine-3'-phosphate
  modified_base 5: mod_base = OTHER; note = 2'-O-methyladenosine-3'-phosphate
  modified_base 6: mod_base = OTHER; note = 2'-O-methylguanosine-3'-phosphate
  modified_base 7: mod_base = OTHER; note = 2'-deoxy-2'-fluoroadenosine-3'-phosphate
  modified_base 8: mod_base = OTHER; note = 2'-O-methyladenosine-3'-phosphate
  modified_base 9: mod_base = OTHER; note = 2'-deoxy-2'-fluoroadenosine-3'-phosphate
  modified_base 10: mod_base = OTHER; note = 2'-deoxy-2'-fluoroguanosine-3'-phosphate
  modified_base 11: mod_base = OTHER; note = 2'-deoxy-2'-fluorouridine-3'-phosphate
  modified_base 12: mod_base = OTHER; note = 2'-O-methylguanosine-3'-phosphate
  modified_base 13: mod_base = OTHER; note = 2'-O-methyluridine-3'-phosphate
  modified_base 14: mod_base = OTHER; note = 2'-O-methyladenosine-3'-phosphate
  modified_base 15: mod_base = OTHER; note = 2'-O-methyluridine-3'-phosphate
  modified_base 16: mod_base = OTHER; note = 2'-O-methylcytidine-3'-phosphate
  modified_base 17: mod_base = OTHER; note = 2'-O-methyluridine-3'-phosphate
  modified_base 18: mod_base = OTHER; note = 2'-O-methylcytidine-3'-phosphate
  modified_base 19: mod_base = OTHER; note = 2'-O-methyluridine-3'-phosphate
  modified_base 20: mod_base = OTHER; note = 2'-O-methylcytidine-3'-phosphate
  modified_base 21: mod_base = OTHER; note = 2'-O-methyladenosine
gaaaagaaagtgtatctctca

SEQ ID NO: 3525 - RNA, 21 nt, synthetic construct
  source 1..21: mol_type = other RNA
  modified_base 1: mod_base = OTHER; note = 2'-O-methyladenosine-3'-phosphate
  modified_base 2: mod_base = OTHER; note = 2'-O-methyladenosine-3'-phosphate
  modified_base 3: mod_base = OTHER; note = 2'-O-methyladenosine-3'-phosphate
  modified_base 4: mod_base = OTHER; note = 2'-O-methyladenosine-3'-phosphate
  modified_base 5: mod_base = OTHER; note = 2'-O-methylguanosine-3'-phosphate
  modified_base 6: mod_base = OTHER; note = 2'-O-methyladenosine-3'-phosphate
  modified_base 7: mod_base = OTHER; note = 2'-deoxy-2'-fluoroadenosine-3'-phosphate
  modified_base 8: mod_base = OTHER; note = 2'-O-methyladenosine-3'-phosphate
  modified_base 9: mod_base = OTHER; note = 2'-deoxy-2'-fluoroguanosine-3'-phosphate
  modified_base 10: mod_base = OTHER; note = 2'-deoxy-2'-fluorouridine-3'-phosphate
  modified_base 11: mod_base = OTHER; note = 2'-deoxy-2'-fluoroguanosine-3'-phosphate
  modified_base 12: mod_base = OTHER; note = 2'-O-methyluridine-3'-phosphate
  modified_base 13: mod_base = OTHER; note = 2'-O-methyladenosine-3'-phosphate
  modified_base 14: mod_base = OTHER; note = 2'-O-methyluridine-3'-phosphate
  modified_base 15: mod_base = OTHER; note = 2'-O-methylcytidine-3'-phosphate
  modified_base 16: mod_base = OTHER; note = 2'-O-methyluridine-3'-phosphate
  modified_base 17: mod_base = OTHER; note = 2'-O-methylcytidine-3'-phosphate
  modified_base 18: mod_base = OTHER; note = 2'-O-methyluridine-3'-phosphate
  modified_base 19: mod_base = OTHER; note = 2'-O-methylcytidine-3'-phosphate
  modified_base 20: mod_base = OTHER; note = 2'-O-methyladenosine-3'-phosphate
  modified_base 21: mod_base = OTHER; note = 2'-O-methyladenosine
aaaagaaagtgtatctctcaa

SEQ ID NO: 3526 - RNA, 21 nt, synthetic construct
  source 1..21: mol_type = other RNA
  modified_base 1: mod_base = OTHER; note = 2'-O-methyladenosine-3'-phosphate
  modified_base 2: mod_base = OTHER; note = 2'-O-methyladenosine-3'-phosphate
  modified_base 3: mod_base = OTHER; note = 2'-O-methyladenosine-3'-phosphate
  modified_base 4: mod_base = OTHER; note = 2'-O-methylguanosine-3'-phosphate
  modified_base 5: mod_base = OTHER; note = 2'-O-methyladenosine-3'-phosphate
  modified_base 6: mod_base = OTHER; note = 2'-O-methyladenosine-3'-phosphate
  modified_base 7: mod_base = OTHER; note = 2'-deoxy-2'-fluoroadenosine-3'-phosphate
  modified_base 8: mod_base = OTHER; note = 2'-O-methylguanosine-3'-phosphate
  modified_base 9: mod_base = OTHER; note = 2'-deoxy-2'-fluorouridine-3'-phosphate
  modified_base 10: mod_base = OTHER; note = 2'-deoxy-2'-fluoroguanosine-3'-phosphate
  modified_base 11: mod_base = OTHER; note = 2'-deoxy-2'-fluorouridine-3'-phosphate
  modified_base 12: mod_base = OTHER; note = 2'-O-methyladenosine-3'-phosphate
  modified_base 13: mod_base = OTHER; note = 2'-O-methyluridine-3'-phosphate
  modified_base 14: mod_base = OTHER; note = 2'-O-methylcytidine-3'-phosphate
  modified_base 15: mod_base = OTHER; note = 2'-O-methyluridine-3'-phosphate
  modified_base 16: mod_base = OTHER; note = 2'-O-methylcytidine-3'-phosphate
  modified_base 17: mod_base = OTHER; note = 2'-O-methyluridine-3'-phosphate
  modified_base 18: mod_base = OTHER; note = 2'-O-methylcytidine-3'-phosphate
  modified_base 19: mod_base = OTHER; note = 2'-O-methyladenosine-3'-phosphate
  modified_base 20: mod_base = OTHER; note = 2'-O-methylguanosine-3'-phosphate
  modified_base 21: mod_base = OTHER; note = 2'-O-methyladenosine
aaagaaagtgtatctctcaga

SEQ ID NO: 3527 - RNA, 21 nt, synthetic construct
  source 1..21: mol_type = other RNA
  modified_base 1: mod_base = OTHER; note = 2'-O-methyladenosine-3'-phosphate
  modified_base 2: mod_base = OTHER; note = 2'-O-methyladenosine-3'-phosphate
  modified_base 3: mod_base = OTHER; note = 2'-O-methylguanosine-3'-phosphate
  modified_base 4: mod_base = OTHER; note = 2'-O-methyladenosine-3'-phosphate
  modified_base 5: mod_base = OTHER; note = 2'-O-methyladenosine-3'-phosphate
  modified_base 6: mod_base = OTHER; note = 2'-O-methyladenosine-3'-phosphate
  modified_base 7: mod_base = OTHER; note = 2'-deoxy-2'-fluoroguanosine-3'-phosphate
  modified_base 8: mod_base = OTHER; note = 2'-O-methyluridine-3'-phosphate
  modified_base 9: mod_base = OTHER; note = 2'-deoxy-2'-fluoroguanosine-3'-phosphate
  modified_base 10: mod_base = OTHER; note = 2'-deoxy-2'-fluorouridine-3'-phosphate
  modified_base 11: mod_base = OTHER; note = 2'-deoxy-2'-fluoroadenosine-3'-phosphate
  modified_base 12: mod_base = OTHER; note = 2'-O-methyluridine-3'-phosphate
  modified_base 13: mod_base = OTHER; note = 2'-O-methylcytidine-3'-phosphate
  modified_base 14: mod_base = OTHER; note = 2'-O-methyluridine-3'-phosphate
  modified_base 15: mod_base = OTHER; note = 2'-O-methylcytidine-3'-phosphate
  modified_base 16: mod_base = OTHER; note = 2'-O-methyluridine-3'-phosphate
  modified_base 17: mod_base = OTHER; note = 2'-O-methylcytidine-3'-phosphate
  modified_base 18: mod_base = OTHER; note = 2'-O-methyladenosine-3'-phosphate
  modified_base 19: mod_base = OTHER; note = 2'-O-methylguanosine-3'-phosphate
  modified_base 20: mod_base = OTHER; note = 2'-O-methyladenosine-3'-phosphate
  modified_base 21: mod_base = OTHER; note = 2'-O-methyladenosine
aagaaagtgtatctctcagaa

SEQ ID NO: 3528 - RNA, 21 nt, synthetic construct
  source 1..21: mol_type = other RNA
  modified_base 1: mod_base = OTHER; note = 2'-O-methyladenosine-3'-phosphate
  modified_base 2: mod_base = OTHER; note = 2'-O-methylguanosine-3'-phosphate
  modified_base 3: mod_base = OTHER; note = 2'-O-methyladenosine-3'-phosphate
  modified_base 4: mod_base = OTHER; note = 2'-O-methyladenosine-3'-phosphate
  modified_base 5: mod_base = OTHER; note = 2'-O-methyladenosine-3'-phosphate
  modified_base 6: mod_base = OTHER; note = 2'-O-methylguanosine-3'-phosphate
  modified_base 7: mod_base = OTHER; note = 2'-deoxy-2'-fluorouridine-3'-phosphate
  modified_base 8: mod_base = OTHER; note = 2'-O-methylguanosine-3'-phosphate
  modified_base 9: mod_base = OTHER; note = 2'-deoxy-2'-fluorouridine-3'-phosphate
  modified_base 10: mod_base = OTHER; note = 2'-deoxy-2'-fluoroadenosine-3'-phosphate
  modified_base 11: mod_base = OTHER; note = 2'-deoxy-2'-fluorouridine-3'-phosphate
  modified_base 12: mod_base = OTHER; note = 2'-O-methylcytidine-3'-phosphate
  modified_base 13: mod_base = OTHER; note = 2'-O-methyluridine-3'-phosphate
  modified_base 14: mod_base = OTHER; note = 2'-O-methylcytidine-3'-phosphate
  modified_base 15: mod_base = OTHER; note = 2'-O-methyluridine-3'-phosphate
  modified_base 16: mod_base = OTHER; note = 2'-O-methylcytidine-3'-phosphate
  modified_base 17: mod_base = OTHER; note = 2'-O-methyladenosine-3'-phosphate
  modified_base 18: mod_base = OTHER; note = 2'-O-methylguanosine-3'-phosphate
  modified_base 19: mod_base = OTHER; note = 2'-O-methyladenosine-3'-phosphate
  modified_base 20: mod_base = OTHER; note = 2'-O-methylguanosine-3'-phosphate
  modified_base 21: mod_base = OTHER; note = 2'-O-methyladenosine
agaaagtgtatctctcagaga

SEQ ID NO: 3529 - RNA, 21 nt, synthetic construct
  source 1..21: mol_type = other RNA
  modified_base 1: mod_base = OTHER; note = 2'-O-methylguanosine-3'-phosphate
  modified_base 2: mod_base = OTHER; note = 2'-O-methyladenosine-3'-phosphate
  modified_base 3: mod_base = OTHER; note = 2'-O-methyladenosine-3'-phosphate
  modified_base 4: mod_base = OTHER; note = 2'-O-methyladenosine-3'-phosphate
  modified_base 5: mod_base = OTHER; note = 2'-O-methylguanosine-3'-phosphate
  modified_base 6: mod_base = OTHER; note = 2'-O-methyluridine-3'-phosphate
  modified_base 7: mod_base = OTHER; note = 2'-deoxy-2'-fluoroguanosine-3'-phosphate
  modified_base 8: mod_base = OTHER; note = 2'-O-methyluridine-3'-phosphate
  modified_base 9: mod_base = OTHER; note = 2'-deoxy-2'-fluoroadenosine-3'-phosphate
  modified_base 10: mod_base = OTHER; note = 2'-deoxy-2'-fluorouridine-3'-phosphate
  modified_base 11: mod_base = OTHER; note = 2'-deoxy-2'-fluorocytidine-3'-phosphate
  modified_base 12: mod_base = OTHER; note = 2'-O-methyluridine-3'-phosphate
  modified_base 13: mod_base = OTHER; note = 2'-O-methylcytidine-3'-phosphate
  modified_base 14: mod_base = OTHER; note = 2'-O-methyluridine-3'-phosphate
  modified_base 15: mod_base = OTHER; note = 2'-O-methylcytidine-3'-phosphate
  modified_base 16: mod_base = OTHER; note = 2'-O-methyladenosine-3'-phosphate
  modified_base 17: mod_base = OTHER; note = 2'-O-methylguanosine-3'-phosphate
  modified_base 18: mod_base = OTHER; note = 2'-O-methyladenosine-3'-phosphate
  modified_base 19: mod_base = OTHER; note = 2'-O-methylguanosine-3'-phosphate
  modified_base 20: mod_base = OTHER; note = 2'-O-methyluridine-3'-phosphate
  modified_base 21: mod_base = OTHER; note = 2'-O-methyladenosine
gaaagtgtatctctcagagta

SEQ ID NO: 3530 - RNA, 21 nt, synthetic construct
  source 1..21: mol_type = other RNA
  modified_base 1: mod_base = OTHER; note = 2'-O-methyladenosine-3'-phosphate
  modified_base 2: mod_base = OTHER; note = 2'-O-methyladenosine-3'-phosphate
  modified_base 3: mod_base = OTHER; note = 2'-O-methyladenosine-3'-phosphate
  modified_base 4: mod_base = OTHER; note = 2'-O-methylguanosine-3'-phosphate
  modified_base 5: mod_base = OTHER; note = 2'-O-methyluridine-3'-phosphate
  modified_base 6: mod_base = OTHER; note = 2'-O-methylguanosine-3'-phosphate
  modified_base 7: mod_base = OTHER; note = 2'-deoxy-2'-fluorouridine-3'-phosphate
  modified_base 8: mod_base = OTHER; note = 2'-O-methyladenosine-3'-phosphate
  modified_base 9: mod_base = OTHER; note = 2'-deoxy-2'-fluorouridine-3'-phosphate
  modified_base 10: mod_base = OTHER; note = 2'-deoxy-2'-fluorocytidine-3'-phosphate
  modified_base 11: mod_base = OTHER; note = 2'-deoxy-2'-fluorouridine-3'-phosphate
  modified_base 12: mod_base = OTHER; note = 2'-O-methylcytidine-3'-phosphate
  modified_base 13: mod_base = OTHER; note = 2'-O-methyluridine-3'-phosphate
  modified_base 14: mod_base = OTHER; note = 2'-O-methylcytidine-3'-phosphate
  modified_base 15: mod_base = OTHER; note = 2'-O-methyladenosine-3'-phosphate
  modified_base 16: mod_base = OTHER; note = 2'-O-methylguanosine-3'-phosphate
  modified_base 17: mod_base = OTHER; note = 2'-O-methyladenosine-3'-phosphate
  modified_base 18: mod_base = OTHER; note = 2'-O-methylguanosine-3'-phosphate
  modified_base 19: mod_base = OTHER; note = 2'-O-methyluridine-3'-phosphate
  modified_base 20: mod_base = OTHER; note = 2'-O-methylguanosine-3'-phosphate
  modified_base 21: mod_base = OTHER; note = 2'-O-methyladenosine
aaagtgtatctctcagagtga

SEQ ID NO: 3531 - RNA, 21 nt, synthetic construct
  source 1..21: mol_type = other RNA
  modified_base 1: mod_base = OTHER; note = 2'-O-methyladenosine-3'-phosphate
  modified_base 2: mod_base = OTHER; note = 2'-O-methyladenosine-3'-phosphate
  modified_base 3: mod_base = OTHER; note = 2'-O-methylguanosine-3'-phosphate
  modified_base 4: mod_base = OTHER; note = 2'-O-methyluridine-3'-phosphate
  modified_base 5: mod_base = OTHER; note = 2'-O-methylguanosine-3'-phosphate
  modified_base 6: mod_base = OTHER; note = 2'-O-methyluridine-3'-phosphate
  modified_base 7: mod_base = OTHER; note = 2'-deoxy-2'-fluoroadenosine-3'-phosphate
  modified_base 8: mod_base = OTHER; note = 2'-O-methyluridine-3'-phosphate
  modified_base 9: mod_base = OTHER; note = 2'-deoxy-2'-fluorocytidine-3'-phosphate
  modified_base 10: mod_base = OTHER; note = 2'-deoxy-2'-fluorouridine-3'-phosphate
  modified_base 11: mod_base = OTHER; note = 2'-deoxy-2'-fluorocytidine-3'-phosphate
  modified_base 12: mod_base = OTHER; note = 2'-O-methyluridine-3'-phosphate
  modified_base 13: mod_base = OTHER; note = 2'-O-methylcytidine-3'-phosphate
  modified_base 14: mod_base = OTHER; note = 2'-O-methyladenosine-3'-phosphate
  modified_base 15: mod_base = OTHER; note = 2'-O-methylguanosine-3'-phosphate
  modified_base 16: mod_base = OTHER; note = 2'-O-methyladenosine-3'-phosphate
  modified_base 17: mod_base = OTHER; note = 2'-O-methylguanosine-3'-phosphate
  modified_base 18: mod_base = OTHER; note = 2'-O-methyluridine-3'-phosphate
  modified_base 19: mod_base = OTHER; note = 2'-O-methylguanosine-3'-phosphate
  modified_base 20: mod_base = OTHER; note = 2'-O-methylcytidine-3'-phosphate
  modified_base 21: mod_base = OTHER; note = 2'-O-methyladenosine
aagtgtatctctcagagtgca

SEQ ID NO: 3532 - RNA, 21 nt, synthetic construct
  source 1..21: mol_type = other RNA
  modified_base 1: mod_base = OTHER; note = 2'-O-methyladenosine-3'-phosphate
  modified_base 2: mod_base = OTHER; note = 2'-O-methylguanosine-3'-phosphate
  modified_base 3: mod_base = OTHER; note = 2'-O-methyluridine-3'-phosphate
  modified_base 4: mod_base = OTHER; note = 2'-O-methylguanosine-3'-phosphate
  modified_base 5: mod_base = OTHER; note = 2'-O-methyluridine-3'-phosphate
  modified_base 6: mod_base = OTHER; note = 2'-O-methyladenosine-3'-phosphate
  modified_base 7: mod_base = OTHER; note = 2'-deoxy-2'-fluorouridine-3'-phosphate
  modified_base 8: mod_base = OTHER; note = 2'-O-methylcytidine-3'-phosphate
  modified_base 9: mod_base = OTHER; note = 2'-deoxy-2'-fluorouridine-3'-phosphate
  modified_base 10: mod_base = OTHER; note = 2'-deoxy-2'-fluorocytidine-3'-phosphate
  modified_base 11: mod_base = OTHER; note = 2'-deoxy-2'-fluorouridine-3'-phosphate
  modified_base 12: mod_base = OTHER; note = 2'-O-methylcytidine-3'-phosphate
  modified_base 13: mod_base = OTHER; note = 2'-O-methyladenosine-3'-phosphate
  modified_base 14: mod_base = OTHER; note = 2'-O-methylguanosine-3'-phosphate
  modified_base 15: mod_base = OTHER; note = 2'-O-methyladenosine-3'-phosphate
  modified_base 16: mod_base = OTHER; note = 2'-O-methylguanosine-3'-phosphate
  modified_base 17: mod_base = OTHER; note = 2'-O-methyluridine-3'-phosphate
  modified_base 18: mod_base = OTHER; note = 2'-O-methylguanosine-3'-phosphate
  modified_base 19: mod_base = OTHER; note = 2'-O-methylcytidine-3'-phosphate
  modified_base 20: mod_base = OTHER; note = 2'-O-methyladenosine-3'-phosphate
  modified_base 21: mod_base = OTHER; note = 2'-O-methyladenosine
agtgtatctctcagagtgcaa

SEQ ID NO: 3533 - RNA, 21 nt, synthetic construct
  source 1..21: mol_type = other RNA
  modified_base 1: mod_base = OTHER; note = 2'-O-methylguanosine-3'-phosphate
  modified_base 2: mod_base = OTHER; note = 2'-O-methyluridine-3'-phosphate
  modified_base 3: mod_base = OTHER; note = 2'-O-methylguanosine-3'-phosphate
  modified_base 4: mod_base = OTHER; note = 2'-O-methyluridine-3'-phosphate
  modified_base 5: mod_base = OTHER; note = 2'-O-methyladenosine-3'-phosphate
  modified_base 6: mod_base = OTHER; note = 2'-O-methyluridine-3'-phosphate
  modified_base 7: mod_base = OTHER; note = 2'-deoxy-2'-fluorocytidine-3'-phosphate
  modified_base 8: mod_base = OTHER; note = 2'-O-methyluridine-3'-phosphate
  modified_base 9: mod_base = OTHER; note = 2'-deoxy-2'-fluorocytidine-3'-phosphate
  modified_base 10: mod_base = OTHER; note = 2'-deoxy-2'-fluorouridine-3'-phosphate
  modified_base 11: mod_base = OTHER; note = 2'-deoxy-2'-fluorocytidine-3'-phosphate
  modified_base 12: mod_base = OTHER; note = 2'-O-methyladenosine-3'-phosphate
  modified_base 13: mod_base = OTHER; note = 2'-O-methylguanosine-3'-phosphate
  modified_base 14: mod_base = OTHER; note = 2'-O-methyladenosine-3'-phosphate
  modified_base 15: mod_base = OTHER; note = 2'-O-methylguanosine-3'-phosphate
  modified_base 16: mod_base = OTHER; note = 2'-O-methyluridine-3'-phosphate
  modified_base 17: mod_base = OTHER; note = 2'-O-methylguanosine-3'-phosphate
  modified_base 18: mod_base = OTHER; note = 2'-O-methylcytidine-3'-phosphate
  modified_base 19: mod_base = OTHER; note = 2'-O-methyladenosine-3'-phosphate
  modified_base 20: mod_base = OTHER; note = 2'-O-methyladenosine-3'-phosphate
  modified_base 21: mod_base = OTHER; note = 2'-O-methyladenosine
gtgtatctctcagagtgcaaa

SEQ ID NO: 3534 - RNA, 21 nt, synthetic construct
  source 1..21: mol_type = other RNA
  modified_base 1: mod_base = OTHER; note = 2'-O-methyluridine-3'-phosphate
  modified_base 2: mod_base = OTHER; note = 2'-O-methylguanosine-3'-phosphate
  modified_base 3: mod_base = OTHER; note = 2'-O-methyluridine-3'-phosphate
  modified_base 4: mod_base = OTHER; note = 2'-O-methyladenosine-3'-phosphate
  modified_base 5: mod_base = OTHER; note = 2'-O-methyluridine-3'-phosphate
  modified_base 6: mod_base = OTHER; note = 2'-O-methylcytidine-3'-phosphate
  modified_base 7: mod_base = OTHER; note = 2'-deoxy-2'-fluorouridine-3'-phosphate
  modified_base 8: mod_base = OTHER; note = 2'-O-methylcytidine-3'-phosphate
  modified_base 9: mod_base = OTHER; note = 2'-deoxy-2'-fluorouridine-3'-phosphate
  modified_base 10: mod_base = OTHER; note = 2'-deoxy-2'-fluorocytidine-3'-phosphate
  modified_base 11: mod_base = OTHER; note = 2'-deoxy-2'-fluoroadenosine-3'-phosphate
  modified_base 12: mod_base = OTHER; note = 2'-O-methylguanosine-3'-phosphate
  modified_base 13: mod_base = OTHER; note = 2'-O-methyladenosine-3'-phosphate
  modified_base 14: mod_base = OTHER; note = 2'-O-methylguanosine-3'-phosphate
  modified_base 15: mod_base = OTHER; note = 2'-O-methyluridine-3'-phosphate
  modified_base 16: mod_base = OTHER; note = 2'-O-methylguanosine-3'-phosphate
  modified_base 17: mod_base = OTHER; note = 2'-O-methylcytidine-3'-phosphate
  modified_base 18: mod_base = OTHER; note = 2'-O-methyladenosine-3'-phosphate
  modified_base 19: mod_base = OTHER; note = 2'-O-methyladenosine-3'-phosphate
  modified_base 20: mod_base = OTHER; note = 2'-O-methylguanosine-3'-phosphate
  modified_base 21: mod_base = OTHER; note = 2'-O-methyladenosine
tgtatctctcagagtgcaaga

SEQ ID NO: 3535 - RNA, 21 nt, synthetic construct
  source 1..21: mol_type = other RNA
  modified_base 1: mod_base = OTHER; note = 2'-O-methylguanosine-3'-phosphate
  modified_base 2: mod_base = OTHER; note = 2'-O-methyluridine-3'-phosphate
  modified_base 3: mod_base = OTHER; note = 2'-O-methyladenosine-3'-phosphate
  modified_base 4: mod_base = OTHER; note = 2'-O-methyluridine-3'-phosphate
  modified_base 5: mod_base = OTHER; note = 2'-O-methylcytidine-3'-phosphate
  modified_base 6: mod_base = OTHER; note = 2'-O-methyluridine-3'-phosphate
  modified_base 7: mod_base = OTHER; note = 2'-deoxy-2'-fluorocytidine-3'-phosphate
  modified_base 8: mod_base = OTHER; note = 2'-O-methyluridine-3'-phosphate
  modified_base 9: mod_base = OTHER; note = 2'-deoxy-2'-fluorocytidine-3'-phosphate
  modified_base 10: mod_base = OTHER; note = 2'-deoxy-2'-fluoroadenosine-3'-phosphate
  modified_base 11: mod_base = OTHER; note = 2'-deoxy-2'-fluoroguanosine-3'-phosphate
  modified_base 12: mod_base = OTHER; note = 2'-O-methyladenosine-3'-phosphate
  modified_base 13: mod_base = OTHER; note = 2'-O-methylguanosine-3'-phosphate
  modified_base 14: mod_base = OTHER; note = 2'-O-methyluridine-3'-phosphate
  modified_base 15: mod_base = OTHER; note = 2'-O-methylguanosine-3'-phosphate
  modified_base 16: mod_base = OTHER; note = 2'-O-methylcytidine-3'-phosphate
  modified_base 17: mod_base = OTHER; note = 2'-O-methyladenosine-3'-phosphate
  modified_base 18: mod_base = OTHER; note = 2'-O-methyladenosine-3'-phosphate
  modified_base 19: mod_base = OTHER; note = 2'-O-methylguanosine-3'-phosphate
  modified_base 20: mod_base = OTHER; note = 2'-O-methyladenosine-3'-phosphate
  modified_base 21: mod_base = OTHER; note = 2'-O-methyladenosine
gtatctctcagagtgcaagaa

SEQ ID NO: 3536 - RNA, 21 nt, synthetic construct
  source 1..21: mol_type = other RNA
  modified_base 1: mod_base = OTHER; note = 2'-O-methyladenosine-3'-phosphate
  modified_base 2: mod_base = OTHER; note = 2'-O-methyluridine-3'-phosphate
  modified_base 3: mod_base = OTHER; note = 2'-O-methylcytidine-3'-phosphate
  modified_base 4: mod_base = OTHER; note = 2'-O-methyluridine-3'-phosphate
  modified_base 5: mod_base = OTHER; note = 2'-O-methylcytidine-3'-phosphate
  modified_base 6: mod_base = OTHER; note = 2'-O-methyluridine-3'-phosphate
  modified_base 7: mod_base = OTHER; note = 2'-deoxy-2'-fluorocytidine-3'-phosphate
  modified_base 8: mod_base = OTHER; note = 2'-O-methyladenosine-3'-phosphate
  modified_base 9: mod_base = OTHER; note = 2'-deoxy-2'-fluoroguanosine-3'-phosphate
  modified_base 10: mod_base = OTHER; note = 2'-deoxy-2'-fluoroadenosine-3'-phosphate
  modified_base 11: mod_base = OTHER; note = 2'-deoxy-2'-fluoroguanosine-3'-phosphate
  modified_base 12: mod_base = OTHER; note = 2'-O-methyluridine-3'-phosphate
  modified_base 13: mod_base = OTHER; note = 2'-O-methylguanosine-3'-phosphate
  modified_base 14: mod_base = OTHER; note = 2'-O-methylcytidine-3'-phosphate
  modified_base 15: mod_base = OTHER; note = 2'-O-methyladenosine-3'-phosphate
  modified_base 16: mod_base = OTHER; note = 2'-O-methyladenosine-3'-phosphate
  modified_base 17: mod_base = OTHER; note = 2'-O-methylguanosine-3'-phosphate
  modified_base 18: mod_base = OTHER; note = 2'-O-methyladenosine-3'-phosphate
  modified_base 19: mod_base = OTHER; note = 2'-O-methylcytidine-3'-phosphate
  modified_base 20: mod_base = OTHER; note = 2'-O-methyluridine-3'-phosphate
  modified_base 21: mod_base = OTHER; note = 2'-O-methyladenosine
atctctcagagtgcaagacta

SEQ ID NO: 3537 - RNA, 21 nt, synthetic construct
  source 1..21: mol_type = other RNA
  modified_base 1: mod_base = OTHER; note = 2'-O-methyladenosine-3'-phosphate
  modified_base 2: mod_base = OTHER; note = 2'-O-methylcytidine-3'-phosphate
  modified_base 3: mod_base = OTHER; note = 2'-O-methyladenosine-3'-phosphate
  modified_base 4: mod_base = OTHER; note = 2'-O-methylguanosine-3'-phosphate
  modified_base 5: mod_base = OTHER; note = 2'-O-methyladenosine-3'-phosphate
  modified_base 6: mod_base = OTHER; note = 2'-O-methylguanosine-3'-phosphate
  modified_base 7: mod_base = OTHER; note = 2'-deoxy-2'-fluoroguanosine-3'-phosphate
  modified_base 8: mod_base = OTHER; note = 2'-O-methylguanosine-3'-phosphate
  modified_base 9: mod_base = OTHER; note = 2'-deoxy-2'-fluoroadenosine-3'-phosphate
  modified_base 10: mod_base = OTHER; note = 2'-deoxy-2'-fluorocytidine-3'-phosphate
  modified_base 11: mod_base = OTHER; note = 2'-deoxy-2'-fluoroguanosine-3'-phosphate
  modified_base 12: mod_base = OTHER; note = 2'-O-methyladenosine-3'-phosphate
  modified_base 13: mod_base = OTHER; note = 2'-O-methyluridine-3'-phosphate
  modified_base 14: mod_base = OTHER; note = 2'-O-methylguanosine-3'-phosphate
  modified_base 15: mod_base = OTHER; note = 2'-O-methyluridine-3'-phosphate
  modified_base 16: mod_base = OTHER; note = 2'-O-methylcytidine-3'-phosphate
  modified_base 17: mod_base = OTHER; note = 2'-O-methylcytidine-3'-phosphate
  modified_base 18: mod_base = OTHER; note = 2'-O-methyladenosine-3'-phosphate
  modified_base 19: mod_base = OTHER; note = 2'-O-methyladenosine-3'-phosphate
  modified_base 20: mod_base = OTHER; note = 2'-O-methyladenosine-3'-phosphate
  modified_base 21: mod_base = OTHER; note = 2'-O-methyladenosine
acagagggacgatgtccaaaa

SEQ ID NO: 3538 - RNA, 21 nt, synthetic construct
  source 1..21: mol_type = other RNA
  modified_base 1: mod_base = OTHER; note = 2'-O-methylcytidine-3'-phosphate
  modified_base 2: mod_base = OTHER; note = 2'-O-methyladenosine-3'-phosphate
  modified_base 3: mod_base = OTHER; note = 2'-O-methylguanosine-3'-phosphate
  modified_base 4: mod_base = OTHER; note = 2'-O-methyladenosine-3'-phosphate
  modified_base 5: mod_base = OTHER; note = 2'-O-methylguanosine-3'-phosphate
  modified_base 6: mod_base = OTHER; note = 2'-O-methylguanosine-3'-phosphate
  modified_base 7: mod_base = OTHER; note = 2'-deoxy-2'-fluoroguanosine-3'-phosphate
  modified_base 8: mod_base = OTHER; note = 2'-O-methyladenosine-3'-phosphate
  modified_base 9: mod_base = OTHER; note = 2'-deoxy-2'-fluorocytidine-3'-phosphate
  modified_base 10: mod_base = OTHER; note = 2'-deoxy-2'-fluoroguanosine-3'-phosphate
  modified_base 11: mod_base = OTHER; note = 2'-deoxy-2'-fluoroadenosine-3'-phosphate
  modified_base 12: mod_base = OTHER; note = 2'-O-methyluridine-3'-phosphate
  modified_base 13: mod_base = OTHER; note = 2'-O-methylguanosine-3'-phosphate
  modified_base 14: mod_base = OTHER; note = 2'-O-methyluridine-3'-phosphate
  modified_base 15: mod_base = OTHER; note = 2'-O-methylcytidine-3'-phosphate
  modified_base 16: mod_base = OTHER; note = 2'-O-methylcytidine-3'-phosphate
  modified_base 17: mod_base = OTHER; note = 2'-O-methyladenosine-3'-phosphate
  modified_base 18: mod_base = OTHER; note = 2'-O-methyladenosine-3'-phosphate
  modified_base 19: mod_base = OTHER; note = 2'-O-methyladenosine-3'-phosphate
  modified_base 20: mod_base = OTHER; note = 2'-O-methyladenosine-3'-phosphate
  modified_base 21: mod_base = OTHER; note = 2'-O-methyladenosine
cagagggacgatgtccaaaaa

SEQ ID NO: 3539 - RNA, 21 nt, synthetic construct
  source 1..21: mol_type = other RNA
  modified_base 1: mod_base = OTHER; note = 2'-O-methyladenosine-3'-phosphate
  modified_base 2: mod_base = OTHER; note = 2'-O-methylguanosine-3'-phosphate
  modified_base 3: mod_base = OTHER; note = 2'-O-methyladenosine-3'-phosphate
  modified_base 4: mod_base = OTHER; note = 2'-O-methylguanosine-3'-phosphate
  modified_base 5: mod_base = OTHER; note = 2'-O-methylguanosine-3'-phosphate
  modified_base 6: mod_base = OTHER; note = 2'-O-methylguanosine-3'-phosphate
  modified_base 7: mod_base = OTHER; note = 2'-deoxy-2'-fluoroadenosine-3'-phosphate
  modified_base 8: mod_base = OTHER; note = 2'-O-methylcytidine-3'-phosphate
  modified_base 9: mod_base = OTHER; note = 2'-deoxy-2'-fluoroguanosine-3'-phosphate
  modified_base 10: mod_base = OTHER; note = 2'-deoxy-2'-fluoroadenosine-3'-phosphate
  modified_base 11: mod_base = OTHER; note = 2'-deoxy-2'-fluorouridine-3'-phosphate
  modified_base 12: mod_base = OTHER; note = 2'-O-methylguanosine-3'-phosphate
  modified_base 13: mod_base = OTHER; note = 2'-O-methyluridine-3'-phosphate
  modified_base 14: mod_base = OTHER; note = 2'-O-methylcytidine-3'-phosphate
  modified_base 15: mod_base = OTHER; note = 2'-O-methylcytidine-3'-phosphate
  modified_base 16: mod_base = OTHER; note = 2'-O-methyladenosine-3'-phosphate
  modified_base 17: mod_base = OTHER; note = 2'-O-methyladenosine-3'-phosphate
  modified_base 18: mod_base = OTHER; note = 2'-O-methyladenosine-3'-phosphate
  modified_base 19: mod_base = OTHER; note = 2'-O-methyladenosine-3'-phosphate
  modified_base 20: mod_base = OTHER; note = 2'-O-methylcytidine-3'-phosphate
  modified_base 21: mod_base = OTHER; note = 2'-O-methyladenosine
agagggacgatgtccaaaaca

SEQ ID NO: 3540 - RNA, 21 nt, synthetic construct
  source 1..21: mol_type = other RNA
  modified_base 1: mod_base = OTHER; note = 2'-O-methylguanosine-3'-phosphate
  modified_base 2: mod_base = OTHER; note = 2'-O-methyladenosine-3'-phosphate
  modified_base 3: mod_base = OTHER; note = 2'-O-methylguanosine-3'-phosphate
  modified_base 4: mod_base = OTHER; note = 2'-O-methylguanosine-3'-phosphate
  modified_base 5: mod_base = OTHER; note = 2'-O-methylguanosine-3'-phosphate
  modified_base 6: mod_base = OTHER; note = 2'-O-methyladenosine-3'-phosphate
  modified_base 7: mod_base = OTHER; note = 2'-deoxy-2'-fluorocytidine-3'-phosphate
  modified_base 8: mod_base = OTHER; note = 2'-O-methylguanosine-3'-phosphate
  modified_base 9: mod_base = OTHER; note = 2'-deoxy-2'-fluoroadenosine-3'-phosphate
  modified_base 10: mod_base = OTHER; note = 2'-deoxy-2'-fluorouridine-3'-phosphate
  modified_base 11: mod_base = OTHER; note = 2'-deoxy-2'-fluoroguanosine-3'-phosphate
  modified_base 12: mod_base = OTHER; note = 2'-O-methyluridine-3'-phosphate
  modified_base 13: mod_base = OTHER; note = 2'-O-methylcytidine-3'-phosphate
  modified_base 14: mod_base = OTHER; note = 2'-O-methylcytidine-3'-phosphate
  modified_base 15: mod_base = OTHER; note = 2'-O-methyladenosine-3'-phosphate
  modified_base 16: mod_base = OTHER; note = 2'-O-methyladenosine-3'-phosphate
  modified_base 17: mod_base = OTHER; note = 2'-O-methyladenosine-3'-phosphate
  modified_base 18: mod_base = OTHER; note = 2'-O-methyladenosine-3'-phosphate
  modified_base 19: mod_base = OTHER; note = 2'-O-methylcytidine-3'-phosphate
  modified_base 20: mod_base = OTHER; note = 2'-O-methyladenosine-3'-phosphate
  modified_base 21: mod_base = OTHER; note = 2'-O-methyladenosine
gagggacgatgtccaaaacaa

SEQ ID NO: 3541 - RNA, 21 nt, synthetic construct
  source 1..21: mol_type = other RNA
  modified_base 1: mod_base = OTHER; note = 2'-O-methyladenosine-3'-phosphate
  modified_base 2: mod_base = OTHER; note = 2'-O-methylguanosine-3'-phosphate
  modified_base 3: mod_base = OTHER; note = 2'-O-methylguanosine-3'-phosphate
  modified_base 4: mod_base = OTHER; note = 2'-O-methylguanosine-3'-phosphate
  modified_base 5: mod_base = OTHER; note = 2'-O-methyladenosine-3'-phosphate
  modified_base 6: mod_base = OTHER; note = 2'-O-methylcytidine-3'-phosphate
  modified_base 7: mod_base = OTHER; note = 2'-deoxy-2'-fluoroguanosine-3'-phosphate
  modified_base 8: mod_base = OTHER; note = 2'-O-methyladenosine-3'-phosphate
  modified_base 9: mod_base = OTHER; note = 2'-deoxy-2'-fluorouridine-3'-phosphate
  modified_base 10: mod_base = OTHER; note = 2'-deoxy-2'-fluoroguanosine-3'-phosphate
  modified_base 11: mod_base = OTHER; note = 2'-deoxy-2'-fluorouridine-3'-phosphate
  modified_base 12: mod_base = OTHER; note = 2'-O-methylcytidine-3'-phosphate
  modified_base 13: mod_base = OTHER; note = 2'-O-methylcytidine-3'-phosphate
  modified_base 14: mod_base = OTHER; note = 2'-O-methyladenosine-3'-phosphate
  modified_base 15: mod_base = OTHER; note = 2'-O-methyladenosine-3'-phosphate
  modified_base 16: mod_base = OTHER; note = 2'-O-methyladenosine-3'-phosphate
  modified_base 17: mod_base = OTHER; note = 2'-O-methyladenosine-3'-phosphate
  modified_base 18: mod_base = OTHER; note = 2'-O-methylcytidine-3'-phosphate
  modified_base 19: mod_base = OTHER; note = 2'-O-methyladenosine-3'-phosphate
  modified_base 20: mod_base = OTHER; note = 2'-O-methyladenosine-3'-phosphate
  modified_base 21: mod_base = OTHER; note = 2'-O-methyladenosine
agggacgatgtccaaaacaaa

SEQ ID NO: 3542 - RNA, 21 nt, synthetic construct
  source 1..21: mol_type = other RNA
  modified_base 1: mod_base = OTHER; note = 2'-O-methylguanosine-3'-phosphate
  modified_base 2: mod_base = OTHER; note = 2'-O-methylguanosine-3'-phosphate
  modified_base 3: mod_base = OTHER; note = 2'-O-methylguanosine-3'-phosphate
  modified_base 4: mod_base = OTHER; note = 2'-O-methyladenosine-3'-phosphate
  modified_base 5: mod_base = OTHER; note = 2'-O-methylcytidine-3'-phosphate
  modified_base 6: mod_base = OTHER; note = 2'-O-methylguanosine-3'-phosphate
  modified_base 7: mod_base = OTHER; note = 2'-deoxy-2'-fluoroadenosine-3'-phosphate
  modified_base 8: mod_base = OTHER; note = 2'-O-methyluridine-3'-phosphate
  modified_base 9: mod_base = OTHER; note = 2'-deoxy-2'-fluoroguanosine-3'-phosphate
  modified_base 10: mod_base = OTHER; note = 2'-deoxy-2'-fluorouridine-3'-phosphate
  modified_base 11: mod_base = OTHER; note = 2'-deoxy-2'-fluorocytidine-3'-phosphate
  modified_base 12: mod_base = OTHER; note = 2'-O-methylcytidine-3'-phosphate
  modified_base 13: mod_base = OTHER; note = 2'-O-methyladenosine-3'-phosphate
  modified_base 14: mod_base = OTHER; note = 2'-O-methyladenosine-3'-phosphate
  modified_base 15: mod_base = OTHER; note = 2'-O-methyladenosine-3'-phosphate
  modified_base 16: mod_base = OTHER; note = 2'-O-methyladenosine-3'-phosphate
  modified_base 17: mod_base = OTHER; note = 2'-O-methylcytidine-3'-phosphate
  modified_base 18: mod_base = OTHER; note = 2'-O-methyladenosine-3'-phosphate
  modified_base 19: mod_base = OTHER; note = 2'-O-methyladenosine-3'-phosphate
  modified_base 20: mod_base = OTHER; note = 2'-O-methyladenosine-3'-phosphate
  modified_base 21: mod_base = OTHER; note = 2'-O-methyladenosine
gggacgatgtccaaaacaaaa

SEQ ID NO: 3543 - RNA, 21 nt, synthetic construct
  source 1..21: mol_type = other RNA
  modified_base 1: mod_base = OTHER; note = 2'-O-methylguanosine-3'-phosphate
  modified_base 2: mod_base = OTHER; note = 2'-O-methylguanosine-3'-phosphate
  modified_base 3: mod_base = OTHER; note = 2'-O-methyladenosine-3'-phosphate
  modified_base 4: mod_base = OTHER; note = 2'-O-methylcytidine-3'-phosphate
  modified_base 5: mod_base = OTHER; note = 2'-O-methylguanosine-3'-phosphate
  modified_base 6: mod_base = OTHER; note = 2'-O-methyladenosine-3'-phosphate
  modified_base 7: mod_base = OTHER; note = 2'-deoxy-2'-fluorouridine-3'-phosphate
  modified_base 8: mod_base = OTHER; note = 2'-O-methylguanosine-3'-phosphate
  modified_base 9: mod_base = OTHER; note = 2'-deoxy-2'-fluorouridine-3'-phosphate
  modified_base 10: mod_base = OTHER; note = 2'-deoxy-2'-fluorocytidine-3'-phosphate
  modified_base 11: mod_base = OTHER; note = 2'-deoxy-2'-fluorocytidine-3'-phosphate
  modified_base 12: mod_base = OTHER; note = 2'-O-methyladenosine-3'-phosphate
  modified_base 13: mod_base = OTHER; note = 2'-O-methyladenosine-3'-phosphate
  modified_base 14: mod_base = OTHER; note = 2'-O-methyladenosine-3'-phosphate
  modified_base 15: mod_base = OTHER; note = 2'-O-methyladenosine-3'-phosphate
  modified_base 16: mod_base = OTHER; note = 2'-O-methylcytidine-3'-phosphate
  modified_base 17: mod_base = OTHER; note = 2'-O-methyladenosine-3'-phosphate
  modified_base 18: mod_base = OTHER; note = 2'-O-methyladenosine-3'-phosphate
  modified_base 19: mod_base = OTHER; note = 2'-O-methyladenosine-3'-phosphate
  modified_base 20: mod_base = OTHER; note = 2'-O-methyladenosine-3'-phosphate
  modified_base 21: mod_base = OTHER; note = 2'-O-methyladenosine
ggacgatgtccaaaacaaaaa

SEQ ID NO: 3544 - RNA, 21 nt, synthetic construct
  source 1..21: mol_type = other RNA
  modified_base 1: mod_base = OTHER; note = 2'-O-methylguanosine-3'-phosphate
  modified_base 2: mod_base = OTHER; note = 2'-O-methyladenosine-3'-phosphate
  modified_base 3: mod_base = OTHER; note = 2'-O-methylcytidine-3'-phosphate
  modified_base 4: mod_base = OTHER; note = 2'-O-methylguanosine-3'-phosphate
  modified_base 5: mod_base = OTHER; note = 2'-O-methyladenosine-3'-phosphate
  modified_base 6: mod_base = OTHER; note = 2'-O-methyluridine-3'-phosphate
  modified_base 7: mod_base = OTHER; note = 2'-deoxy-2'-fluoroguanosine-3'-phosphate
  modified_base 8: mod_base = OTHER; note = 2'-O-methyluridine-3'-phosphate
  modified_base 9: mod_base = OTHER; note = 2'-deoxy-2'-fluorocytidine-3'-phosphate
  modified_base 10: mod_base = OTHER; note = 2'-deoxy-2'-fluorocytidine-3'-phosphate
  modified_base 11: mod_base = OTHER; note = 2'-deoxy-2'-fluoroadenosine-3'-phosphate
  modified_base 12: mod_base = OTHER; note = 2'-O-methyladenosine-3'-phosphate
  modified_base 13: mod_base = OTHER; note = 2'-O-methyladenosine-3'-phosphate
  modified_base 14: mod_base = OTHER; note = 2'-O-methyladenosine-3'-phosphate
  modified_base 15: mod_base = OTHER; note = 2'-O-methylcytidine-3'-phosphate
  modified_base 16: mod_base = OTHER; note = 2'-O-methyladenosine-3'-phosphate
  modified_base 17: mod_base = OTHER; note = 2'-O-methyladenosine-3'-phosphate
  modified_base 18: mod_base = OTHER; note = 2'-O-methyladenosine-3'-phosphate
  modified_base 19: mod_base = OTHER; note = 2'-O-methyladenosine-3'-phosphate
  modified_base 20: mod_base = OTHER; note = 2'-O-methyladenosine-3'-phosphate
  modified_base 21: mod_base = OTHER; note = 2'-O-methyladenosine
gacgatgtccaaaacaaaaaa

SEQ ID NO: 3545 - RNA, 21 nt, synthetic construct
  source 1..21: mol_type = other RNA
  modified_base 1: mod_base = OTHER; note = 2'-O-methyladenosine-3'-phosphate
  modified_base 2: mod_base = OTHER; note = 2'-O-methylcytidine-3'-phosphate
  modified_base 3: mod_base = OTHER; note = 2'-O-methylguanosine-3'-phosphate
  modified_base 4: mod_base = OTHER; note = 2'-O-methyladenosine-3'-phosphate
  modified_base 5: mod_base = OTHER; note = 2'-O-methyluridine-3'-phosphate
  modified_base 6: mod_base = OTHER; note = 2'-O-methylguanosine-3'-phosphate
  modified_base 7: mod_base = OTHER; note = 2'-deoxy-2'-fluorouridine-3'-phosphate
  modified_base 8: mod_base = OTHER; note = 2'-O-methylcytidine-3'-phosphate
  modified_base 9: mod_base = OTHER; note = 2'-deoxy-2'-fluorocytidine-3'-phosphate
  modified_base 10: mod_base = OTHER; note = 2'-deoxy-2'-fluoroadenosine-3'-phosphate
  modified_base 11: mod_base = OTHER; note = 2'-deoxy-2'-fluoroadenosine-3'-phosphate
  modified_base 12: mod_base = OTHER; note = 2'-O-methyladenosine-3'-phosphate
  modified_base 13: mod_base = OTHER; note = 2'-O-methyladenosine-3'-phosphate
  modified_base 14: mod_base = OTHER; note = 2'-O-methylcytidine-3'-phosphate
  modified_base 15: mod_base = OTHER; note = 2'-O-methyladenosine-3'-phosphate
  modified_base 16: mod_base = OTHER; note = 2'-O-methyladenosine-3'-phosphate
  modified_base 17: mod_base = OTHER; note = 2'-O-methyladenosine-3'-phosphate
  modified_base 18: mod_base = OTHER; note = 2'-O-methyladenosine-3'-phosphate
  modified_base 19: mod_base = OTHER; note = 2'-O-methyladenosine-3'-phosphate
  modified_base 20: mod_base = OTHER; note = 2'-O-methyladenosine-3'-phosphate
  modified_base 21: mod_base = OTHER; note = 2'-O-methyladenosine
acgatgtccaaaacaaaaaaa

SEQ ID NO: 3546 - RNA, 21 nt, synthetic construct
  source 1..21: mol_type = other RNA
  modified_base 1: mod_base = OTHER; note = 2'-O-methylcytidine-3'-phosphate
  modified_base 2: mod_base = OTHER; note = 2'-O-methylguanosine-3'-phosphate
  modified_base 3: mod_base = OTHER; note = 2'-O-methyladenosine-3'-phosphate
  modified_base 4: mod_base = OTHER; note = 2'-O-methyluridine-3'-phosphate
  modified_base 5: mod_base = OTHER; note = 2'-O-methylguanosine-3'-phosphate
  modified_base 6: mod_base = OTHER; note = 2'-O-methyluridine-3'-phosphate
  modified_base 7: mod_base = OTHER; note = 2'-deoxy-2'-fluorocytidine-3'-phosphate
  modified_base 8: mod_base = OTHER; note = 2'-O-methylcytidine-3'-phosphate
  modified_base 9: mod_base = OTHER; note = 2'-deoxy-2'-fluoroadenosine-3'-phosphate
  modified_base 10: mod_base = OTHER; note = 2'-deoxy-2'-fluoroadenosine-3'-phosphate
  modified_base 11: mod_base = OTHER; note = 2'-deoxy-2'-fluoroadenosine-3'-phosphate
  modified_base 12: mod_base = OTHER; note = 2'-O-methyladenosine-3'-phosphate
  modified_base 13: mod_base = OTHER; note = 2'-O-methylcytidine-3'-phosphate
  modified_base 14: mod_base = OTHER; note = 2'-O-methyladenosine-3'-phosphate
  modified_base 15: mod_base = OTHER; note = 2'-O-methyladenosine-3'-phosphate
  modified_base 16: mod_base = OTHER; note = 2'-O-methyladenosine-3'-phosphate
  modified_base 17: mod_base = OTHER; note = 2'-O-methyladenosine-3'-phosphate
  modified_base 18: mod_base = OTHER; note = 2'-O-methyladenosine-3'-phosphate
  modified_base 19: mod_base = OTHER; note = 2'-O-methyladenosine-3'-phosphate
  modified_base 20: mod_base = OTHER; note = 2'-O-methyluridine-3'-phosphate
  modified_base 21: mod_base = OTHER; note = 2'-O-methyladenosine
cgatgtccaaaacaaaaaata

SEQ ID NO: 3547 - RNA, 21 nt, synthetic construct
  source 1..21: mol_type = other RNA
  modified_base 1: mod_base = OTHER; note = 2'-O-methylguanosine-3'-phosphate
  modified_base 2: mod_base = OTHER; note = 2'-O-methyladenosine-3'-phosphate
  modified_base 3: mod_base = OTHER; note = 2'-O-methyluridine-3'-phosphate
  modified_base 4: mod_base = OTHER; note = 2'-O-methylguanosine-3'-phosphate
  modified_base 5: mod_base = OTHER; note = 2'-O-methyluridine-3'-phosphate
  modified_base 6: mod_base = OTHER; note = 2'-O-methylcytidine-3'-phosphate
  modified_base 7: mod_base = OTHER; note = 2'-deoxy-2'-fluorocytidine-3'-phosphate
  modified_base 8: mod_base = OTHER; note = 2'-O-methyladenosine-3'-phosphate
  modified_base 9: mod_base = OTHER; note = 2'-deoxy-2'-fluoroadenosine-3'-phosphate
  modified_base 10: mod_base = OTHER; note = 2'-deoxy-2'-fluoroadenosine-3'-phosphate
  modified_base 11: mod_base = OTHER; note = 2'-deoxy-2'-fluoroadenosine-3'-phosphate
  modified_base 12: mod_base = OTHER; note = 2'-O-methylcytidine-3'-phosphate
  modified_base 13: mod_base = OTHER; note = 2'-O-methyladenosine-3'-phosphate
  modified_base 14: mod_base = OTHER; note = 2'-O-methyladenosine-3'-phosphate
  modified_base 15: mod_base = OTHER; note = 2'-O-methyladenosine-3'-phosphate
  modified_base 16: mod_base = OTHER; note = 2'-O-methyladenosine-3'-phosphate
  modified_base 17: mod_base = OTHER; note = 2'-O-methyladenosine-3'-phosphate
  modified_base 18: mod_base = OTHER; note = 2'-O-methyladenosine-3'-phosphate
  modified_base 19: mod_base = OTHER; note = 2'-O-methyluridine-3'-phosphate
  modified_base 20: mod_base = OTHER; note = 2'-O-methylguanosine-3'-phosphate
  modified_base 21: mod_base = OTHER; note = 2'-O-methyladenosine
gatgtccaaaacaaaaaatga

SEQ ID NO: 3548 - RNA, 21 nt, synthetic construct
  source 1..21: mol_type = other RNA
  modified_base 1: mod_base = OTHER; note = 2'-O-methyladenosine-3'-phosphate
  modified_base 2: mod_base = OTHER; note = 2'-O-methyluridine-3'-phosphate
  modified_base 3: mod_base = OTHER; note = 2'-O-methylguanosine-3'-phosphate
  modified_base 4: mod_base = OTHER; note = 2'-O-methyluridine-3'-phosphate
  modified_base 5: mod_base = OTHER; note = 2'-O-methylcytidine-3'-phosphate
  modified_base 6: mod_base = OTHER; note = 2'-O-methylcytidine-3'-phosphate
  modified_base 7: mod_base = OTHER; note = 2'-deoxy-2'-fluoroadenosine-3'-phosphate
  modified_base 8: mod_base = OTHER; note = 2'-O-methyladenosine-3'-phosphate
  modified_base 9: mod_base = OTHER; note = 2'-deoxy-2'-fluoroadenosine-3'-phosphate
  modified_base 10: mod_base = OTHER; note = 2'-deoxy-2'-fluoroadenosine-3'-phosphate
  modified_base 11: mod_base = OTHER; note = 2'-deoxy-2'-fluorocytidine-3'-phosphate
  modified_base 12: mod_base = OTHER; note = 2'-O-methyladenosine-3'-phosphate
  modified_base 13: mod_base = OTHER; note = 2'-O-methyladenosine-3'-phosphate
  modified_base 14: mod_base = OTHER; note = 2'-O-methyladenosine-3'-phosphate
  modified_base 15: mod_base = OTHER; note = 2'-O-methyladenosine-3'-phosphate
  modified_base 16: mod_base = OTHER; note = 2'-O-methyladenosine-3'-phosphate
  modified_base 17: mod_base = OTHER; note = 2'-O-methyladenosine-3'-phosphate
  modified_base 18: mod_base = OTHER; note = 2'-O-methyluridine-3'-phosphate
  modified_base 19: mod_base = OTHER; note = 2'-O-methylguanosine-3'-phosphate
  modified_base 20: mod_base = OTHER; note = 2'-O-methylguanosine-3'-phosphate
  modified_base 21: mod_base = OTHER; note = 2'-O-methyladenosine
atgtccaaaacaaaaaatgga

SEQ ID NO: 3549 - RNA, 21 nt, synthetic construct
  source 1..21: mol_type = other RNA
  modified_base 1: mod_base = OTHER; note = 2'-O-methylcytidine-3'-phosphate
  modified_base 2: mod_base = OTHER; note = 2'-O-methyladenosine-3'-phosphate
  modified_base 3: mod_base = OTHER; note = 2'-O-methylcytidine-3'-phosphate
  modified_base 4: mod_base = OTHER; note = 2'-O-methyladenosine-3'-phosphate
  modified_base 5: mod_base = OTHER; note = 2'-O-methylguanosine-3'-phosphate
  modified_base 6: mod_base = OTHER; note = 2'-O-methyladenosine-3'-phosphate
  modified_base 7: mod_base = OTHER; note = 2'-deoxy-2'-fluorocytidine-3'-phosphate
  modified_base 8: mod_base = OTHER; note = 2'-O-methylcytidine-3'-phosphate
  modified_base 9: mod_base = OTHER; note = 2'-deoxy-2'-fluorouridine-3'-phosphate
  modified_base 10: mod_base = OTHER; note = 2'-deoxy-2'-fluoroadenosine-3'-phosphate
  modified_base 11: mod_base = OTHER; note = 2'-deoxy-2'-fluoroguanosine-3'-phosphate
  modified_base 12: mod_base = OTHER; note = 2'-O-methyladenosine-3'-phosphate
  modified_base 13: mod_base = OTHER; note = 2'-O-methyluridine-3'-phosphate
  modified_base 14: mod_base = OTHER; note = 2'-O-methyluridine-3'-phosphate
  modified_base 15: mod_base = OTHER; note = 2'-O-methylcytidine-3'-phosphate
  modified_base 16: mod_base = OTHER; note = 2'-O-methyluridine-3'-phosphate
  modified_base 17: mod_base = OTHER; note = 2'-O-methylcytidine-3'-phosphate
  modified_base 18: mod_base = OTHER; note = 2'-O-methyladenosine-3'-phosphate
  modified_base 19: mod_base = OTHER; note = 2'-O-methylcytidine-3'-phosphate
  modified_base 20: mod_base = OTHER; note = 2'-O-methylcytidine-3'-phosphate
  modified_base 21: mod_base = OTHER; note = 2'-O-methyladenosine
cacagacctagattctcacca

SEQ ID NO: 3550 - RNA, 21 nt, synthetic construct
  source 1..21: mol_type = other RNA
  modified_base 1: mod_base = OTHER; note = 2'-O-methyladenosine-3'-phosphate
  modified_base 2: mod_base = OTHER; note = 2'-O-methylcytidine-3'-phosphate
  modified_base 3: mod_base = OTHER; note = 2'-O-methyladenosine-3'-phosphate
  modified_base 4: mod_base = OTHER; note = 2'-O-methylguanosine-3'-phosphate
  modified_base 5: mod_base = OTHER; note = 2'-O-methyladenosine-3'-phosphate
  modified_base 6: mod_base = OTHER; note = 2'-O-methylcytidine-3'-phosphate
  modified_base 7: mod_base = OTHER; note = 2'-deoxy-2'-fluorocytidine-3'-phosphate
  modified_base 8: mod_base = OTHER; note = 2'-O-methyluridine-3'-phosphate
  modified_base 9: mod_base = OTHER; note = 2'-deoxy-2'-fluoroadenosine-3'-phosphate
  modified_base 10: mod_base = OTHER; note = 2'-deoxy-2'-fluoroguanosine-3'-phosphate
  modified_base 11: mod_base = OTHER; note = 2'-deoxy-2'-fluoroadenosine-3'-phosphate
  modified_base 12: mod_base = OTHER; note = 2'-O-methyluridine-3'-phosphate
  modified_base 13: mod_base = OTHER; note = 2'-O-methyluridine-3'-phosphate
  modified_base 14: mod_base = OTHER; note = 2'-O-methylcytidine-3'-phosphate
  modified_base 15: mod_base = OTHER; note = 2'-O-methyluridine-3'-phosphate
  modified_base 16: mod_base = OTHER; note = 2'-O-methylcytidine-3'-phosphate
  modified_base 17: mod_base = OTHER; note = 2'-O-methyladenosine-3'-phosphate
  modified_base 18: mod_base = OTHER; note = 2'-O-methylcytidine-3'-phosphate
  modified_base 19: mod_base = OTHER; note = 2'-O-methylcytidine-3'-phosphate
  modified_base 20: mod_base = OTHER; note = 2'-O-methyluridine-3'-phosphate
  modified_base 21: mod_base = OTHER; note = 2'-O-methyladenosine
acagacctagattctcaccta

SEQ ID NO: 3551 - RNA, 21 nt, synthetic construct
  source 1..21: mol_type = other RNA
  modified_base 1: mod_base = OTHER; note = 2'-O-methylcytidine-3'-phosphate
  modified_base 2: mod_base = OTHER; note = 2'-O-methyladenosine-3'-phosphate
  modified_base 3: mod_base = OTHER; note = 2'-O-methylguanosine-3'-phosphate
  modified_base 4: mod_base = OTHER; note = 2'-O-methyladenosine-3'-phosphate
  modified_base 5: mod_base = OTHER; note = 2'-O-methylcytidine-3'-phosphate
  modified_base 6: mod_base = OTHER; note = 2'-O-methylcytidine-3'-phosphate
  modified_base 7: mod_base = OTHER; note = 2'-deoxy-2'-fluorouridine-3'-phosphate
  modified_base 8: mod_base = OTHER; note = 2'-O-methyladenosine-3'-phosphate
  modified_base 9: mod_base = OTHER; note = 2'-deoxy-2'-fluoroguanosine-3'-phosphate
  modified_base 10: mod_base = OTHER; note = 2'-deoxy-2'-fluoroadenosine-3'-phosphate
  modified_base 11: mod_base = OTHER; note = 2'-deoxy-2'-fluorouridine-3'-phosphate
  modified_base 12: mod_base = OTHER; note = 2'-O-methyluridine-3'-phosphate
  modified_base 13: mod_base = OTHER; note = 2'-O-methylcytidine-3'-phosphate
  modified_base 14: mod_base = OTHER; note = 2'-O-methyluridine-3'-phosphate
  modified_base 15: mod_base = OTHER; note = 2'-O-methylcytidine-3'-phosphate
  modified_base 16: mod_base = OTHER; note = 2'-O-methyladenosine-3'-phosphate
  modified_base 17: mod_base = OTHER; note = 2'-O-methylcytidine-3'-phosphate
  modified_base 18: mod_base = OTHER; note = 2'-O-methylcytidine-3'-phosphate
  modified_base 19: mod_base = OTHER; note = 2'-O-methyluridine-3'-phosphate
  modified_base 20: mod_base = OTHER; note = 2'-O-methylguanosine-3'-phosphate
  modified_base 21: mod_base = OTHER; note = 2'-O-methyladenosine
cagacctagattctcacctga

SEQ ID NO: 3552 - RNA, 21 nt, synthetic construct
  source 1..21: mol_type = other RNA
  modified_base 1: mod_base = OTHER; note = 2'-O-methylguanosine-3'-phosphate
  modified_base 2: mod_base = OTHER; note = 2'-O-methyladenosine-3'-phosphate
  modified_base 3: mod_base = OTHER; note = 2'-O-methylcytidine-3'-phosphate
  modified_base 4: mod_base = OTHER; note = 2'-O-methylcytidine-3'-phosphate
  modified_base 5: mod_base = OTHER; note = 2'-O-methyluridine-3'-phosphate
  modified_base 6: mod_base = OTHER; note = 2'-O-methyladenosine-3'-phosphate
  modified_base 7: mod_base = OTHER; note = 2'-deoxy-2'-fluoroguanosine-3'-phosphate
  modified_base 8: mod_base = OTHER; note = 2'-O-methyladenosine-3'-phosphate
  modified_base 9: mod_base = OTHER; note = 2'-deoxy-2'-fluorouridine-3'-phosphate
  modified_base 10: mod_base = OTHER; note = 2'-deoxy-2'-fluorouridine-3'-phosphate
  modified_base 11: mod_base = OTHER; note = 2'-deoxy-2'-fluorocytidine-3'-phosphate
  modified_base 12: mod_base = OTHER; note = 2'-O-methyluridine-3'-phosphate
  modified_base 13: mod_base = OTHER; note = 2'-O-methylcytidine-3'-phosphate
  modified_base 14: mod_base = OTHER; note = 2'-O-methyladenosine-3'-phosphate
  modified_base 15: mod_base = OTHER; note = 2'-O-methylcytidine-3'-phosphate
  modified_base 16: mod_base = OTHER; note = 2'-O-methylcytidine-3'-phosphate
  modified_base 17: mod_base = OTHER; note = 2'-O-methyluridine-3'-phosphate
  modified_base 18: mod_base = OTHER; note = 2'-O-methylguanosine-3'-phosphate
  modified_base 19: mod_base = OTHER; note = 2'-O-methylcytidine-3'-phosphate
  modified_base 20: mod_base = OTHER; note = 2'-O-methyluridine-3'-phosphate
  modified_base 21: mod_base = OTHER; note = 2'-O-methyladenosine
gacctagattctcacctgcta

SEQ ID NO: 3553 - RNA, 21 nt, synthetic construct
  source 1..21: mol_type = other RNA
  modified_base 1: mod_base = OTHER; note = 2'-O-methyladenosine-3'-phosphate
  modified_base 2: mod_base = OTHER; note = 2'-O-methylcytidine-3'-phosphate
  modified_base 3: mod_base = OTHER; note = 2'-O-methylcytidine-3'-phosphate
  modified_base 4: mod_base = OTHER; note = 2'-O-methyluridine-3'-phosphate
  modified_base 5: mod_base = OTHER; note = 2'-O-methyladenosine-3'-phosphate
  modified_base 6: mod_base = OTHER; note = 2'-O-methylguanosine-3'-phosphate
  modified_base 7: mod_base = OTHER; note = 2'-deoxy-2'-fluoroadenosine-3'-phosphate
  modified_base 8: mod_base = OTHER; note = 2'-O-methyluridine-3'-phosphate
  modified_base 9: mod_base = OTHER; note = 2'-deoxy-2'-fluorouridine-3'-phosphate
  modified_base 10: mod_base = OTHER; note = 2'-deoxy-2'-fluorocytidine-3'-phosphate
  modified_base 11: mod_base = OTHER; note = 2'-deoxy-2'-fluorouridine-3'-phosphate
  modified_base 12: mod_base = OTHER; note = 2'-O-methylcytidine-3'-phosphate
  modified_base 13: mod_base = OTHER; note = 2'-O-methyladenosine-3'-phosphate
  modified_base 14: mod_base = OTHER; note = 2'-O-methylcytidine-3'-phosphate
  modified_base 15: mod_base = OTHER; note = 2'-O-methylcytidine-3'-phosphate
  modified_base 16: mod_base = OTHER; note = 2'-O-methyluridine-3'-phosphate
  modified_base 17: mod_base = OTHER; note = 2'-O-methylguanosine-3'-phosphate
  modified_base 18: mod_base = OTHER; note = 2'-O-methylcytidine-3'-phosphate
  modified_base 19: mod_base = OTHER; note = 2'-O-methyluridine-3'-phosphate
  modified_base 20: mod_base = OTHER; note = 2'-O-methyladenosine-3'-phosphate
  modified_base 21: mod_base = OTHER; note = 2'-O-methyladenosine
acctagattctcacctgctaa

SEQ ID NO: 3554 - RNA, 21 nt, synthetic construct
  source 1..21: mol_type = other RNA
  modified_base 1: mod_base = OTHER; note = 2'-O-methylcytidine-3'-phosphate
  modified_base 2: mod_base = OTHER; note = 2'-O-methylcytidine-3'-phosphate
  modified_base 3: mod_base = OTHER; note = 2'-O-methyluridine-3'-phosphate
  modified_base 4: mod_base = OTHER; note = 2'-O-methyladenosine-3'-phosphate
  modified_base 5: mod_base = OTHER; note = 2'-O-methylguanosine-3'-phosphate
  modified_base 6: mod_base = OTHER; note = 2'-O-methyladenosine-3'-phosphate
  modified_base 7: mod_base = OTHER; note = 2'-deoxy-2'-fluorouridine-3'-phosphate
  modified_base 8: mod_base = OTHER; note = 2'-O-methyluridine-3'-phosphate
  modified_base 9: mod_base = OTHER; note = 2'-deoxy-2'-fluorocytidine-3'-phosphate
  modified_base 10: mod_base = OTHER; note = 2'-deoxy-2'-fluorouridine-3'-phosphate
  modified_base 11: mod_base = OTHER; note = 2'-deoxy-2'-fluorocytidine-3'-phosphate
  modified_base 12: mod_base = OTHER; note = 2'-O-methyladenosine-3'-phosphate
  modified_base 13: mod_base = OTHER; note = 2'-O-methylcytidine-3'-phosphate
  modified_base 14: mod_base = OTHER; note = 2'-O-methylcytidine-3'-phosphate
  modified_base 15: mod_base = OTHER; note = 2'-O-methyluridine-3'-phosphate
  modified_base 16: mod_base = OTHER; note = 2'-O-methylguanosine-3'-phosphate
  modified_base 17: mod_base = OTHER; note = 2'-O-methylcytidine-3'-phosphate
  modified_base 18: mod_base = OTHER; note = 2'-O-methyluridine-3'-phosphate
  modified_base 19: mod_base = OTHER; note = 2'-O-methyladenosine-3'-phosphate
  modified_base 20: mod_base = OTHER; note = 2'-O-methylcytidine-3'-phosphate
  modified_base 21: mod_base = OTHER; note = 2'-O-methyladenosine
cctagattctcacctgctaca

SEQ ID NO: 3555 - RNA, 21 nt, synthetic construct
  source 1..21: mol_type = other RNA
  modified_base 1: mod_base = OTHER; note = 2'-O-methylcytidine-3'-phosphate
  modified_base 2: mod_base = OTHER; note = 2'-O-methyluridine-3'-phosphate
  modified_base 3: mod_base = OTHER; note = 2'-O-methylcytidine-3'-phosphate
  modified_base 4: mod_base = OTHER; note = 2'-O-methyladenosine-3'-phosphate
  modified_base 5: mod_base = OTHER; note = 2'-O-methylguanosine-3'-phosphate
  modified_base 6: mod_base = OTHER; note = 2'-O-methyladenosine-3'-phosphate
  modified_base 7: mod_base = OTHER; note = 2'-deoxy-2'-fluoroguanosine-3'-phosphate
  modified_base 8: mod_base = OTHER; note = 2'-O-methylguanosine-3'-phosphate
  modified_base 9: mod_base = OTHER; note = 2'-deoxy-2'-fluoroguanosine-3'-phosphate
  modified_base 10: mod_base = OTHER; note = 2'-deoxy-2'-fluoroadenosine-3'-phosphate
  modified_base 11: mod_base = OTHER; note = 2'-deoxy-2'-fluorocytidine-3'-phosphate
  modified_base 12: mod_base = OTHER; note = 2'-O-methyluridine-3'-phosphate
  modified_base 13: mod_base = OTHER; note = 2'-O-methylguanosine-3'-phosphate
  modified_base 14: mod_base = OTHER; note = 2'-O-methylguanosine-3'-phosphate
  modified_base 15: mod_base = OTHER; note = 2'-O-methyladenosine-3'-phosphate
  modified_base 16: mod_base = OTHER; note = 2'-O-methylguanosine-3'-phosphate
  modified_base 17: mod_base = OTHER; note = 2'-O-methylguanosine-3'-phosphate
  modified_base 18: mod_base = OTHER; note = 2'-O-methyladenosine-3'-phosphate
  modified_base 19: mod_base = OTHER; note = 2'-O-methylguanosine-3'-phosphate
  modified_base 20: mod_base = OTHER; note = 2'-O-methyladenosine-3'-phosphate
  modified_base 21: mod_base = OTHER; note = 2'-O-methyladenosine
ctcagagggactggaggagaa

SEQ ID NO: 3556 - RNA, 21 nt, synthetic construct
  source 1..21: mol_type = other RNA
  modified_base 1: mod_base = OTHER; note = 2'-O-methyluridine-3'-phosphate
  modified_base 2: mod_base = OTHER; note = 2'-O-methylcytidine-3'-phosphate
  modified_base 3: mod_base = OTHER; note = 2'-O-methyladenosine-3'-phosphate
  modified_base 4: mod_base = OTHER; note = 2'-O-methylguanosine-3'-phosphate
  modified_base 5: mod_base = OTHER; note = 2'-O-methyladenosine-3'-phosphate
  modified_base 6: mod_base = OTHER; note = 2'-O-methylguanosine-3'-phosphate
  modified_base 7: mod_base = OTHER; note = 2'-deoxy-2'-fluoroguanosine-3'-phosphate
  modified_base 8: mod_base = OTHER; note = 2'-O-methylguanosine-3'-phosphate
  modified_base 9: mod_base = OTHER; note = 2'-deoxy-2'-fluoroadenosine-3'-phosphate
  modified_base 10: mod_base = OTHER; note = 2'-deoxy-2'-fluorocytidine-3'-phosphate
  modified_base 11: mod_base = OTHER; note = 2'-deoxy-2'-fluorouridine-3'-phosphate
  modified_base 12: mod_base = OTHER; note = 2'-O-methylguanosine-3'-phosphate
  modified_base 13: mod_base = OTHER; note = 2'-O-methylguanosine-3'-phosphate
  modified_base 14: mod_base = OTHER; note = 2'-O-methyladenosine-3'-phosphate
  modified_base 15: mod_base = OTHER; note = 2'-O-methylguanosine-3'-phosphate
  modified_base 16: mod_base = OTHER; note = 2'-O-methylguanosine-3'-phosphate
  modified_base 17: mod_base = OTHER; note = 2'-O-methyladenosine-3'-phosphate
  modified_base 18: mod_base = OTHER; note = 2'-O-methylguanosine-3'-phosphate
  modified_base 19: mod_base = OTHER; note = 2'-O-methyladenosine-3'-phosphate
  modified_base 20: mod_base = OTHER; note = 2'-O-methyladenosine-3'-phosphate
  modified_base 21: mod_base = OTHER; note = 2'-O-methyladenosine
tcagagggactggaggagaaa

SEQ ID NO: 3557 - RNA, 21 nt, synthetic construct
  source 1..21: mol_type = other RNA
  modified_base 1: mod_base = OTHER; note = 2'-O-methylcytidine-3'-phosphate
  modified_base 2: mod_base = OTHER; note = 2'-O-methyladenosine-3'-phosphate
  modified_base 3: mod_base = OTHER; note = 2'-O-methylguanosine-3'-phosphate
  modified_base 4: mod_base = OTHER; note = 2'-O-methyladenosine-3'-phosphate
  modified_base 5: mod_base = OTHER; note = 2'-O-methylguanosine-3'-phosphate
  modified_base 6: mod_base = OTHER; note = 2'-O-methylguanosine-3'-phosphate
  modified_base 7: mod_base = OTHER; note = 2'-deoxy-2'-fluoroguanosine-3'-phosphate
  modified_base 8: mod_base = OTHER; note = 2'-O-methyladenosine-3'-phosphate
  modified_base 9: mod_base = OTHER; note = 2'-deoxy-2'-fluorocytidine-3'-phosphate
  modified_base 10: mod_base = OTHER; note = 2'-deoxy-2'-fluorouridine-3'-phosphate
  modified_base 11: mod_base = OTHER; note = 2'-deoxy-2'-fluoroguanosine-3'-phosphate
  modified_base 12: mod_base = OTHER; note = 2'-O-methylguanosine-3'-phosphate
  modified_base 13: mod_base = OTHER; note = 2'-O-methyladenosine-3'-phosphate
  modified_base 14: mod_base = OTHER; note = 2'-O-methylguanosine-3'-phosphate
  modified_base 15: mod_base = OTHER; note = 2'-O-methylguanosine-3'-phosphate
  modified_base 16: mod_base = OTHER; note = 2'-O-methyladenosine-3'-phosphate
  modified_base 17: mod_base = OTHER; note = 2'-O-methylguanosine-3'-phosphate
  modified_base 18: mod_base = OTHER; note = 2'-O-methyladenosine-3'-phosphate
  modified_base 19: mod_base = OTHER; note = 2'-O-methyladenosine-3'-phosphate
  modified_base 20: mod_base = OTHER; note = 2'-O-methylcytidine-3'-phosphate
  modified_base 21: mod_base = OTHER; note = 2'-O-methyladenosine
cagagggactggaggagaaca

SEQ ID NO: 3558 - RNA, 21 nt, synthetic construct
  source 1..21: mol_type = other RNA
  modified_base 1: mod_base = OTHER; note = 2'-O-methyladenosine-3'-phosphate
  modified_base 2: mod_base = OTHER; note = 2'-O-methylguanosine-3'-phosphate
  modified_base 3: mod_base = OTHER; note = 2'-O-methyladenosine-3'-phosphate
  modified_base 4: mod_base = OTHER; note = 2'-O-methylguanosine-3'-phosphate
  modified_base 5: mod_base = OTHER; note = 2'-O-methylguanosine-3'-phosphate
  modified_base 6: mod_base = OTHER; note = 2'-O-methylguanosine-3'-phosphate
  modified_base 7: mod_base = OTHER; note = 2'-deoxy-2'-fluoroadenosine-3'-phosphate
  modified_base 8: mod_base = OTHER; note = 2'-O-methylcytidine-3'-phosphate
  modified_base 9: mod_base = OTHER; note = 2'-deoxy-2'-fluorouridine-3'-phosphate
  modified_base 10: mod_base = OTHER; note = 2'-deoxy-2'-fluoroguanosine-3'-phosphate
  modified_base 11: mod_base = OTHER; note = 2'-deoxy-2'-fluoroguanosine-3'-phosphate
  modified_base 12: mod_base = OTHER; note = 2'-O-methyladenosine-3'-phosphate
  modified_base 13: mod_base = OTHER; note = 2'-O-methylguanosine-3'-phosphate
  modified_base 14: mod_base = OTHER; note = 2'-O-methylguanosine-3'-phosphate
  modified_base 15: mod_base = OTHER; note = 2'-O-methyladenosine-3'-phosphate
  modified_base 16: mod_base = OTHER; note = 2'-O-methylguanosine-3'-phosphate
  modified_base 17: mod_base = OTHER; note = 2'-O-methyladenosine-3'-phosphate
  modified_base 18: mod_base = OTHER; note = 2'-O-methyladenosine-3'-phosphate
  modified_base 19: mod_base = OTHER; note = 2'-O-methylcytidine-3'-phosphate
  modified_base 20: mod_base = OTHER; note = 2'-O-methyluridine-3'-phosphate
  modified_base 21: mod_base = OTHER; note = 2'-O-methyladenosine
agagggactggaggagaacta

SEQ ID NO: 3559 - RNA, 21 nt, synthetic construct
  source 1..21: mol_type = other RNA
  modified_base 1: mod_base = OTHER; note = 2'-O-methylguanosine-3'-phosphate
  modified_base 2: mod_base = OTHER; note = 2'-O-methyladenosine-3'-phosphate
  modified_base 3: mod_base = OTHER; note = 2'-O-methylguanosine-3'-phosphate
  modified_base 4: mod_base = OTHER; note = 2'-O-methylguanosine-3'-phosphate
  modified_base 5: mod_base = OTHER; note = 2'-O-methylguanosine-3'-phosphate
  modified_base 6: mod_base = OTHER; note = 2'-O-methyladenosine-3'-phosphate
  modified_base 7: mod_base = OTHER; note = 2'-deoxy-2'-fluorocytidine-3'-phosphate
  modified_base 8: mod_base = OTHER; note = 2'-O-methyluridine-3'-phosphate
  modified_base 9: mod_base = OTHER; note = 2'-deoxy-2'-fluoroguanosine-3'-phosphate
  modified_base 10: mod_base = OTHER; note = 2'-deoxy-2'-fluoroguanosine-3'-phosphate
  modified_base 11: mod_base = OTHER; note = 2'-deoxy-2'-fluoroadenosine-3'-phosphate
  modified_base 12: mod_base = OTHER; note = 2'-O-methylguanosine-3'-phosphate
  modified_base 13: mod_base = OTHER; note = 2'-O-methylguanosine-3'-phosphate
  modified_base 14: mod_base = OTHER; note = 2'-O-methyladenosine-3'-phosphate
  modified_base 15: mod_base = OTHER; note = 2'-O-methylguanosine-3'-phosphate
  modified_base 16: mod_base = OTHER; note = 2'-O-methyladenosine-3'-phosphate
  modified_base 17: mod_base = OTHER; note = 2'-O-methyladenosine-3'-phosphate
  modified_base 18: mod_base = OTHER; note = 2'-O-methylcytidine-3'-phosphate
  modified_base 19: mod_base = OTHER; note = 2'-O-methyluridine-3'-phosphate
  modified_base 20: mod_base = OTHER; note = 2'-O-methyladenosine-3'-phosphate
  modified_base 21: mod_base = OTHER; note = 2'-O-methyladenosine
gagggactggaggagaactaa

SEQ ID NO: 3560 - RNA, 21 nt, synthetic construct
  source 1..21: mol_type = other RNA
  modified_base 1: mod_base = OTHER; note = 2'-O-methyladenosine-3'-phosphate
  modified_base 2: mod_base = OTHER; note = 2'-O-methylguanosine-3'-phosphate
  modified_base 3: mod_base = OTHER; note = 2'-O-methylguanosine-3'-phosphate
  modified_base 4: mod_base = OTHER; note = 2'-O-methylguanosine-3'-phosphate
  modified_base 5: mod_base = OTHER; note = 2'-O-methyladenosine-3'-phosphate
  modified_base 6: mod_base = OTHER; note = 2'-O-methylcytidine-3'-phosphate
  modified_base 7: mod_base = OTHER; note = 2'-deoxy-2'-fluorouridine-3'-phosphate
  modified_base 8: mod_base = OTHER; note = 2'-O-methylguanosine-3'-phosphate
  modified_base 9: mod_base = OTHER; note = 2'-deoxy-2'-fluoroguanosine-3'-phosphate
  modified_base 10: mod_base = OTHER; note = 2'-deoxy-2'-fluoroadenosine-3'-phosphate
  modified_base 11: mod_base = OTHER; note = 2'-deoxy-2'-fluoroguanosine-3'-phosphate
  modified_base 12: mod_base = OTHER; note = 2'-O-methylguanosine-3'-phosphate
  modified_base 13: mod_base = OTHER; note = 2'-O-methyladenosine-3'-phosphate
  modified_base 14: mod_base = OTHER; note = 2'-O-methylguanosine-3'-phosphate
  modified_base 15: mod_base = OTHER; note = 2'-O-methyladenosine-3'-phosphate
  modified_base 16: mod_base = OTHER; note = 2'-O-methyladenosine-3'-phosphate
  modified_base 17: mod_base = OTHER; note = 2'-O-methylcytidine-3'-phosphate
  modified_base 18: mod_base = OTHER; note = 2'-O-methyluridine-3'-phosphate
  modified_base 19: mod_base = OTHER; note = 2'-O-methyladenosine-3'-phosphate
  modified_base 20: mod_base = OTHER; note = 2'-O-methylcytidine-3'-phosphate
  modified_base 21: mod_base = OTHER; note = 2'-O-methyladenosine
agggactggaggagaactaca

SEQ ID NO: 3561 - RNA, 21 nt, synthetic construct
  source 1..21: mol_type = other RNA
  modified_base 1: mod_base = OTHER; note = 2'-O-methylguanosine-3'-phosphate
  modified_base 2: mod_base = OTHER; note = 2'-O-methylguanosine-3'-phosphate
  modified_base 3: mod_base = OTHER; note = 2'-O-methylguanosine-3'-phosphate
  modified_base 4: mod_base = OTHER; note = 2'-O-methyladenosine-3'-phosphate
  modified_base 5: mod_base = OTHER; note = 2'-O-methylcytidine-3'-phosphate
  modified_base 6: mod_base = OTHER; note = 2'-O-methyluridine-3'-phosphate
  modified_base 7: mod_base = OTHER; note = 2'-deoxy-2'-fluoroguanosine-3'-phosphate
  modified_base 8: mod_base = OTHER; note = 2'-O-methylguanosine-3'-phosphate
  modified_base 9: mod_base = OTHER; note = 2'-deoxy-2'-fluoroadenosine-3'-phosphate
  modified_base 10: mod_base = OTHER; note = 2'-deoxy-2'-fluoroguanosine-3'-phosphate
  modified_base 11: mod_base = OTHER; note = 2'-deoxy-2'-fluoroguanosine-3'-phosphate
  modified_base 12: mod_base = OTHER; note = 2'-O-methyladenosine-3'-phosphate
  modified_base 13: mod_base = OTHER; note = 2'-O-methylguanosine-3'-phosphate
  modified_base 14: mod_base = OTHER; note = 2'-O-methyladenosine-3'-phosphate
  modified_base 15: mod_base = OTHER; note = 2'-O-methyladenosine-3'-phosphate
  modified_base 16: mod_base = OTHER; note = 2'-O-methylcytidine-3'-phosphate
  modified_base 17: mod_base = OTHER; note = 2'-O-methyluridine-3'-phosphate
  modified_base 18: mod_base = OTHER; note = 2'-O-methyladenosine-3'-phosphate
  modified_base 19: mod_base = OTHER; note = 2'-O-methylcytidine-3'-phosphate
  modified_base 20: mod_base = OTHER; note = 2'-O-methyluridine-3'-phosphate
  modified_base 21: mod_base = OTHER; note = 2'-O-methyladenosine
gggactggaggagaactacta

SEQ ID NO: 3562 - RNA, 21 nt, synthetic construct
  source 1..21: mol_type = other RNA
  modified_base 1: mod_base = OTHER; note = 2'-O-methylguanosine-3'-phosphate
  modified_base 2: mod_base = OTHER; note = 2'-O-methylguanosine-3'-phosphate
  modified_base 3: mod_base = OTHER; note = 2'-O-methyladenosine-3'-phosphate
  modified_base 4: mod_base = OTHER; note = 2'-O-methylcytidine-3'-phosphate
  modified_base 5: mod_base = OTHER; note = 2'-O-methyluridine-3'-phosphate
  modified_base 6: mod_base = OTHER; note = 2'-O-methylguanosine-3'-phosphate
  modified_base 7: mod_base = OTHER; note = 2'-deoxy-2'-fluoroguanosine-3'-phosphate
  modified_base 8: mod_base = OTHER; note = 2'-O-methyladenosine-3'-phosphate
  modified_base 9: mod_base = OTHER; note = 2'-deoxy-2'-fluoroguanosine-3'-phosphate
  modified_base 10: mod_base = OTHER; note = 2'-deoxy-2'-fluoroguanosine-3'-phosphate
  modified_base 11: mod_base = OTHER; note = 2'-deoxy-2'-fluoroadenosine-3'-phosphate
  modified_base 12: mod_base = OTHER; note = 2'-O-methylguanosine-3'-phosphate
  modified_base 13: mod_base = OTHER; note = 2'-O-methyladenosine-3'-phosphate
  modified_base 14: mod_base = OTHER; note = 2'-O-methyladenosine-3'-phosphate
  modified_base 15: mod_base = OTHER; note = 2'-O-methylcytidine-3'-phosphate
  modified_base 16: mod_base = OTHER; note = 2'-O-methyluridine-3'-phosphate
  modified_base 17: mod_base = OTHER; note = 2'-O-methyladenosine-3'-phosphate
  modified_base 18: mod_base = OTHER; note = 2'-O-methylcytidine-3'-phosphate
  modified_base 19: mod_base = OTHER; note = 2'-O-methyluridine-3'-phosphate
  modified_base 20: mod_base = OTHER; note = 2'-O-methylguanosine-3'-phosphate
  modified_base 21: mod_base = OTHER; note = 2'-O-methyladenosine
ggactggaggagaactactga

SEQ ID NO: 3563 - RNA, 21 nt, synthetic construct
  source 1..21: mol_type = other RNA
  modified_base 1: mod_base = OTHER; note = 2'-O-methyladenosine-3'-phosphate
  modified_base 2: mod_base = OTHER; note = 2'-O-methylcytidine-3'-phosphate
  modified_base 3: mod_base = OTHER; note = 2'-O-methyluridine-3'-phosphate
  modified_base 4: mod_base = OTHER; note = 2'-O-methylguanosine-3'-phosphate
  modified_base 5: mod_base = OTHER; note = 2'-O-methylguanosine-3'-phosphate
  modified_base 6: mod_base = OTHER; note = 2'-O-methyladenosine-3'-phosphate
  modified_base 7: mod_base = OTHER; note = 2'-deoxy-2'-fluoroguanosine-3'-phosphate
  modified_base 8: mod_base = OTHER; note = 2'-O-methylguanosine-3'-phosphate
  modified_base 9: mod_base = OTHER; note = 2'-deoxy-2'-fluoroadenosine-3'-phosphate
  modified_base 10: mod_base = OTHER; note = 2'-deoxy-2'-fluoroguanosine-3'-phosphate
  modified_base 11: mod_base = OTHER; note = 2'-deoxy-2'-fluoroadenosine-3'-phosphate
  modified_base 12: mod_base = OTHER; note = 2'-O-methyladenosine-3'-phosphate
  modified_base 13: mod_base = OTHER; note = 2'-O-methylcytidine-3'-phosphate
  modified_base 14: mod_base = OTHER; note = 2'-O-methyluridine-3'-phosphate
  modified_base 15: mod_base = OTHER; note = 2'-O-methyladenosine-3'-phosphate
  modified_base 16: mod_base = OTHER; note = 2'-O-methylcytidine-3'-phosphate
  modified_base 17: mod_base = OTHER; note = 2'-O-methyluridine-3'-phosphate
  modified_base 18: mod_base = OTHER; note = 2'-O-methylguanosine-3'-phosphate
  modified_base 19: mod_base = OTHER; note = 2'-O-methylcytidine-3'-phosphate
  modified_base 20: mod_base = OTHER; note = 2'-O-methyladenosine-3'-phosphate
  modified_base 21: mod_base = OTHER; note = 2'-O-methyladenosine
actggaggagaactactgcaa

SEQ ID NO: 3564 - RNA, 21 nt, synthetic construct
  source 1..21: mol_type = other RNA
  modified_base 1: mod_base = OTHER; note = 2'-O-methylcytidine-3'-phosphate
  modified_base 2: mod_base = OTHER; note = 2'-O-methyluridine-3'-phosphate
  modified_base 3: mod_base = OTHER; note = 2'-O-methylguanosine-3'-phosphate
  modified_base 4: mod_base = OTHER; note = 2'-O-methylguanosine-3'-phosphate
  modified_base 5: mod_base = OTHER; note = 2'-O-methyladenosine-3'-phosphate
  modified_base 6: mod_base = OTHER; note = 2'-O-methylguanosine-3'-phosphate
  modified_base 7: mod_base = OTHER; note = 2'-deoxy-2'-fluoroguanosine-3'-phosphate
  modified_base 8: mod_base = OTHER; note = 2'-O-methyladenosine-3'-phosphate
  modified_base 9: mod_base = OTHER; note = 2'-deoxy-2'-fluoroguanosine-3'-phosphate
  modified_base 10: mod_base = OTHER; note = 2'-deoxy-2'-fluoroadenosine-3'-phosphate
  modified_base 11: mod_base = OTHER; note = 2'-deoxy-2'-fluoroadenosine-3'-phosphate
  modified_base 12: mod_base = OTHER; note = 2'-O-methylcytidine-3'-phosphate
  modified_base 13: mod_base = OTHER; note = 2'-O-methyluridine-3'-phosphate
  modified_base 14: mod_base = OTHER; note = 2'-O-methyladenosine-3'-phosphate
  modified_base 15: mod_base = OTHER; note = 2'-O-methylcytidine-3'-phosphate
  modified_base 16: mod_base = OTHER; note = 2'-O-methyluridine-3'-phosphate
  modified_base 17: mod_base = OTHER; note = 2'-O-methylguanosine-3'-phosphate
  modified_base 18: mod_base = OTHER; note = 2'-O-methylcytidine-3'-phosphate
  modified_base 19: mod_base = OTHER; note = 2'-O-methyladenosine-3'-phosphate
  modified_base 20: mod_base = OTHER; note = 2'-O-methylguanosine-3'-phosphate
  modified_base 21: mod_base = OTHER; note = 2'-O-methyladenosine
ctggaggagaactactgcaga

SEQ ID NO: 3565 - RNA, 21 nt, synthetic construct
  source 1..21: mol_type = other RNA
  modified_base 1: mod_base = OTHER; note = 2'-O-methyluridine-3'-phosphate
  modified_base 2: mod_base = OTHER; note = 2'-O-methylguanosine-3'-phosphate
  modified_base 3: mod_base = OTHER; note = 2'-O-methylguanosine-3'-phosphate
  modified_base 4: mod_base = OTHER; note = 2'-O-methyladenosine-3'-phosphate
  modified_base 5: mod_base = OTHER; note = 2'-O-methylguanosine-3'-phosphate
  modified_base 6: mod_base = OTHER; note = 2'-O-methylguanosine-3'-phosphate
  modified_base 7: mod_base = OTHER; note = 2'-deoxy-2'-fluoroadenosine-3'-phosphate
  modified_base 8: mod_base = OTHER; note = 2'-O-methylguanosine-3'-phosphate
  modified_base 9: mod_base = OTHER; note = 2'-deoxy-2'-fluoroadenosine-3'-phosphate
  modified_base 10: mod_base = OTHER; note = 2'-deoxy-2'-fluoroadenosine-3'-phosphate
  modified_base 11: mod_base = OTHER; note = 2'-deoxy-2'-fluorocytidine-3'-phosphate
  modified_base 12: mod_base = OTHER; note = 2'-O-methyluridine-3'-phosphate
  modified_base 13: mod_base = OTHER; note = 2'-O-methyladenosine-3'-phosphate
  modified_base 14: mod_base = OTHER; note = 2'-O-methylcytidine-3'-phosphate
  modified_base 15: mod_base = OTHER; note = 2'-O-methyluridine-3'-phosphate
  modified_base 16: mod_base = OTHER; note = 2'-O-methylguanosine-3'-phosphate
  modified_base 17: mod_base = OTHER; note = 2'-O-methylcytidine-3'-phosphate
  modified_base 18: mod_base = OTHER; note = 2'-O-methyladenosine-3'-phosphate
  modified_base 19: mod_base = OTHER; note = 2'-O-methylguanosine-3'-phosphate
  modified_base 20: mod_base = OTHER; note = 2'-O-methylguanosine-3'-phosphate
  modified_base 21: mod_base = OTHER; note = 2'-O-methyladenosine
tggaggagaactactgcagga

SEQ ID NO: 3566 - RNA, 21 nt, synthetic construct
  source 1..21: mol_type = other RNA
  modified_base 1: mod_base = OTHER; note = 2'-O-methylguanosine-3'-phosphate
  modified_base 2: mod_base = OTHER; note = 2'-O-methyladenosine-3'-phosphate
  modified_base 3: mod_base = OTHER; note = 2'-O-methylguanosine-3'-phosphate
  modified_base 4: mod_base = OTHER; note = 2'-O-methylguanosine-3'-phosphate
  modified_base 5: mod_base = OTHER; note = 2'-O-methyladenosine-3'-phosphate
  modified_base 6: mod_base = OTHER; note = 2'-O-methylguanosine-3'-phosphate
  modified_base 7: mod_base = OTHER; note = 2'-deoxy-2'-fluoroadenosine-3'-phosphate
  modified_base 8: mod_base = OTHER; note = 2'-O-methyladenosine-3'-phosphate
  modified_base 9: mod_base = OTHER; note = 2'-deoxy-2'-fluorocytidine-3'-phosphate
  modified_base 10: mod_base = OTHER; note = 2'-deoxy-2'-fluorouridine-3'-phosphate
  modified_base 11: mod_base = OTHER; note = 2'-deoxy-2'-fluoroadenosine-3'-phosphate
  modified_base 12: mod_base = OTHER; note = 2'-O-methylcytidine-3'-phosphate
  modified_base 13: mod_base = OTHER; note = 2'-O-methyluridine-3'-phosphate
  modified_base 14: mod_base = OTHER; note = 2'-O-methylguanosine-3'-phosphate
  modified_base 15: mod_base = OTHER; note = 2'-O-methylcytidine-3'-phosphate
  modified_base 16: mod_base = OTHER; note = 2'-O-methyladenosine-3'-phosphate
  modified_base 17: mod_base = OTHER; note = 2'-O-methylguanosine-3'-phosphate
  modified_base 18: mod_base = OTHER; note = 2'-O-methylguanosine-3'-phosphate
  modified_base 19: mod_base = OTHER; note = 2'-O-methyladenosine-3'-phosphate
  modified_base 20: mod_base = OTHER; note = 2'-O-methyladenosine-3'-phosphate
  modified_base 21: mod_base = OTHER; note = 2'-O-methyladenosine
gaggagaactactgcaggaaa

SEQ ID NO: 3567 - RNA, 21 nt, synthetic construct
  source 1..21: mol_type = other RNA
  modified_base 1: mod_base = OTHER; note = 2'-O-methyladenosine-3'-phosphate
  modified_base 2: mod_base = OTHER; note = 2'-O-methyladenosine-3'-phosphate
  modified_base 3: mod_base = OTHER; note = 2'-O-methyluridine-3'-phosphate
  modified_base 4: mod_base = OTHER; note = 2'-O-methylcytidine-3'-phosphate
  modified_base 5: mod_base = OTHER; note = 2'-O-methylcytidine-3'-phosphate
  modified_base 6: mod_base = OTHER; note = 2'-O-methyladenosine-3'-phosphate
  modified_base 7: mod_base = OTHER; note = 2'-deoxy-2'-fluoroguanosine-3'-phosphate
  modified_base 8: mod_base = OTHER; note = 2'-O-methyladenosine-3'-phosphate
  modified_base 9: mod_base = OTHER; note = 2'-deoxy-2'-fluorocytidine-3'-phosphate
  modified_base 10: mod_base = OTHER; note = 2'-deoxy-2'-fluoroadenosine-3'-phosphate
  modified_base 11: mod_base = OTHER; note = 2'-deoxy-2'-fluoroadenosine-3'-phosphate
  modified_base 12: mod_base = OTHER; note = 2'-O-methylcytidine-3'-phosphate
  modified_base 13: mod_base = OTHER; note = 2'-O-methylguanosine-3'-phosphate
  modified_base 14: mod_base = OTHER; note = 2'-O-methyladenosine-3'-phosphate
  modified_base 15: mod_base = OTHER; note = 2'-O-methyluridine-3'-phosphate
  modified_base 16: mod_base = OTHER; note = 2'-O-methylcytidine-3'-phosphate
  modified_base 17: mod_base = OTHER; note = 2'-O-methylcytidine-3'-phosphate
  modified_base 18: mod_base = OTHER; note = 2'-O-methylguanosine-3'-phosphate
  modified_base 19: mod_base = OTHER; note = 2'-O-methylcytidine-3'-phosphate
  modified_base 20: mod_base = OTHER; note = 2'-O-methyladenosine-3'-phosphate
  modified_base 21: mod_base = OTHER; note = 2'-O-methyladenosine
aatccagacaacgatccgcaa

SEQ ID NO: 3568 - RNA, 21 nt, synthetic construct
  source 1..21: mol_type = other RNA
  modified_base 1: mod_base = OTHER; note = 2'-O-methyluridine-3'-phosphate
  modified_base 2: mod_base = OTHER; note = 2'-O-methylcytidine-3'-phosphate
  modified_base 3: mod_base = OTHER; note = 2'-O-methylcytidine-3'-phosphate
  modified_base 4: mod_base = OTHER; note = 2'-O-methyladenosine-3'-phosphate
  modified_base 5: mod_base = OTHER; note = 2'-O-methylguanosine-3'-phosphate
  modified_base 6: mod_base = OTHER; note = 2'-O-methyladenosine-3'-phosphate
  modified_base 7: mod_base = OTHER; note = 2'-deoxy-2'-fluorocytidine-3'-phosphate
  modified_base 8: mod_base = OTHER; note = 2'-O-methyladenosine-3'-phosphate
  modified_base 9: mod_base = OTHER; note = 2'-deoxy-2'-fluoroadenosine-3'-phosphate
  modified_base 10: mod_base = OTHER; note = 2'-deoxy-2'-fluorocytidine-3'-phosphate
  modified_base 11: mod_base = OTHER; note = 2'-deoxy-2'-fluoroguanosine-3'-phosphate
  modified_base 12: mod_base = OTHER; note = 2'-O-methyladenosine-3'-phosphate
  modified_base 13: mod_base = OTHER; note = 2'-O-methyluridine-3'-phosphate
  modified_base 14: mod_base = OTHER; note = 2'-O-methylcytidine-3'-phosphate
  modified_base 15: mod_base = OTHER; note = 2'-O-methylcytidine-3'-phosphate
  modified_base 16: mod_base = OTHER; note = 2'-O-methylguanosine-3'-phosphate
  modified_base 17: mod_base = OTHER; note = 2'-O-methylcytidine-3'-phosphate
  modified_base 18: mod_base = OTHER; note = 2'-O-methyladenosine-3'-phosphate
  modified_base 19: mod_base = OTHER; note = 2'-O-methylguanosine-3'-phosphate
  modified_base 20: mod_base = OTHER; note = 2'-O-methylguanosine-3'-phosphate
  modified_base 21: mod_base = OTHER; note = 2'-O-methyladenosine
tccagacaacgatccgcagga

SEQ ID NO: 3569 - RNA, 21 nt, synthetic construct
  source 1..21: mol_type = other RNA
  modified_base 1: mod_base = OTHER; note = 2'-O-methyluridine-3'-phosphate
  modified_base 2: mod_base = OTHER; note = 2'-O-methylguanosine-3'-phosphate
  modified_base 3: mod_base = OTHER; note = 2'-O-methylcytidine-3'-phosphate
  modified_base 4: mod_base = OTHER; note = 2'-O-methyluridine-3'-phosphate
  modified_base 5: mod_base = OTHER; note = 2'-O-methyladenosine-3'-phosphate
  modified_base 6: mod_base = OTHER; note = 2'-O-methyluridine-3'-phosphate
  modified_base 7: mod_base = OTHER; note = 2'-deoxy-2'-fluoroadenosine-3'-phosphate
  modified_base 8: mod_base = OTHER; note = 2'-O-methylcytidine-3'-phosphate
  modified_base 9: mod_base = OTHER; note = 2'-deoxy-2'-fluorouridine-3'-phosphate
  modified_base 10: mod_base = OTHER; note = 2'-deoxy-2'-fluoroadenosine-3'-phosphate
  modified_base 11: mod_base = OTHER; note = 2'-deoxy-2'-fluorocytidine-3'-phosphate
  modified_base 12: mod_base = OTHER; note = 2'-O-methyluridine-3'-phosphate
  modified_base 13: mod_base = OTHER; note = 2'-O-methylguanosine-3'-phosphate
  modified_base 14: mod_base = OTHER; note = 2'-O-methyladenosine-3'-phosphate
  modified_base 15: mod_base = OTHER; note = 2'-O-methyluridine-3'-phosphate
  modified_base 16: mod_base = OTHER; note = 2'-O-methylcytidine-3'-phosphate
  modified_base 17: mod_base = OTHER; note = 2'-O-methylcytidine-3'-phosphate
  modified_base 18: mod_base = OTHER; note = 2'-O-methyladenosine-3'-phosphate
  modified_base 19: mod_base = OTHER; note = 2'-O-methylguanosine-3'-phosphate
  modified_base 20: mod_base = OTHER; note = 2'-O-methyladenosine-3'-phosphate
  modified_base 21: mod_base = OTHER; note = 2'-O-methyladenosine
tgctatactactgatccagaa

SEQ ID NO: 3570 - RNA, 21 nt, synthetic construct
  source 1..21: mol_type = other RNA
  modified_base 1: mod_base = OTHER; note = 2'-O-methylguanosine-3'-phosphate
  modified_base 2: mod_base = OTHER; note = 2'-O-methylcytidine-3'-phosphate
  modified_base 3: mod_base = OTHER; note = 2'-O-methyluridine-3'-phosphate
  modified_base 4: mod_base = OTHER; note = 2'-O-methyladenosine-3'-phosphate
  modified_base 5: mod_base = OTHER; note = 2'-O-methyluridine-3'-phosphate
  modified_base 6: mod_base = OTHER; note = 2'-O-methyladenosine-3'-phosphate
  modified_base 7: mod_base = OTHER; note = 2'-deoxy-2'-fluorocytidine-3'-phosphate
  modified_base 8: mod_base = OTHER; note = 2'-O-methyluridine-3'-phosphate
  modified_base 9: mod_base = OTHER; note = 2'-deoxy-2'-fluoroadenosine-3'-phosphate
  modified_base 10: mod_base = OTHER; note = 2'-deoxy-2'-fluorocytidine-3'-phosphate
  modified_base 11: mod_base = OTHER; note = 2'-deoxy-2'-fluorouridine-3'-phosphate
  modified_base 12: mod_base = OTHER; note = 2'-O-methylguanosine-3'-phosphate
  modified_base 13: mod_base = OTHER; note = 2'-O-methyladenosine-3'-phosphate
  modified_base 14: mod_base = OTHER; note = 2'-O-methyluridine-3'-phosphate
  modified_base 15: mod_base = OTHER; note = 2'-O-methylcytidine-3'-phosphate
  modified_base 16: mod_base = OTHER; note = 2'-O-methylcytidine-3'-phosphate
  modified_base 17: mod_base = OTHER; note = 2'-O-methyladenosine-3'-phosphate
  modified_base 18: mod_base = OTHER; note = 2'-O-methylguanosine-3'-phosphate
  modified_base 19: mod_base = OTHER; note = 2'-O-methyladenosine-3'-phosphate
  modified_base 20: mod_base = OTHER; note = 2'-O-methyladenosine-3'-phosphate
  modified_base 21: mod_base = OTHER; note = 2'-O-methyladenosine
gctatactactgatccagaaa

SEQ ID NO: 3571 - RNA, 21 nt, synthetic construct
  source 1..21: mol_type = other RNA
  modified_base 1: mod_base = OTHER; note = 2'-O-methylcytidine-3'-phosphate
  modified_base 2: mod_base = OTHER; note = 2'-O-methyluridine-3'-phosphate
  modified_base 3: mod_base = OTHER; note = 2'-O-methyladenosine-3'-phosphate
  modified_base 4: mod_base = OTHER; note = 2'-O-methyluridine-3'-phosphate
  modified_base 5: mod_base = OTHER; note = 2'-O-methyladenosine-3'-phosphate
  modified_base 6: mod_base = OTHER; note = 2'-O-methylcytidine-3'-phosphate
  modified_base 7: mod_base = OTHER; note = 2'-deoxy-2'-fluorouridine-3'-phosphate
  modified_base 8: mod_base = OTHER; note = 2'-O-methyladenosine-3'-phosphate
  modified_base 9: mod_base = OTHER; note = 2'-deoxy-2'-fluorocytidine-3'-phosphate
  modified_base 10: mod_base = OTHER; note = 2'-deoxy-2'-fluorouridine-3'-phosphate
  modified_base 11: mod_base = OTHER; note = 2'-deoxy-2'-fluoroguanosine-3'-phosphate
  modified_base 12: mod_base = OTHER; note = 2'-O-methyladenosine-3'-phosphate
  modified_base 13: mod_base = OTHER; note = 2'-O-methyluridine-3'-phosphate
  modified_base 14: mod_base = OTHER; note = 2'-O-methylcytidine-3'-phosphate
  modified_base 15: mod_base = OTHER; note = 2'-O-methylcytidine-3'-phosphate
  modified_base 16: mod_base = OTHER; note = 2'-O-methyladenosine-3'-phosphate
  modified_base 17: mod_base = OTHER; note = 2'-O-methylguanosine-3'-phosphate
  modified_base 18: mod_base = OTHER; note = 2'-O-methyladenosine-3'-phosphate
  modified_base 19: mod_base = OTHER; note = 2'-O-methyladenosine-3'-phosphate
  modified_base 20: mod_base = OTHER; note = 2'-O-methyladenosine-3'-phosphate
  modified_base 21: mod_base = OTHER; note = 2'-O-methyladenosine
ctatactactgatccagaaaa

SEQ ID NO: 3572 - RNA, 21 nt, synthetic construct
  source 1..21: mol_type = other RNA
  modified_base 1: mod_base = OTHER; note = 2'-O-methyluridine-3'-phosphate
  modified_base 2: mod_base = OTHER; note = 2'-O-methyladenosine-3'-phosphate
  modified_base 3: mod_base = OTHER; note = 2'-O-methyluridine-3'-phosphate
  modified_base 4: mod_base = OTHER; note = 2'-O-methyladenosine-3'-phosphate
  modified_base 5: mod_base = OTHER; note = 2'-O-methylcytidine-3'-phosphate
  modified_base 6: mod_base = OTHER; note = 2'-O-methyluridine-3'-phosphate
  modified_base 7: mod_base = OTHER; note = 2'-deoxy-2'-fluoroadenosine-3'-phosphate
  modified_base 8: mod_base = OTHER; note = 2'-O-methylcytidine-3'-phosphate
  modified_base 9: mod_base = OTHER; note = 2'-deoxy-2'-fluorouridine-3'-phosphate
  modified_base 10: mod_base = OTHER; note = 2'-deoxy-2'-fluoroguanosine-3'-phosphate
  modified_base 11: mod_base = OTHER; note = 2'-deoxy-2'-fluoroadenosine-3'-phosphate
  modified_base 12: mod_base = OTHER; note = 2'-O-methyluridine-3'-phosphate
  modified_base 13: mod_base = OTHER; note = 2'-O-methylcytidine-3'-phosphate
  modified_base 14: mod_base = OTHER; note = 2'-O-methylcytidine-3'-phosphate
  modified_base 15: mod_base = OTHER; note = 2'-O-methyladenosine-3'-phosphate
  modified_base 16: mod_base = OTHER; note = 2'-O-methylguanosine-3'-phosphate
  modified_base 17: mod_base = OTHER; note = 2'-O-methyladenosine-3'-phosphate
  modified_base 18: mod_base = OTHER; note = 2'-O-methyladenosine-3'-phosphate
  modified_base 19: mod_base = OTHER; note = 2'-O-methyladenosine-3'-phosphate
  modified_base 20: mod_base = OTHER; note = 2'-O-methyladenosine-3'-phosphate
  modified_base 21: mod_base = OTHER; note = 2'-O-methyladenosine
tatactactgatccagaaaaa

SEQ ID NO: 3573 - RNA, 21 nt, synthetic construct
  source 1..21: mol_type = other RNA
  modified_base 1: mod_base = OTHER; note = 2'-O-methyladenosine-3'-phosphate
  modified_base 2: mod_base = OTHER; note = 2'-O-methyluridine-3'-phosphate
  modified_base 3: mod_base = OTHER; note = 2'-O-methyladenosine-3'-phosphate
  modified_base 4: mod_base = OTHER; note = 2'-O-methylcytidine-3'-phosphate
  modified_base 5: mod_base = OTHER; note = 2'-O-methyluridine-3'-phosphate
  modified_base 6: mod_base = OTHER; note = 2'-O-methyladenosine-3'-phosphate
  modified_base 7: mod_base = OTHER; note = 2'-deoxy-2'-fluorocytidine-3'-phosphate
  modified_base 8: mod_base = OTHER; note = 2'-O-methyluridine-3'-phosphate
  modified_base 9: mod_base = OTHER; note = 2'-deoxy-2'-fluoroguanosine-3'-phosphate
  modified_base 10: mod_base = OTHER; note = 2'-deoxy-2'-fluoroadenosine-3'-phosphate
  modified_base 11: mod_base = OTHER; note = 2'-deoxy-2'-fluorouridine-3'-phosphate
  modified_base 12: mod_base = OTHER; note = 2'-O-methylcytidine-3'-phosphate
  modified_base 13: mod_base = OTHER; note = 2'-O-methylcytidine-3'-phosphate
  modified_base 14: mod_base = OTHER; note = 2'-O-methyladenosine-3'-phosphate
  modified_base 15: mod_base = OTHER; note = 2'-O-methylguanosine-3'-phosphate
  modified_base 16: mod_base = OTHER; note = 2'-O-methyladenosine-3'-phosphate
  modified_base 17: mod_base = OTHER; note = 2'-O-methyladenosine-3'-phosphate
  modified_base 18: mod_base = OTHER; note = 2'-O-methyladenosine-3'-phosphate
  modified_base 19: mod_base = OTHER; note = 2'-O-methyladenosine-3'-phosphate
  modified_base 20: mod_base = OTHER; note = 2'-O-methylguanosine-3'-phosphate
  modified_base 21: mod_base = OTHER; note = 2'-O-methyladenosine
atactactgatccagaaaaga

SEQ ID NO: 3574 - RNA, 21 nt, synthetic construct
  source 1..21: mol_type = other RNA
  modified_base 1: mod_base = OTHER; note = 2'-O-methyluridine-3'-phosphate
  modified_base 2: mod_base = OTHER; note = 2'-O-methyladenosine-3'-phosphate
  modified_base 3: mod_base = OTHER; note = 2'-O-methylcytidine-3'-phosphate
  modified_base 4: mod_base = OTHER; note = 2'-O-methyluridine-3'-phosphate
  modified_base 5: mod_base = OTHER; note = 2'-O-methyladenosine-3'-phosphate
  modified_base 6: mod_base = OTHER; note = 2'-O-methylcytidine-3'-phosphate
  modified_base 7: mod_base = OTHER; note = 2'-deoxy-2'-fluorouridine-3'-phosphate
  modified_base 8: mod_base = OTHER; note = 2'-O-methylguanosine-3'-phosphate
  modified_base 9: mod_base = OTHER; note = 2'-deoxy-2'-fluoroadenosine-3'-phosphate
  modified_base 10: mod_base = OTHER; note = 2'-deoxy-2'-fluorouridine-3'-phosphate
  modified_base 11: mod_base = OTHER; note = 2'-deoxy-2'-fluorocytidine-3'-phosphate
  modified_base 12: mod_base = OTHER; note = 2'-O-methylcytidine-3'-phosphate
  modified_base 13: mod_base = OTHER; note = 2'-O-methyladenosine-3'-phosphate
  modified_base 14: mod_base = OTHER; note = 2'-O-methylguanosine-3'-phosphate
  modified_base 15: mod_base = OTHER; note = 2'-O-methyladenosine-3'-phosphate
  modified_base 16: mod_base = OTHER; note = 2'-O-methyladenosine-3'-phosphate
  modified_base 17: mod_base = OTHER; note = 2'-O-methyladenosine-3'-phosphate
  modified_base 18: mod_base = OTHER; note = 2'-O-methyladenosine-3'-phosphate
  modified_base 19: mod_base = OTHER; note = 2'-O-methylguanosine-3'-phosphate
  modified_base 20: mod_base = OTHER; note = 2'-O-methyladenosine-3'-phosphate
  modified_base 21: mod_base = OTHER; note = 2'-O-methyladenosine
tactactgatccagaaaagaa

SEQ ID NO: 3575 - RNA, 21 nt, synthetic construct
  source 1..21: mol_type = other RNA
  modified_base 1: mod_base = OTHER; note = 2'-O-methyladenosine-3'-phosphate
  modified_base 2: mod_base = OTHER; note = 2'-O-methylcytidine-3'-phosphate
  modified_base 3: mod_base = OTHER; note = 2'-O-methyluridine-3'-phosphate
  modified_base 4: mod_base = OTHER; note = 2'-O-methyladenosine-3'-phosphate
  modified_base 5: mod_base = OTHER; note = 2'-O-methylcytidine-3'-phosphate
  modified_base 6: mod_base = OTHER; note = 2'-O-methyluridine-3'-phosphate
  modified_base 7: mod_base = OTHER; note = 2'-deoxy-2'-fluoroguanosine-3'-phosphate
  modified_base 8: mod_base = OTHER; note = 2'-O-methyladenosine-3'-phosphate
  modified_base 9: mod_base = OTHER; note = 2'-deoxy-2'-fluorouridine-3'-phosphate
  modified_base 10: mod_base = OTHER; note = 2'-deoxy-2'-fluorocytidine-3'-phosphate
  modified_base 11: mod_base = OTHER; note = 2'-deoxy-2'-fluorocytidine-3'-phosphate
  modified_base 12: mod_base = OTHER; note = 2'-O-methyladenosine-3'-phosphate
  modified_base 13: mod_base = OTHER; note = 2'-O-methylguanosine-3'-phosphate
  modified_base 14: mod_base = OTHER; note = 2'-O-methyladenosine-3'-phosphate
  modified_base 15: mod_base = OTHER; note = 2'-O-methyladenosine-3'-phosphate
  modified_base 16: mod_base = OTHER; note = 2'-O-methyladenosine-3'-phosphate
  modified_base 17: mod_base = OTHER; note = 2'-O-methyladenosine-3'-phosphate
  modified_base 18: mod_base = OTHER; note = 2'-O-methylguanosine-3'-phosphate
  modified_base 19: mod_base = OTHER; note = 2'-O-methyladenosine-3'-phosphate
  modified_base 20: mod_base = OTHER; note = 2'-O-methylguanosine-3'-phosphate
  modified_base 21: mod_base = OTHER; note = 2'-O-methyladenosine
actactgatccagaaaagaga

SEQ ID NO: 3576 - RNA, 21 nt, synthetic construct
  source 1..21: mol_type = other RNA
  modified_base 1: mod_base = OTHER; note = 2'-O-methylcytidine-3'-phosphate
  modified_base 2: mod_base = OTHER; note = 2'-O-methyluridine-3'-phosphate
  modified_base 3: mod_base = OTHER; note = 2'-O-methyladenosine-3'-phosphate
  modified_base 4: mod_base = OTHER; note = 2'-O-methylcytidine-3'-phosphate
  modified_base 5: mod_base = OTHER; note = 2'-O-methyluridine-3'-phosphate
  modified_base 6: mod_base = OTHER; note = 2'-O-methylguanosine-3'-phosphate
  modified_base 7: mod_base = OTHER; note = 2'-deoxy-2'-fluoroadenosine-3'-phosphate
  modified_base 8: mod_base = OTHER; note = 2'-O-methyluridine-3'-phosphate
  modified_base 9: mod_base = OTHER; note = 2'-deoxy-2'-fluorocytidine-3'-phosphate
  modified_base 10: mod_base = OTHER; note = 2'-deoxy-2'-fluorocytidine-3'-phosphate
  modified_base 11: mod_base = OTHER; note = 2'-deoxy-2'-fluoroadenosine-3'-phosphate
  modified_base 12: mod_base = OTHER; note = 2'-O-methylguanosine-3'-phosphate
  modified_base 13: mod_base = OTHER; note = 2'-O-methyladenosine-3'-phosphate
  modified_base 14: mod_base = OTHER; note = 2'-O-methyladenosine-3'-phosphate
  modified_base 15: mod_base = OTHER; note = 2'-O-methyladenosine-3'-phosphate
  modified_base 16: mod_base = OTHER; note = 2'-O-methyladenosine-3'-phosphate
  modified_base 17: mod_base = OTHER; note = 2'-O-methylguanosine-3'-phosphate
  modified_base 18: mod_base = OTHER; note = 2'-O-methyladenosine-3'-phosphate
  modified_base 19: mod_base = OTHER; note = 2'-O-methylguanosine-3'-phosphate
  modified_base 20: mod_base = OTHER; note = 2'-O-methyladenosine-3'-phosphate
  modified_base 21: mod_base = OTHER; note = 2'-O-methyladenosine
ctactgatccagaaaagagaa

SEQ ID NO: 3577 - RNA, 21 nt, synthetic construct
  source 1..21: mol_type = other RNA
  modified_base 1: mod_base = OTHER; note = 2'-O-methyluridine-3'-phosphate
  modified_base 2: mod_base = OTHER; note = 2'-O-methyladenosine-3'-phosphate
  modified_base 3: mod_base = OTHER; note = 2'-O-methylcytidine-3'-phosphate
  modified_base 4: mod_base = OTHER; note = 2'-O-methyluridine-3'-phosphate
  modified_base 5: mod_base = OTHER; note = 2'-O-methylguanosine-3'-phosphate
  modified_base 6: mod_base = OTHER; note = 2'-O-methyladenosine-3'-phosphate
  modified_base 7: mod_base = OTHER; note = 2'-deoxy-2'-fluorouridine-3'-phosphate
  modified_base 8: mod_base = OTHER; note = 2'-O-methylcytidine-3'-phosphate
  modified_base 9: mod_base = OTHER; note = 2'-deoxy-2'-fluorocytidine-3'-phosphate
  modified_base 10: mod_base = OTHER; note = 2'-deoxy-2'-fluoroadenosine-3'-phosphate
  modified_base 11: mod_base = OTHER; note = 2'-deoxy-2'-fluoroguanosine-3'-phosphate
  modified_base 12: mod_base = OTHER; note = 2'-O-methyladenosine-3'-phosphate
  modified_base 13: mod_base = OTHER; note = 2'-O-methyladenosine-3'-phosphate
  modified_base 14: mod_base = OTHER; note = 2'-O-methyladenosine-3'-phosphate
  modified_base 15: mod_base = OTHER; note = 2'-O-methyladenosine-3'-phosphate
  modified_base 16: mod_base = OTHER; note = 2'-O-methylguanosine-3'-phosphate
  modified_base 17: mod_base = OTHER; note = 2'-O-methyladenosine-3'-phosphate
  modified_base 18: mod_base = OTHER; note = 2'-O-methylguanosine-3'-phosphate
  modified_base 19: mod_base = OTHER; note = 2'-O-methyladenosine-3'-phosphate
  modified_base 20: mod_base = OTHER; note = 2'-O-methyluridine-3'-phosphate
  modified_base 21: mod_base = OTHER; note = 2'-O-methyladenosine
tactgatccagaaaagagata

SEQ ID NO: 3578 - RNA, 21 nt, synthetic construct
  source 1..21: mol_type = other RNA
  modified_base 1: mod_base = OTHER; note = 2'-O-methyladenosine-3'-phosphate
  modified_base 2: mod_base = OTHER; note = 2'-O-methylcytidine-3'-phosphate
  modified_base 3: mod_base = OTHER; note = 2'-O-methyluridine-3'-phosphate
  modified_base 4: mod_base = OTHER; note = 2'-O-methylguanosine-3'-phosphate
  modified_base 5: mod_base = OTHER; note = 2'-O-methyladenosine-3'-phosphate
  modified_base 6: mod_base = OTHER; note = 2'-O-methyluridine-3'-phosphate
  modified_base 7: mod_base = OTHER; note = 2'-deoxy-2'-fluorocytidine-3'-phosphate
  modified_base 8: mod_base = OTHER; note = 2'-O-methylcytidine-3'-phosphate
  modified_base 9: mod_base = OTHER; note = 2'-deoxy-2'-fluoroadenosine-3'-phosphate
  modified_base 10: mod_base = OTHER; note = 2'-deoxy-2'-fluoroguanosine-3'-phosphate
  modified_base 11: mod_base = OTHER; note = 2'-deoxy-2'-fluoroadenosine-3'-phosphate
  modified_base 12: mod_base = OTHER; note = 2'-O-methyladenosine-3'-phosphate
  modified_base 13: mod_base = OTHER; note = 2'-O-methyladenosine-3'-phosphate
  modified_base 14: mod_base = OTHER; note = 2'-O-methyladenosine-3'-phosphate
  modified_base 15: mod_base = OTHER; note = 2'-O-methylguanosine-3'-phosphate
  modified_base 16: mod_base = OTHER; note = 2'-O-methyladenosine-3'-phosphate
  modified_base 17: mod_base = OTHER; note = 2'-O-methylguanosine-3'-phosphate
  modified_base 18: mod_base = OTHER; note = 2'-O-methyladenosine-3'-phosphate
  modified_base 19: mod_base = OTHER; note = 2'-O-methyluridine-3'-phosphate
  modified_base 20: mod_base = OTHER; note = 2'-O-methyladenosine-3'-phosphate
  modified_base 21: mod_base = OTHER; note = 2'-O-methyladenosine
actgatccagaaaagagataa

SEQ ID NO: 3579 - RNA, 21 nt, synthetic construct
  source 1..21: mol_type = other RNA
  modified_base 1: mod_base = OTHER; note = 2'-O-methylcytidine-3'-phosphate
  modified_base 2: mod_base = OTHER; note = 2'-O-methyluridine-3'-phosphate
  modified_base 3: mod_base = OTHER; note = 2'-O-methylguanosine-3'-phosphate
  modified_base 4: mod_base = OTHER; note = 2'-O-methyladenosine-3'-phosphate
  modified_base 5: mod_base = OTHER; note = 2'-O-methyluridine-3'-phosphate
  modified_base 6: mod_base = OTHER; note = 2'-O-methylcytidine-3'-phosphate
  modified_base 7: mod_base = OTHER; note = 2'-deoxy-2'-fluorocytidine-3'-phosphate
  modified_base 8: mod_base = OTHER; note = 2'-O-methyladenosine-3'-phosphate
  modified_base 9: mod_base = OTHER; note = 2'-deoxy-2'-fluoroguanosine-3'-phosphate
  modified_base 10: mod_base = OTHER; note = 2'-deoxy-2'-fluoroadenosine-3'-phosphate
  modified_base 11: mod_base = OTHER; note = 2'-deoxy-2'-fluoroadenosine-3'-phosphate
  modified_base 12: mod_base = OTHER; note = 2'-O-methyladenosine-3'-phosphate
  modified_base 13: mod_base = OTHER; note = 2'-O-methyladenosine-3'-phosphate
  modified_base 14: mod_base = OTHER; note = 2'-O-methylguanosine-3'-phosphate
  modified_base 15: mod_base = OTHER; note = 2'-O-methyladenosine-3'-phosphate
  modified_base 16: mod_base = OTHER; note = 2'-O-methylguanosine-3'-phosphate
  modified_base 17: mod_base = OTHER; note = 2'-O-methyladenosine-3'-phosphate
  modified_base 18: mod_base = OTHER; note = 2'-O-methyluridine-3'-phosphate
  modified_base 19: mod_base = OTHER; note = 2'-O-methyladenosine-3'-phosphate
  modified_base 20: mod_base = OTHER; note = 2'-O-methyluridine-3'-phosphate
  modified_base 21: mod_base = OTHER; note = 2'-O-methyladenosine
ctgatccagaaaagagatata

SEQ ID NO: 3580 - RNA, 21 nt, synthetic construct
  source 1..21: mol_type = other RNA
  modified_base 1: mod_base = OTHER; note = 2'-O-methyluridine-3'-phosphate
  modified_base 2: mod_base = OTHER; note = 2'-O-methylguanosine-3'-phosphate
  modified_base 3: mod_base = OTHER; note = 2'-O-methyladenosine-3'-phosphate
  modified_base 4: mod_base = OTHER; note = 2'-O-methyluridine-3'-phosphate
  modified_base 5: mod_base = OTHER; note = 2'-O-methylcytidine-3'-phosphate
  modified_base 6: mod_base = OTHER; note = 2'-O-methylcytidine-3'-phosphate
  modified_base 7: mod_base = OTHER; note = 2'-deoxy-2'-fluoroadenosine-3'-phosphate
  modified_base 8: mod_base = OTHER; note = 2'-O-methylguanosine-3'-phosphate
  modified_base 9: mod_base = OTHER; note = 2'-deoxy-2'-fluoroadenosine-3'-phosphate
  modified_base 10: mod_base = OTHER; note = 2'-deoxy-2'-fluoroadenosine-3'-phosphate
  modified_base 11: mod_base = OTHER; note = 2'-deoxy-2'-fluoroadenosine-3'-phosphate
  modified_base 12: mod_base = OTHER; note = 2'-O-methyladenosine-3'-phosphate
  modified_base 13: mod_base = OTHER; note = 2'-O-methylguanosine-3'-phosphate
  modified_base 14: mod_base = OTHER; note = 2'-O-methyladenosine-3'-phosphate
  modified_base 15: mod_base = OTHER; note = 2'-O-methylguanosine-3'-phosphate
  modified_base 16: mod_base = OTHER; note = 2'-O-methyladenosine-3'-phosphate
  modified_base 17: mod_base = OTHER; note = 2'-O-methyluridine-3'-phosphate
  modified_base 18: mod_base = OTHER; note = 2'-O-methyladenosine-3'-phosphate
  modified_base 19: mod_base = OTHER; note = 2'-O-methyluridine-3'-phosphate
  modified_base 20: mod_base = OTHER; note = 2'-O-methylguanosine-3'-phosphate
  modified_base 21: mod_base = OTHER; note = 2'-O-methyladenosine
tgatccagaaaagagatatga

SEQ ID NO: 3581 - RNA, 21 nt, synthetic construct
  source 1..21: mol_type = other RNA
  modified_base 1: mod_base = OTHER; note = 2'-O-methylguanosine-3'-phosphate
  modified_base 2: mod_base = OTHER; note = 2'-O-methyladenosine-3'-phosphate
  modified_base 3: mod_base = OTHER; note = 2'-O-methyluridine-3'-phosphate
  modified_base 4: mod_base = OTHER; note = 2'-O-methylcytidine-3'-phosphate
  modified_base 5: mod_base = OTHER; note = 2'-O-methylcytidine-3'-phosphate
  modified_base 6: mod_base = OTHER; note = 2'-O-methyladenosine-3'-phosphate
  modified_base 7: mod_base = OTHER; note = 2'-deoxy-2'-fluoroguanosine-3'-phosphate
  modified_base 8: mod_base = OTHER; note = 2'-O-methyladenosine-3'-phosphate
  modified_base 9: mod_base = OTHER; note = 2'-deoxy-2'-fluoroadenosine-3'-phosphate
  modified_base 10: mod_base = OTHER; note = 2'-deoxy-2'-fluoroadenosine-3'-phosphate
  modified_base 11: mod_base = OTHER; note = 2'-deoxy-2'-fluoroadenosine-3'-phosphate
  modified_base 12: mod_base = OTHER; note = 2'-O-methylguanosine-3'-phosphate
  modified_base 13: mod_base = OTHER; note = 2'-O-methyladenosine-3'-phosphate
  modified_base 14: mod_base = OTHER; note = 2'-O-methylguanosine-3'-phosphate
  modified_base 15: mod_base = OTHER; note = 2'-O-methyladenosine-3'-phosphate
  modified_base 16: mod_base = OTHER; note = 2'-O-methyluridine-3'-phosphate
  modified_base 17: mod_base = OTHER; note = 2'-O-methyladenosine-3'-phosphate
  modified_base 18: mod_base = OTHER; note = 2'-O-methyluridine-3'-phosphate
  modified_base 19: mod_base = OTHER; note = 2'-O-methylguanosine-3'-phosphate
  modified_base 20: mod_base = OTHER; note = 2'-O-methyladenosine-3'-phosphate
  modified_base 21: mod_base = OTHER; note = 2'-O-methyladenosine
gatccagaaaagagatatgaa

SEQ ID NO: 3582 - RNA, 21 nt, synthetic construct
  source 1..21: mol_type = other RNA
  modified_base 1: mod_base = OTHER; note = 2'-O-methyladenosine-3'-phosphate
  modified_base 2: mod_base = OTHER; note = 2'-O-methyluridine-3'-phosphate
  modified_base 3: mod_base = OTHER; note = 2'-O-methylcytidine-3'-phosphate
  modified_base 4: mod_base = OTHER; note = 2'-O-methylcytidine-3'-phosphate
  modified_base 5: mod_base = OTHER; note = 2'-O-methyladenosine-3'-phosphate
  modified_base 6: mod_base = OTHER; note = 2'-O-methylguanosine-3'-phosphate
  modified_base 7: mod_base = OTHER; note = 2'-deoxy-2'-fluoroadenosine-3'-phosphate
  modified_base 8: mod_base = OTHER; note = 2'-O-methyladenosine-3'-phosphate
  modified_base 9: mod_base = OTHER; note = 2'-deoxy-2'-fluoroadenosine-3'-phosphate
  modified_base 10: mod_base = OTHER; note = 2'-deoxy-2'-fluoroadenosine-3'-phosphate
  modified_base 11: mod_base = OTHER; note = 2'-deoxy-2'-fluoroguanosine-3'-phosphate
  modified_base 12: mod_base = OTHER; note = 2'-O-methyladenosine-3'-phosphate
  modified_base 13: mod_base = OTHER; note = 2'-O-methylguanosine-3'-phosphate
  modified_base 14: mod_base = OTHER; note = 2'-O-methyladenosine-3'-phosphate
  modified_base 15: mod_base = OTHER; note = 2'-O-methyluridine-3'-phosphate
  modified_base 16: mod_base = OTHER; note = 2'-O-methyladenosine-3'-phosphate
  modified_base 17: mod_base = OTHER; note = 2'-O-methyluridine-3'-phosphate
  modified_base 18: mod_base = OTHER; note = 2'-O-methylguanosine-3'-phosphate
  modified_base 19: mod_base = OTHER; note = 2'-O-methyladenosine-3'-phosphate
  modified_base 20: mod_base = OTHER; note = 2'-O-methylcytidine-3'-phosphate
  modified_base 21: mod_base = OTHER; note = 2'-O-methyladenosine
atccagaaaagagatatgaca

SEQ ID NO: 3583 - RNA, 21 nt, synthetic construct
  source 1..21: mol_type = other RNA
  modified_base 1: mod_base = OTHER; note = 2'-O-methyluridine-3'-phosphate
  modified_base 2: mod_base = OTHER; note = 2'-O-methylcytidine-3'-phosphate
  modified_base 3: mod_base = OTHER; note = 2'-O-methylcytidine-3'-phosphate
  modified_base 4: mod_base = OTHER; note = 2'-O-methyladenosine-3'-phosphate
  modified_base 5: mod_base = OTHER; note = 2'-O-methylguanosine-3'-phosphate
  modified_base 6: mod_base = OTHER; note = 2'-O-methyladenosine-3'-phosphate
  modified_base 7: mod_base = OTHER; note = 2'-deoxy-2'-fluoroadenosine-3'-phosphate
  modified_base 8: mod_base = OTHER; note = 2'-O-methyladenosine-3'-phosphate
  modified_base 9: mod_base = OTHER; note = 2'-deoxy-2'-fluoroadenosine-3'-phosphate
  modified_base 10: mod_base = OTHER; note = 2'-deoxy-2'-fluoroguanosine-3'-phosphate
  modified_base 11: mod_base = OTHER; note = 2'-deoxy-2'-fluoroadenosine-3'-phosphate
  modified_base 12: mod_base = OTHER; note = 2'-O-methylguanosine-3'-phosphate
  modified_base 13: mod_base = OTHER; note = 2'-O-methyladenosine-3'-phosphate
  modified_base 14: mod_base = OTHER; note = 2'-O-methyluridine-3'-phosphate
  modified_base 15: mod_base = OTHER; note = 2'-O-methyladenosine-3'-phosphate
  modified_base 16: mod_base = OTHER; note = 2'-O-methyluridine-3'-phosphate
  modified_base 17: mod_base = OTHER; note = 2'-O-methylguanosine-3'-phosphate
  modified_base 18: mod_base = OTHER; note = 2'-O-methyladenosine-3'-phosphate
  modified_base 19: mod_base = OTHER; note = 2'-O-methylcytidine-3'-phosphate
  modified_base 20: mod_base = OTHER; note = 2'-O-methyluridine-3'-phosphate
  modified_base 21: mod_base = OTHER; note = 2'-O-methyladenosine
tccagaaaagagatatgacta

SEQ ID NO: 3584 - RNA, 21 nt, synthetic construct
  source 1..21: mol_type = other RNA
  modified_base 1: mod_base = OTHER; note = 2'-O-methylcytidine-3'-phosphate
  modified_base 2: mod_base = OTHER; note = 2'-O-methylcytidine-3'-phosphate
  modified_base 3: mod_base = OTHER; note = 2'-O-methyladenosine-3'-phosphate
  modified_base 4: mod_base = OTHER; note = 2'-O-methylguanosine-3'-phosphate
  modified_base 5: mod_base = OTHER; note = 2'-O-methyladenosine-3'-phosphate
  modified_base 6: mod_base = OTHER; note = 2'-O-methyladenosine-3'-phosphate
  modified_base 7: mod_base = OTHER; note = 2'-deoxy-2'-fluoroadenosine-3'-phosphate
  modified_base 8: mod_base = OTHER; note = 2'-O-methyladenosine-3'-phosphate
  modified_base 9: mod_base = OTHER; note = 2'-deoxy-2'-fluoroguanosine-3'-phosphate
  modified_base 10: mod_base = OTHER; note = 2'-deoxy-2'-fluoroadenosine-3'-phosphate
  modified_base 11: mod_base = OTHER; note = 2'-deoxy-2'-fluoroguanosine-3'-phosphate
  modified_base 12: mod_base = OTHER; note = 2'-O-methyladenosine-3'-phosphate
  modified_base 13: mod_base = OTHER; note = 2'-O-methyluridine-3'-phosphate
  modified_base 14: mod_base = OTHER; note = 2'-O-methyladenosine-3'-phosphate
  modified_base 15: mod_base = OTHER; note = 2'-O-methyluridine-3'-phosphate
  modified_base 16: mod_base = OTHER; note = 2'-O-methylguanosine-3'-phosphate
  modified_base 17: mod_base = OTHER; note = 2'-O-methyladenosine-3'-phosphate
  modified_base 18: mod_base = OTHER; note = 2'-O-methylcytidine-3'-phosphate
  modified_base 19: mod_base = OTHER; note = 2'-O-methyluridine-3'-phosphate
  modified_base 20: mod_base = OTHER; note = 2'-O-methyladenosine-3'-phosphate
  modified_base 21: mod_base = OTHER; note = 2'-O-methyladenosine
ccagaaaagagatatgactaa

SEQ ID NO: 3585 - RNA, 21 nt, synthetic construct
  source 1..21: mol_type = other RNA
  modified_base 1: mod_base = OTHER; note = 2'-O-methylcytidine-3'-phosphate
  modified_base 2: mod_base = OTHER; note = 2'-O-methyladenosine-3'-phosphate
  modified_base 3: mod_base = OTHER; note = 2'-O-methylguanosine-3'-phosphate
  modified_base 4: mod_base = OTHER; note = 2'-O-methyladenosine-3'-phosphate
  modified_base 5: mod_base = OTHER; note = 2'-O-methyladenosine-3'-phosphate
  modified_base 6: mod_base = OTHER; note = 2'-O-methyladenosine-3'-phosphate
  modified_base 7: mod_base = OTHER; note = 2'-deoxy-2'-fluoroadenosine-3'-phosphate
  modified_base 8: mod_base = OTHER; note = 2'-O-methylguanosine-3'-phosphate
  modified_base 9: mod_base = OTHER; note = 2'-deoxy-2'-fluoroadenosine-3'-phosphate
  modified_base 10: mod_base = OTHER; note = 2'-deoxy-2'-fluoroguanosine-3'-phosphate
  modified_base 11: mod_base = OTHER; note = 2'-deoxy-2'-fluoroadenosine-3'-phosphate
  modified_base 12: mod_base = OTHER; note = 2'-O-methyluridine-3'-phosphate
  modified_base 13: mod_base = OTHER; note = 2'-O-methyladenosine-3'-phosphate
  modified_base 14: mod_base = OTHER; note = 2'-O-methyluridine-3'-phosphate
  modified_base 15: mod_base = OTHER; note = 2'-O-methylguanosine-3'-phosphate
  modified_base 16: mod_base = OTHER; note = 2'-O-methyladenosine-3'-phosphate
  modified_base 17: mod_base = OTHER; note = 2'-O-methylcytidine-3'-phosphate
  modified_base 18: mod_base = OTHER; note = 2'-O-methyluridine-3'-phosphate
  modified_base 19: mod_base = OTHER; note = 2'-O-methyladenosine-3'-phosphate
  modified_base 20: mod_base = OTHER; note = 2'-O-methylcytidine-3'-phosphate
  modified_base 21: mod_base = OTHER; note = 2'-O-methyladenosine
cagaaaagagatatgactaca

SEQ ID NO: 3586 - RNA, 21 nt, synthetic construct
  source 1..21: mol_type = other RNA
  modified_base 1: mod_base = OTHER; note = 2'-O-methyladenosine-3'-phosphate
  modified_base 2: mod_base = OTHER; note = 2'-O-methylguanosine-3'-phosphate
  modified_base 3: mod_base = OTHER; note = 2'-O-methyladenosine-3'-phosphate
  modified_base 4: mod_base = OTHER; note = 2'-O-methyladenosine-3'-phosphate
  modified_base 5: mod_base = OTHER; note = 2'-O-methyladenosine-3'-phosphate
  modified_base 6: mod_base = OTHER; note = 2'-O-methyladenosine-3'-phosphate
  modified_base 7: mod_base = OTHER; note = 2'-deoxy-2'-fluoroguanosine-3'-phosphate
  modified_base 8: mod_base = OTHER; note = 2'-O-methyladenosine-3'-phosphate
  modified_base 9: mod_base = OTHER; note = 2'-deoxy-2'-fluoroguanosine-3'-phosphate
  modified_base 10: mod_base = OTHER; note = 2'-deoxy-2'-fluoroadenosine-3'-phosphate
  modified_base 11: mod_base = OTHER; note = 2'-deoxy-2'-fluorouridine-3'-phosphate
  modified_base 12: mod_base = OTHER; note = 2'-O-methyladenosine-3'-phosphate
  modified_base 13: mod_base = OTHER; note = 2'-O-methyluridine-3'-phosphate
  modified_base 14: mod_base = OTHER; note = 2'-O-methylguanosine-3'-phosphate
  modified_base 15: mod_base = OTHER; note = 2'-O-methyladenosine-3'-phosphate
  modified_base 16: mod_base = OTHER; note = 2'-O-methylcytidine-3'-phosphate
  modified_base 17: mod_base = OTHER; note = 2'-O-methyluridine-3'-phosphate
  modified_base 18: mod_base = OTHER; note = 2'-O-methyladenosine-3'-phosphate
  modified_base 19: mod_base = OTHER; note = 2'-O-methylcytidine-3'-phosphate
  modified_base 20: mod_base = OTHER; note = 2'-O-methyluridine-3'-phosphate
  modified_base 21: mod_base = OTHER; note = 2'-O-methyladenosine
agaaaagagatatgactacta

SEQ ID NO: 3587 - RNA, 21 nt, synthetic construct
  source 1..21: mol_type = other RNA
  modified_base 1: mod_base = OTHER; note = 2'-O-methylguanosine-3'-phosphate
  modified_base 2: mod_base = OTHER; note = 2'-O-methyladenosine-3'-phosphate
  modified_base 3: mod_base = OTHER; note = 2'-O-methyladenosine-3'-phosphate
  modified_base 4: mod_base = OTHER; note = 2'-O-methyladenosine-3'-phosphate
  modified_base 5: mod_base = OTHER; note = 2'-O-methyladenosine-3'-phosphate
  modified_base 6: mod_base = OTHER; note = 2'-O-methylguanosine-3'-phosphate
  modified_base 7: mod_base = OTHER; note = 2'-deoxy-2'-fluoroadenosine-3'-phosphate
  modified_base 8: mod_base = OTHER; note = 2'-O-methylguanosine-3'-phosphate
  modified_base 9: mod_base = OTHER; note = 2'-deoxy-2'-fluoroadenosine-3'-phosphate
  modified_base 10: mod_base = OTHER; note = 2'-deoxy-2'-fluorouridine-3'-phosphate
  modified_base 11: mod_base = OTHER; note = 2'-deoxy-2'-fluoroadenosine-3'-phosphate
  modified_base 12: mod_base = OTHER; note = 2'-O-methyluridine-3'-phosphate
  modified_base 13: mod_base = OTHER; note = 2'-O-methylguanosine-3'-phosphate
  modified_base 14: mod_base = OTHER; note = 2'-O-methyladenosine-3'-phosphate
  modified_base 15: mod_base = OTHER; note = 2'-O-methylcytidine-3'-phosphate
  modified_base 16: mod_base = OTHER; note = 2'-O-methyluridine-3'-phosphate
  modified_base 17: mod_base = OTHER; note = 2'-O-methyladenosine-3'-phosphate
  modified_base 18: mod_base = OTHER; note = 2'-O-methylcytidine-3'-phosphate
  modified_base 19: mod_base = OTHER; note = 2'-O-methyluridine-3'-phosphate
  modified_base 20: mod_base = OTHER; note = 2'-O-methylguanosine-3'-phosphate
  modified_base 21: mod_base = OTHER; note = 2'-O-methyladenosine
gaaaagagatatgactactga

SEQ ID NO: 3588 - RNA, 21 nt, synthetic construct
  source 1..21: mol_type = other RNA
  modified_base 1: mod_base = OTHER; note = 2'-O-methyladenosine-3'-phosphate
  modified_base 2: mod_base = OTHER; note = 2'-O-methyladenosine-3'-phosphate
  modified_base 3: mod_base = OTHER; note = 2'-O-methyladenosine-3'-phosphate
  modified_base 4: mod_base = OTHER; note = 2'-O-methyladenosine-3'-phosphate
  modified_base 5: mod_base = OTHER; note = 2'-O-methylguanosine-3'-phosphate
  modified_base 6: mod_base = OTHER; note = 2'-O-methyladenosine-3'-phosphate
  modified_base 7: mod_base = OTHER; note = 2'-deoxy-2'-fluoroguanosine-3'-phosphate
  modified_base 8: mod_base = OTHER; note = 2'-O-methyladenosine-3'-phosphate
  modified_base 9: mod_base = OTHER; note = 2'-deoxy-2'-fluorouridine-3'-phosphate
  modified_base 10: mod_base = OTHER; note = 2'-deoxy-2'-fluoroadenosine-3'-phosphate
  modified_base 11: mod_base = OTHER; note = 2'-deoxy-2'-fluorouridine-3'-phosphate
  modified_base 12: mod_base = OTHER; note = 2'-O-methylguanosine-3'-phosphate
  modified_base 13: mod_base = OTHER; note = 2'-O-methyladenosine-3'-phosphate
  modified_base 14: mod_base = OTHER; note = 2'-O-methylcytidine-3'-phosphate
  modified_base 15: mod_base = OTHER; note = 2'-O-methyluridine-3'-phosphate
  modified_base 16: mod_base = OTHER; note = 2'-O-methyladenosine-3'-phosphate
  modified_base 17: mod_base = OTHER; note = 2'-O-methylcytidine-3'-phosphate
  modified_base 18: mod_base = OTHER; note = 2'-O-methyluridine-3'-phosphate
  modified_base 19: mod_base = OTHER; note = 2'-O-methylguanosine-3'-phosphate
  modified_base 20: mod_base = OTHER; note = 2'-O-methylcytidine-3'-phosphate
  modified_base 21: mod_base = OTHER; note = 2'-O-methyladenosine
aaaagagatatgactactgca

SEQ ID NO: 3589 - RNA, 21 nt, synthetic construct
  source 1..21: mol_type = other RNA
  modified_base 1: mod_base = OTHER; note = 2'-O-methyluridine-3'-phosphate
  modified_base 2: mod_base = OTHER; note = 2'-O-methyladenosine-3'-phosphate
  modified_base 3: mod_base = OTHER; note = 2'-O-methyluridine-3'-phosphate
  modified_base 4: mod_base = OTHER; note = 2'-O-methylguanosine-3'-phosphate
  modified_base 5: mod_base = OTHER; note = 2'-O-methyladenosine-3'-phosphate
  modified_base 6: mod_base = OTHER; note = 2'-O-methylcytidine-3'-phosphate
  modified_base 7: mod_base = OTHER; note = 2'-deoxy-2'-fluorouridine-3'-phosphate
  modified_base 8: mod_base = OTHER; note = 2'-O-methyladenosine-3'-phosphate
  modified_base 9: mod_base = OTHER; note = 2'-deoxy-2'-fluorocytidine-3'-phosphate
  modified_base 10: mod_base = OTHER; note = 2'-deoxy-2'-fluorouridine-3'-phosphate
  modified_base 11: mod_base = OTHER; note = 2'-deoxy-2'-fluoroguanosine-3'-phosphate
  modified_base 12: mod_base = OTHER; note = 2'-O-methylcytidine-3'-phosphate
  modified_base 13: mod_base = OTHER; note = 2'-O-methylguanosine-3'-phosphate
  modified_base 14: mod_base = OTHER; note = 2'-O-methyladenosine-3'-phosphate
  modified_base 15: mod_base = OTHER; note = 2'-O-methylcytidine-3'-phosphate
  modified_base 16: mod_base = OTHER; note = 2'-O-methyladenosine-3'-phosphate
  modified_base 17: mod_base = OTHER; note = 2'-O-methyluridine-3'-phosphate
  modified_base 18: mod_base = OTHER; note = 2'-O-methyluridine-3'-phosphate
  modified_base 19: mod_base = OTHER; note = 2'-O-methylcytidine-3'-phosphate
  modified_base 20: mod_base = OTHER; note = 2'-O-methyluridine-3'-phosphate
  modified_base 21: mod_base = OTHER; note = 2'-O-methyladenosine
tatgactactgcgacattcta

SEQ ID NO: 3590 - RNA, 21 nt, synthetic construct
  source 1..21: mol_type = other RNA
  modified_base 1: mod_base = OTHER; note = 2'-O-methyladenosine-3'-phosphate
  modified_base 2: mod_base = OTHER; note = 2'-O-methyluridine-3'-phosphate
  modified_base 3: mod_base = OTHER; note = 2'-O-methylguanosine-3'-phosphate
  modified_base 4: mod_base = OTHER; note = 2'-O-methyladenosine-3'-phosphate
  modified_base 5: mod_base = OTHER; note = 2'-O-methylcytidine-3'-phosphate
  modified_base 6: mod_base = OTHER; note = 2'-O-methyluridine-3'-phosphate
  modified_base 7: mod_base = OTHER; note = 2'-deoxy-2'-fluoroadenosine-3'-phosphate
  modified_base 8: mod_base = OTHER; note = 2'-O-methylcytidine-3'-phosphate
  modified_base 9: mod_base = OTHER; note = 2'-deoxy-2'-fluorouridine-3'-phosphate
  modified_base 10: mod_base = OTHER; note = 2'-deoxy-2'-fluoroguanosine-3'-phosphate
  modified_base 11: mod_base = OTHER; note = 2'-deoxy-2'-fluorocytidine-3'-phosphate
  modified_base 12: mod_base = OTHER; note = 2'-O-methylguanosine-3'-phosphate
  modified_base 13: mod_base = OTHER; note = 2'-O-methyladenosine-3'-phosphate
  modified_base 14: mod_base = OTHER; note = 2'-O-methylcytidine-3'-phosphate
  modified_base 15: mod_base = OTHER; note = 2'-O-methyladenosine-3'-phosphate
  modified_base 16: mod_base = OTHER; note = 2'-O-methyluridine-3'-phosphate
  modified_base 17: mod_base = OTHER; note = 2'-O-methyluridine-3'-phosphate
  modified_base 18: mod_base = OTHER; note = 2'-O-methylcytidine-3'-phosphate
  modified_base 19: mod_base = OTHER; note = 2'-O-methyluridine-3'-phosphate
  modified_base 20: mod_base = OTHER; note = 2'-O-methyluridine-3'-phosphate
  modified_base 21: mod_base = OTHER; note = 2'-O-methyladenosine
atgactactgcgacattctta

SEQ ID NO: 3591 - RNA, 21 nt, synthetic construct
  source 1..21: mol_type = other RNA
  modified_base 1: mod_base = OTHER; note = 2'-O-methyluridine-3'-phosphate
  modified_base 2: mod_base = OTHER; note = 2'-O-methylguanosine-3'-phosphate
  modified_base 3: mod_base = OTHER; note = 2'-O-methyladenosine-3'-phosphate
  modified_base 4: mod_base = OTHER; note = 2'-O-methylcytidine-3'-phosphate
  modified_base 5: mod_base = OTHER; note = 2'-O-methyluridine-3'-phosphate
  modified_base 6: mod_base = OTHER; note = 2'-O-methyladenosine-3'-phosphate
  modified_base 7: mod_base = OTHER; note = 2'-deoxy-2'-fluorocytidine-3'-phosphate
  modified_base 8: mod_base = OTHER; note = 2'-O-methyluridine-3'-phosphate
  modified_base 9: mod_base = OTHER; note = 2'-deoxy-2'-fluoroguanosine-3'-phosphate
  modified_base 10: mod_base = OTHER; note = 2'-deoxy-2'-fluorocytidine-3'-phosphate
  modified_base 11: mod_base = OTHER; note = 2'-deoxy-2'-fluoroguanosine-3'-phosphate
  modified_base 12: mod_base = OTHER; note = 2'-O-methyladenosine-3'-phosphate
  modified_base 13: mod_base = OTHER; note = 2'-O-methylcytidine-3'-phosphate
  modified_base 14: mod_base = OTHER; note = 2'-O-methyladenosine-3'-phosphate
  modified_base 15: mod_base = OTHER; note = 2'-O-methyluridine-3'-phosphate
  modified_base 16: mod_base = OTHER; note = 2'-O-methyluridine-3'-phosphate
  modified_base 17: mod_base = OTHER; note = 2'-O-methylcytidine-3'-phosphate
  modified_base 18: mod_base = OTHER; note = 2'-O-methyluridine-3'-phosphate
  modified_base 19: mod_base = OTHER; note = 2'-O-methyluridine-3'-phosphate
  modified_base 20: mod_base = OTHER; note = 2'-O-methylguanosine-3'-phosphate
  modified_base 21: mod_base = OTHER; note = 2'-O-methyladenosine
tgactactgcgacattcttga

SEQ ID NO: 3592 - RNA, 21 nt, synthetic construct
  source 1..21: mol_type = other RNA
  modified_base 1: mod_base = OTHER; note = 2'-O-methylguanosine-3'-phosphate
  modified_base 2: mod_base = OTHER; note = 2'-O-methyladenosine-3'-phosphate
  modified_base 3: mod_base = OTHER; note = 2'-O-methylcytidine-3'-phosphate
  modified_base 4: mod_base = OTHER; note = 2'-O-methyluridine-3'-phosphate
  modified_base 5: mod_base = OTHER; note = 2'-O-methyladenosine-3'-phosphate
  modified_base 6: mod_base = OTHER; note = 2'-O-methylcytidine-3'-phosphate
  modified_base 7: mod_base = OTHER; note = 2'-deoxy-2'-fluorouridine-3'-phosphate
  modified_base 8: mod_base = OTHER; note = 2'-O-methylguanosine-3'-phosphate
  modified_base 9: mod_base = OTHER; note = 2'-deoxy-2'-fluorocytidine-3'-phosphate
  modified_base 10: mod_base = OTHER; note = 2'-deoxy-2'-fluoroguanosine-3'-phosphate
  modified_base 11: mod_base = OTHER; note = 2'-deoxy-2'-fluoroadenosine-3'-phosphate
  modified_base 12: mod_base = OTHER; note = 2'-O-methylcytidine-3'-phosphate
  modified_base 13: mod_base = OTHER; note = 2'-O-methyladenosine-3'-phosphate
  modified_base 14: mod_base = OTHER; note = 2'-O-methyluridine-3'-phosphate
  modified_base 15: mod_base = OTHER; note = 2'-O-methyluridine-3'-phosphate
  modified_base 16: mod_base = OTHER; note = 2'-O-methylcytidine-3'-phosphate
  modified_base 17: mod_base = OTHER; note = 2'-O-methyluridine-3'-phosphate
  modified_base 18: mod_base = OTHER; note = 2'-O-methyluridine-3'-phosphate
  modified_base 19: mod_base = OTHER; note = 2'-O-methylguanosine-3'-phosphate
  modified_base 20: mod_base = OTHER; note = 2'-O-methyladenosine-3'-phosphate
  modified_base 21: mod_base = OTHER; note = 2'-O-methyladenosine
gactactgcgacattcttgaa

SEQ ID NO: 3593 - RNA, 21 nt, synthetic construct
  source 1..21: mol_type = other RNA
  modified_base 1: mod_base = OTHER; note = 2'-O-methylcytidine-3'-phosphate
  modified_base 2: mod_base = OTHER; note = 2'-O-methyluridine-3'-phosphate
  modified_base 3: mod_base = OTHER; note = 2'-O-methyladenosine-3'-phosphate
  modified_base 4: mod_base = OTHER; note = 2'-O-methylcytidine-3'-phosphate
  modified_base 5: mod_base = OTHER; note = 2'-O-methyluridine-3'-phosphate
  modified_base 6: mod_base = OTHER; note = 2'-O-methylguanosine-3'-phosphate
  modified_base 7: mod_base = OTHER; note = 2'-deoxy-2'-fluorocytidine-3'-phosphate
  modified_base 8: mod_base = OTHER; note = 2'-O-methylguanosine-3'-phosphate
  modified_base 9: mod_base = OTHER; note = 2'-deoxy-2'-fluoroadenosine-3'-phosphate
  modified_base 10: mod_base = OTHER; note = 2'-deoxy-2'-fluorocytidine-3'-phosphate
  modified_base 11: mod_base = OTHER; note = 2'-deoxy-2'-fluoroadenosine-3'-phosphate
  modified_base 12: mod_base = OTHER; note = 2'-O-methyluridine-3'-phosphate
  modified_base 13: mod_base = OTHER; note = 2'-O-methyluridine-3'-phosphate
  modified_base 14: mod_base = OTHER; note = 2'-O-methylcytidine-3'-phosphate
  modified_base 15: mod_base = OTHER; note = 2'-O-methyluridine-3'-phosphate
  modified_base 16: mod_base = OTHER; note = 2'-O-methyluridine-3'-phosphate
  modified_base 17: mod_base = OTHER; note = 2'-O-methylguanosine-3'-phosphate
  modified_base 18: mod_base = OTHER; note = 2'-O-methyladenosine-3'-phosphate
  modified_base 19: mod_base = OTHER; note = 2'-O-methylguanosine-3'-phosphate
  modified_base 20: mod_base = OTHER; note = 2'-O-methyluridine-3'-phosphate
  modified_base 21: mod_base = OTHER; note = 2'-O-methyladenosine
ctactgcgacattcttgagta

SEQ ID NO: 3594 - RNA, 21 nt, synthetic construct
  source 1..21: mol_type = other RNA
  modified_base 1: mod_base = OTHER; note = 2'-O-methyluridine-3'-phosphate
  modified_base 2: mod_base = OTHER; note = 2'-O-methyladenosine-3'-phosphate
  modified_base 3: mod_base = OTHER; note = 2'-O-methylcytidine-3'-phosphate
  modified_base 4: mod_base = OTHER; note = 2'-O-methyluridine-3'-phosphate
  modified_base 5: mod_base = OTHER; note = 2'-O-methylguanosine-3'-phosphate
  modified_base 6: mod_base = OTHER; note = 2'-O-methylcytidine-3'-phosphate
  modified_base 7: mod_base = OTHER; note = 2'-deoxy-2'-fluoroguanosine-3'-phosphate
  modified_base 8: mod_base = OTHER; note = 2'-O-methyladenosine-3'-phosphate
  modified_base 9: mod_base = OTHER; note = 2'-deoxy-2'-fluorocytidine-3'-phosphate
  modified_base 10: mod_base = OTHER; note = 2'-deoxy-2'-fluoroadenosine-3'-phosphate
  modified_base 11: mod_base = OTHER; note = 2'-deoxy-2'-fluorouridine-3'-phosphate
  modified_base 12: mod_base = OTHER; note = 2'-O-methyluridine-3'-phosphate
  modified_base 13: mod_base = OTHER; note = 2'-O-methylcytidine-3'-phosphate
  modified_base 14: mod_base = OTHER; note = 2'-O-methyluridine-3'-phosphate
  modified_base 15: mod_base = OTHER; note = 2'-O-methyluridine-3'-phosphate
  modified_base 16: mod_base = OTHER; note = 2'-O-methylguanosine-3'-phosphate
  modified_base 17: mod_base = OTHER; note = 2'-O-methyladenosine-3'-phosphate
  modified_base 18: mod_base = OTHER; note = 2'-O-methylguanosine-3'-phosphate
  modified_base 19: mod_base = OTHER; note = 2'-O-methyluridine-3'-phosphate
  modified_base 20: mod_base = OTHER; note = 2'-O-methylguanosine-3'-phosphate
  modified_base 21: mod_base = OTHER; note = 2'-O-methyladenosine
tactgcgacattcttgagtga

SEQ ID NO: 3595 - RNA, 21 nt, synthetic construct
  source 1..21: mol_type = other RNA
  modified_base 1: mod_base = OTHER; note = 2'-O-methyladenosine-3'-phosphate
  modified_base 2: mod_base = OTHER; note = 2'-O-methylcytidine-3'-phosphate
  modified_base 3: mod_base = OTHER; note = 2'-O-methyluridine-3'-phosphate
  modified_base 4: mod_base = OTHER; note = 2'-O-methylguanosine-3'-phosphate
  modified_base 5: mod_base = OTHER; note = 2'-O-methylcytidine-3'-phosphate
  modified_base 6: mod_base = OTHER; note = 2'-O-methylguanosine-3'-phosphate
  modified_base 7: mod_base = OTHER; note = 2'-deoxy-2'-fluoroadenosine-3'-phosphate
  modified_base 8: mod_base = OTHER; note = 2'-O-methylcytidine-3'-phosphate
  modified_base 9: mod_base = OTHER; note = 2'-deoxy-2'-fluoroadenosine-3'-phosphate
  modified_base 10: mod_base = OTHER; note = 2'-deoxy-2'-fluorouridine-3'-phosphate
  modified_base 11: mod_base = OTHER; note = 2'-deoxy-2'-fluorouridine-3'-phosphate
  modified_base 12: mod_base = OTHER; note = 2'-O-methylcytidine-3'-phosphate
  modified_base 13: mod_base = OTHER; note = 2'-O-methyluridine-3'-phosphate
  modified_base 14: mod_base = OTHER; note = 2'-O-methyluridine-3'-phosphate
  modified_base 15: mod_base = OTHER; note = 2'-O-methylguanosine-3'-phosphate
  modified_base 16: mod_base = OTHER; note = 2'-O-methyladenosine-3'-phosphate
  modified_base 17: mod_base = OTHER; note = 2'-O-methylguanosine-3'-phosphate
  modified_base 18: mod_base = OTHER; note = 2'-O-methyluridine-3'-phosphate
  modified_base 19: mod_base = OTHER; note = 2'-O-methylguanosine-3'-phosphate
  modified_base 20: mod_base = OTHER; note = 2'-O-methyluridine-3'-phosphate
  modified_base 21: mod_base = OTHER; note = 2'-O-methyladenosine
actgcgacattcttgagtgta

SEQ ID NO: 3596 - RNA, 21 nt, synthetic construct
  source 1..21: mol_type = other RNA
  modified_base 1: mod_base = OTHER; note = 2'-O-methylcytidine-3'-phosphate
  modified_base 2: mod_base = OTHER; note = 2'-O-methyluridine-3'-phosphate
  modified_base 3: mod_base = OTHER; note = 2'-O-methylguanosine-3'-phosphate
  modified_base 4: mod_base = OTHER; note = 2'-O-methylcytidine-3'-phosphate
  modified_base 5: mod_base = OTHER; note = 2'-O-methylguanosine-3'-phosphate
  modified_base 6: mod_base = OTHER; note = 2'-O-methyladenosine-3'-phosphate
  modified_base 7: mod_base = OTHER; note = 2'-deoxy-2'-fluorocytidine-3'-phosphate
  modified_base 8: mod_base = OTHER; note = 2'-O-methyladenosine-3'-phosphate
  modified_base 9: mod_base = OTHER; note = 2'-deoxy-2'-fluorouridine-3'-phosphate
  modified_base 10: mod_base = OTHER; note = 2'-deoxy-2'-fluorouridine-3'-phosphate
  modified_base 11: mod_base = OTHER; note = 2'-deoxy-2'-fluorocytidine-3'-phosphate
  modified_base 12: mod_base = OTHER; note = 2'-O-methyluridine-3'-phosphate
  modified_base 13: mod_base = OTHER; note = 2'-O-methyluridine-3'-phosphate
  modified_base 14: mod_base = OTHER; note = 2'-O-methylguanosine-3'-phosphate
  modified_base 15: mod_base = OTHER; note = 2'-O-methyladenosine-3'-phosphate
  modified_base 16: mod_base = OTHER; note = 2'-O-methylguanosine-3'-phosphate
  modified_base 17: mod_base = OTHER; note = 2'-O-methyluridine-3'-phosphate
  modified_base 18: mod_base = OTHER; note = 2'-O-methylguanosine-3'-phosphate
  modified_base 19: mod_base = OTHER; note = 2'-O-methyluridine-3'-phosphate
  modified_base 20: mod_base = OTHER; note = 2'-O-methylguanosine-3'-phosphate
  modified_base 21: mod_base = OTHER; note = 2'-O-methyladenosine
ctgcgacattcttgagtgtga

SEQ ID NO: 3597 - RNA, 21 nt, synthetic construct
  source 1..21: mol_type = other RNA
  modified_base 1: mod_base = OTHER; note = 2'-O-methyluridine-3'-phosphate
  modified_base 2: mod_base = OTHER; note = 2'-O-methylguanosine-3'-phosphate
  modified_base 3: mod_base = OTHER; note = 2'-O-methylcytidine-3'-phosphate
  modified_base 4: mod_base = OTHER; note = 2'-O-methylguanosine-3'-phosphate
  modified_base 5: mod_base = OTHER; note = 2'-O-methyladenosine-3'-phosphate
  modified_base 6: mod_base = OTHER; note = 2'-O-methylcytidine-3'-phosphate
  modified_base 7: mod_base = OTHER; note = 2'-deoxy-2'-fluoroadenosine-3'-phosphate
  modified_base 8: mod_base = OTHER; note = 2'-O-methyluridine-3'-phosphate
  modified_base 9: mod_base = OTHER; note = 2'-deoxy-2'-fluorouridine-3'-phosphate
  modified_base 10: mod_base = OTHER; note = 2'-deoxy-2'-fluorocytidine-3'-phosphate
  modified_base 11: mod_base = OTHER; note = 2'-deoxy-2'-fluorouridine-3'-phosphate
  modified_base 12: mod_base = OTHER; note = 2'-O-methyluridine-3'-phosphate
  modified_base 13: mod_base = OTHER; note = 2'-O-methylguanosine-3'-phosphate
  modified_base 14: mod_base = OTHER; note = 2'-O-methyladenosine-3'-phosphate
  modified_base 15: mod_base = OTHER; note = 2'-O-methylguanosine-3'-phosphate
  modified_base 16: mod_base = OTHER; note = 2'-O-methyluridine-3'-phosphate
  modified_base 17: mod_base = OTHER; note = 2'-O-methylguanosine-3'-phosphate
  modified_base 18: mod_base = OTHER; note = 2'-O-methyluridine-3'-phosphate
  modified_base 19: mod_base = OTHER; note = 2'-O-methylguanosine-3'-phosphate
  modified_base 20: mod_base = OTHER; note = 2'-O-methyladenosine-3'-phosphate
  modified_base 21: mod_base = OTHER; note = 2'-O-methyladenosine
tgcgacattcttgagtgtgaa

SEQ ID NO: 3598 - RNA, 21 nt, synthetic construct
  source 1..21: mol_type = other RNA
  modified_base 1: mod_base = OTHER; note = 2'-O-methylguanosine-3'-phosphate
  modified_base 2: mod_base = OTHER; note = 2'-O-methylcytidine-3'-phosphate
  modified_base 3: mod_base = OTHER; note = 2'-O-methylguanosine-3'-phosphate
  modified_base 4: mod_base = OTHER; note = 2'-O-methyladenosine-3'-phosphate
  modified_base 5: mod_base = OTHER; note = 2'-O-methylcytidine-3'-phosphate
  modified_base 6: mod_base = OTHER; note = 2'-O-methyladenosine-3'-phosphate
  modified_base 7: mod_base = OTHER; note = 2'-deoxy-2'-fluorouridine-3'-phosphate
  modified_base 8: mod_base = OTHER; note = 2'-O-methyluridine-3'-phosphate
  modified_base 9: mod_base = OTHER; note = 2'-deoxy-2'-fluorocytidine-3'-phosphate
  modified_base 10: mod_base = OTHER; note = 2'-deoxy-2'-fluorouridine-3'-phosphate
  modified_base 11: mod_base = OTHER; note = 2'-deoxy-2'-fluorouridine-3'-phosphate
  modified_base 12: mod_base = OTHER; note = 2'-O-methylguanosine-3'-phosphate
  modified_base 13: mod_base = OTHER; note = 2'-O-methyladenosine-3'-phosphate
  modified_base 14: mod_base = OTHER; note = 2'-O-methylguanosine-3'-phosphate
  modified_base 15: mod_base = OTHER; note = 2'-O-methyluridine-3'-phosphate
  modified_base 16: mod_base = OTHER; note = 2'-O-methylguanosine-3'-phosphate
  modified_base 17: mod_base = OTHER; note = 2'-O-methyluridine-3'-phosphate
  modified_base 18: mod_base = OTHER; note = 2'-O-methylguanosine-3'-phosphate
  modified_base 19: mod_base = OTHER; note = 2'-O-methyladenosine-3'-phosphate
  modified_base 20: mod_base = OTHER; note = 2'-O-methyladenosine-3'-phosphate
  modified_base 21: mod_base = OTHER; note = 2'-O-methyladenosine
gcgacattcttgagtgtgaaa

SEQ ID NO: 3599 - RNA, 21 nt, synthetic construct
  source 1..21: mol_type = other RNA
  modified_base 1: mod_base = OTHER; note = 2'-O-methylcytidine-3'-phosphate
  modified_base 2: mod_base = OTHER; note = 2'-O-methylguanosine-3'-phosphate
  modified_base 3: mod_base = OTHER; note = 2'-O-methyladenosine-3'-phosphate
  modified_base 4: mod_base = OTHER; note = 2'-O-methylcytidine-3'-phosphate
  modified_base 5: mod_base = OTHER; note = 2'-O-methyladenosine-3'-phosphate
  modified_base 6: mod_base = OTHER; note = 2'-O-methyluridine-3'-phosphate
  modified_base 7: mod_base = OTHER; note = 2'-deoxy-2'-fluorouridine-3'-phosphate
  modified_base 8: mod_base = OTHER; note = 2'-O-methylcytidine-3'-phosphate
  modified_base 9: mod_base = OTHER; note = 2'-deoxy-2'-fluorouridine-3'-phosphate
  modified_base 10: mod_base = OTHER; note = 2'-deoxy-2'-fluorouridine-3'-phosphate
  modified_base 11: mod_base = OTHER; note = 2'-deoxy-2'-fluoroguanosine-3'-phosphate
  modified_base 12: mod_base = OTHER; note = 2'-O-methyladenosine-3'-phosphate
  modified_base 13: mod_base = OTHER; note = 2'-O-methylguanosine-3'-phosphate
  modified_base 14: mod_base = OTHER; note = 2'-O-methyluridine-3'-phosphate
  modified_base 15: mod_base = OTHER; note = 2'-O-methylguanosine-3'-phosphate
  modified_base 16: mod_base = OTHER; note = 2'-O-methyluridine-3'-phosphate
  modified_base 17: mod_base = OTHER; note = 2'-O-methylguanosine-3'-phosphate
  modified_base 18: mod_base = OTHER; note = 2'-O-methyladenosine-3'-phosphate
  modified_base 19: mod_base = OTHER; note = 2'-O-methyladenosine-3'-phosphate
  modified_base 20: mod_base = OTHER; note = 2'-O-methylguanosine-3'-phosphate
  modified_base 21: mod_base = OTHER; note = 2'-O-methyladenosine
cgacattcttgagtgtgaaga

SEQ ID NO: 3600 - RNA, 21 nt, synthetic construct
  source 1..21: mol_type = other RNA
  modified_base 1: mod_base = OTHER; note = 2'-O-methylguanosine-3'-phosphate
  modified_base 2: mod_base = OTHER; note = 2'-O-methyladenosine-3'-phosphate
  modified_base 3: mod_base = OTHER; note = 2'-O-methylcytidine-3'-phosphate
  modified_base 4: mod_base = OTHER; note = 2'-O-methyladenosine-3'-phosphate
  modified_base 5: mod_base = OTHER; note = 2'-O-methyluridine-3'-phosphate
  modified_base 6: mod_base = OTHER; note = 2'-O-methyluridine-3'-phosphate
  modified_base 7: mod_base = OTHER; note = 2'-deoxy-2'-fluorocytidine-3'-phosphate
  modified_base 8: mod_base = OTHER; note = 2'-O-methyluridine-3'-phosphate
  modified_base 9: mod_base = OTHER; note = 2'-deoxy-2'-fluorouridine-3'-phosphate
  modified_base 10: mod_base = OTHER; note = 2'-deoxy-2'-fluoroguanosine-3'-phosphate
  modified_base 11: mod_base = OTHER; note = 2'-deoxy-2'-fluoroadenosine-3'-phosphate
  modified_base 12: mod_base = OTHER; note = 2'-O-methylguanosine-3'-phosphate
  modified_base 13: mod_base = OTHER; note = 2'-O-methyluridine-3'-phosphate
  modified_base 14: mod_base = OTHER; note = 2'-O-methylguanosine-3'-phosphate
  modified_base 15: mod_base = OTHER; note = 2'-O-methyluridine-3'-phosphate
  modified_base 16: mod_base = OTHER; note = 2'-O-methylguanosine-3'-phosphate
  modified_base 17: mod_base = OTHER; note = 2'-O-methyladenosine-3'-phosphate
  modified_base 18: mod_base = OTHER; note = 2'-O-methyladenosine-3'-phosphate
  modified_base 19: mod_base = OTHER; note = 2'-O-methylguanosine-3'-phosphate
  modified_base 20: mod_base = OTHER; note = 2'-O-methyladenosine-3'-phosphate
  modified_base 21: mod_base = OTHER; note = 2'-O-methyladenosine
gacattcttgagtgtgaagaa

SEQ ID NO: 3601 - RNA, 21 nt, synthetic construct
  source 1..21: mol_type = other RNA
  modified_base 1: mod_base = OTHER; note = 2'-O-methyladenosine-3'-phosphate
  modified_base 2: mod_base = OTHER; note = 2'-O-methylcytidine-3'-phosphate
  modified_base 3: mod_base = OTHER; note = 2'-O-methyladenosine-3'-phosphate
  modified_base 4: mod_base = OTHER; note = 2'-O-methyluridine-3'-phosphate
  modified_base 5: mod_base = OTHER; note = 2'-O-methyluridine-3'-phosphate
  modified_base 6: mod_base = OTHER; note = 2'-O-methylcytidine-3'-phosphate
  modified_base 7: mod_base = OTHER; note = 2'-deoxy-2'-fluorouridine-3'-phosphate
  modified_base 8: mod_base = OTHER; note = 2'-O-methyluridine-3'-phosphate
  modified_base 9: mod_base = OTHER; note = 2'-deoxy-2'-fluoroguanosine-3'-phosphate
  modified_base 10: mod_base = OTHER; note = 2'-deoxy-2'-fluoroadenosine-3'-phosphate
  modified_base 11: mod_base = OTHER; note = 2'-deoxy-2'-fluoroguanosine-3'-phosphate
  modified_base 12: mod_base = OTHER; note = 2'-O-methyluridine-3'-phosphate
  modified_base 13: mod_base = OTHER; note = 2'-O-methylguanosine-3'-phosphate
  modified_base 14: mod_base = OTHER; note = 2'-O-methyluridine-3'-phosphate
  modified_base 15: mod_base = OTHER; note = 2'-O-methylguanosine-3'-phosphate
  modified_base 16: mod_base = OTHER; note = 2'-O-methyladenosine-3'-phosphate
  modified_base 17: mod_base = OTHER; note = 2'-O-methyladenosine-3'-phosphate
  modified_base 18: mod_base = OTHER; note = 2'-O-methylguanosine-3'-phosphate
  modified_base 19: mod_base = OTHER; note = 2'-O-methyladenosine-3'-phosphate
  modified_base 20: mod_base = OTHER; note = 2'-O-methylguanosine-3'-phosphate
  modified_base 21: mod_base = OTHER; note = 2'-O-methyladenosine
acattcttgagtgtgaagaga

SEQ ID NO: 3602 - RNA, 21 nt, synthetic construct
  source 1..21: mol_type = other RNA
  modified_base 1: mod_base = OTHER; note = 2'-O-methyladenosine-3'-phosphate
  modified_base 2: mod_base = OTHER; note = 2'-O-methyluridine-3'-phosphate
  modified_base 3: mod_base = OTHER; note = 2'-O-methyluridine-3'-phosphate
  modified_base 4: mod_base = OTHER; note = 2'-O-methylcytidine-3'-phosphate
  modified_base 5: mod_base = OTHER; note = 2'-O-methyluridine-3'-phosphate
  modified_base 6: mod_base = OTHER; note = 2'-O-methyluridine-3'-phosphate
  modified_base 7: mod_base = OTHER; note = 2'-deoxy-2'-fluoroguanosine-3'-phosphate
  modified_base 8: mod_base = OTHER; note = 2'-O-methyladenosine-3'-phosphate
  modified_base 9: mod_base = OTHER; note = 2'-deoxy-2'-fluoroguanosine-3'-phosphate
  modified_base 10: mod_base = OTHER; note = 2'-deoxy-2'-fluorouridine-3'-phosphate
  modified_base 11: mod_base = OTHER; note = 2'-deoxy-2'-fluoroguanosine-3'-phosphate
  modified_base 12: mod_base = OTHER; note = 2'-O-methyluridine-3'-phosphate
  modified_base 13: mod_base = OTHER; note = 2'-O-methylguanosine-3'-phosphate
  modified_base 14: mod_base = OTHER; note = 2'-O-methyladenosine-3'-phosphate
  modified_base 15: mod_base = OTHER; note = 2'-O-methyladenosine-3'-phosphate
  modified_base 16: mod_base = OTHER; note = 2'-O-methylguanosine-3'-phosphate
  modified_base 17: mod_base = OTHER; note = 2'-O-methyladenosine-3'-phosphate
  modified_base 18: mod_base = OTHER; note = 2'-O-methylguanosine-3'-phosphate
  modified_base 19: mod_base = OTHER; note = 2'-O-methylguanosine-3'-phosphate
  modified_base 20: mod_base = OTHER; note = 2'-O-methyladenosine-3'-phosphate
  modified_base 21: mod_base = OTHER; note = 2'-O-methyladenosine
attcttgagtgtgaagaggaa

SEQ ID NO: 3603 - RNA, 21 nt, synthetic construct
  source 1..21: mol_type = other RNA
  modified_base 1: mod_base = OTHER; note = 2'-O-methyluridine-3'-phosphate
  modified_base 2: mod_base = OTHER; note = 2'-O-methyluridine-3'-phosphate
  modified_base 3: mod_base = OTHER; note = 2'-O-methylcytidine-3'-phosphate
  modified_base 4: mod_base = OTHER; note = 2'-O-methyluridine-3'-phosphate
  modified_base 5: mod_base = OTHER; note = 2'-O-methyluridine-3'-phosphate
  modified_base 6: mod_base = OTHER; note = 2'-O-methylguanosine-3'-phosphate
  modified_base 7: mod_base = OTHER; note = 2'-deoxy-2'-fluoroadenosine-3'-phosphate
  modified_base 8: mod_base = OTHER; note = 2'-O-methylguanosine-3'-phosphate
  modified_base 9: mod_base = OTHER; note = 2'-deoxy-2'-fluorouridine-3'-phosphate
  modified_base 10: mod_base = OTHER; note = 2'-deoxy-2'-fluoroguanosine-3'-phosphate
  modified_base 11: mod_base = OTHER; note = 2'-deoxy-2'-fluorouridine-3'-phosphate
  modified_base 12: mod_base = OTHER; note = 2'-O-methylguanosine-3'-phosphate
  modified_base 13: mod_base = OTHER; note = 2'-O-methyladenosine-3'-phosphate
  modified_base 14: mod_base = OTHER; note = 2'-O-methyladenosine-3'-phosphate
  modified_base 15: mod_base = OTHER; note = 2'-O-methylguanosine-3'-phosphate
  modified_base 16: mod_base = OTHER; note = 2'-O-methyladenosine-3'-phosphate
  modified_base 17: mod_base = OTHER; note = 2'-O-methylguanosine-3'-phosphate
  modified_base 18: mod_base = OTHER; note = 2'-O-methylguanosine-3'-phosphate
  modified_base 19: mod_base = OTHER; note = 2'-O-methyladenosine-3'-phosphate
  modified_base 20: mod_base = OTHER; note = 2'-O-methyladenosine-3'-phosphate
  modified_base 21: mod_base = OTHER; note = 2'-O-methyladenosine
ttcttgagtgtgaagaggaaa

SEQ ID NO: 3604 - RNA, 21 nt, synthetic construct
  source 1..21: mol_type = other RNA
  modified_base 1: mod_base = OTHER; note = 2'-O-methyluridine-3'-phosphate
  modified_base 2: mod_base = OTHER; note = 2'-O-methylcytidine-3'-phosphate
  modified_base 3: mod_base = OTHER; note = 2'-O-methyluridine-3'-phosphate
  modified_base 4: mod_base = OTHER; note = 2'-O-methyluridine-3'-phosphate
  modified_base 5: mod_base = OTHER; note = 2'-O-methylguanosine-3'-phosphate
  modified_base 6: mod_base = OTHER; note = 2'-O-methyladenosine-3'-phosphate
  modified_base 7: mod_base = OTHER; note = 2'-deoxy-2'-fluoroguanosine-3'-phosphate
  modified_base 8: mod_base = OTHER; note = 2'-O-methyluridine-3'-phosphate
  modified_base 9: mod_base = OTHER; note = 2'-deoxy-2'-fluoroguanosine-3'-phosphate
  modified_base 10: mod_base = OTHER; note = 2'-deoxy-2'-fluorouridine-3'-phosphate
  modified_base 11: mod_base = OTHER; note = 2'-deoxy-2'-fluoroguanosine-3'-phosphate
  modified_base 12: mod_base = OTHER; note = 2'-O-methyladenosine-3'-phosphate
  modified_base 13: mod_base = OTHER; note = 2'-O-methyladenosine-3'-phosphate
  modified_base 14: mod_base = OTHER; note = 2'-O-methylguanosine-3'-phosphate
  modified_base 15: mod_base = OTHER; note = 2'-O-methyladenosine-3'-phosphate
  modified_base 16: mod_base = OTHER; note = 2'-O-methylguanosine-3'-phosphate
  modified_base 17: mod_base = OTHER; note = 2'-O-methylguanosine-3'-phosphate
  modified_base 18: mod_base = OTHER; note = 2'-O-methyladenosine-3'-phosphate
  modified_base 19: mod_base = OTHER; note = 2'-O-methyladenosine-3'-phosphate
  modified_base 20: mod_base = OTHER; note = 2'-O-methyluridine-3'-phosphate
  modified_base 21: mod_base = OTHER; note = 2'-O-methyladenosine
tcttgagtgtgaagaggaata

SEQ ID NO: 3605 - RNA, 21 nt, synthetic construct
  source 1..21: mol_type = other RNA
  modified_base 1: mod_base = OTHER; note = 2'-O-methylcytidine-3'-phosphate
  modified_base 2: mod_base = OTHER; note = 2'-O-methyluridine-3'-phosphate
  modified_base 3: mod_base = OTHER; note = 2'-O-methyluridine-3'-phosphate
  modified_base 4: mod_base = OTHER; note = 2'-O-methylguanosine-3'-phosphate
  modified_base 5: mod_base = OTHER; note = 2'-O-methyladenosine-3'-phosphate
  modified_base 6: mod_base = OTHER; note = 2'-O-methylguanosine-3'-phosphate
  modified_base 7: mod_base = OTHER; note = 2'-deoxy-2'-fluorouridine-3'-phosphate
  modified_base 8: mod_base = OTHER; note = 2'-O-methylguanosine-3'-phosphate
  modified_base 9: mod_base = OTHER; note = 2'-deoxy-2'-fluorouridine-3'-phosphate
  modified_base 10: mod_base = OTHER; note = 2'-deoxy-2'-fluoroguanosine-3'-phosphate
  modified_base 11: mod_base = OTHER; note = 2'-deoxy-2'-fluoroadenosine-3'-phosphate
  modified_base 12: mod_base = OTHER; note = 2'-O-methyladenosine-3'-phosphate
  modified_base 13: mod_base = OTHER; note = 2'-O-methylguanosine-3'-phosphate
  modified_base 14: mod_base = OTHER; note = 2'-O-methyladenosine-3'-phosphate
  modified_base 15: mod_base = OTHER; note = 2'-O-methylguanosine-3'-phosphate
  modified_base 16: mod_base = OTHER; note = 2'-O-methylguanosine-3'-phosphate
  modified_base 17: mod_base = OTHER; note = 2'-O-methyladenosine-3'-phosphate
  modified_base 18: mod_base = OTHER; note = 2'-O-methyladenosine-3'-phosphate
  modified_base 19: mod_base = OTHER; note = 2'-O-methyluridine-3'-phosphate
  modified_base 20: mod_base = OTHER; note = 2'-O-methylguanosine-3'-phosphate
  modified_base 21: mod_base = OTHER; note = 2'-O-methyladenosine
cttgagtgtgaagaggaatga

SEQ ID NO: 3606 - RNA, 21 nt, synthetic construct
  source 1..21: mol_type = other RNA
  modified_base 1: mod_base = OTHER; note = 2'-O-methyluridine-3'-phosphate
  modified_base 2: mod_base = OTHER; note = 2'-O-methyluridine-3'-phosphate
  modified_base 3: mod_base = OTHER; note = 2'-O-methylguanosine-3'-phosphate
  modified_base 4: mod_base = OTHER; note = 2'-O-methyladenosine-3'-phosphate
  modified_base 5: mod_base = OTHER; note = 2'-O-methylguanosine-3'-phosphate
  modified_base 6: mod_base = OTHER; note = 2'-O-methyluridine-3'-phosphate
  modified_base 7: mod_base = OTHER; note = 2'-deoxy-2'-fluoroguanosine-3'-phosphate
  modified_base 8: mod_base = OTHER; note = 2'-O-methyluridine-3'-phosphate
  modified_base 9: mod_base = OTHER; note = 2'-deoxy-2'-fluoroguanosine-3'-phosphate
  modified_base 10: mod_base = OTHER; note = 2'-deoxy-2'-fluoroadenosine-3'-phosphate
  modified_base 11: mod_base = OTHER; note = 2'-deoxy-2'-fluoroadenosine-3'-phosphate
  modified_base 12: mod_base = OTHER; note = 2'-O-methylguanosine-3'-phosphate
  modified_base 13: mod_base = OTHER; note = 2'-O-methyladenosine-3'-phosphate
  modified_base 14: mod_base = OTHER; note = 2'-O-methylguanosine-3'-phosphate
  modified_base 15: mod_base = OTHER; note = 2'-O-methylguanosine-3'-phosphate
  modified_base 16: mod_base = OTHER; note = 2'-O-methyladenosine-3'-phosphate
  modified_base 17: mod_base = OTHER; note = 2'-O-methyladenosine-3'-phosphate
  modified_base 18: mod_base = OTHER; note = 2'-O-methyluridine-3'-phosphate
  modified_base 19: mod_base = OTHER; note = 2'-O-methylguanosine-3'-phosphate
  modified_base 20: mod_base = OTHER; note = 2'-O-methyluridine-3'-phosphate
  modified_base 21: mod_base = OTHER; note = 2'-O-methyladenosine
ttgagtgtgaagaggaatgta

SEQ ID NO: 3607 - RNA, 21 nt, synthetic construct
  source 1..21: mol_type = other RNA
  modified_base 1: mod_base = OTHER; note = 2'-O-methyluridine-3'-phosphate
  modified_base 2: mod_base = OTHER; note = 2'-O-methylguanosine-3'-phosphate
  modified_base 3: mod_base = OTHER; note = 2'-O-methyladenosine-3'-phosphate
  modified_base 4: mod_base = OTHER; note = 2'-O-methylguanosine-3'-phosphate
  modified_base 5: mod_base = OTHER; note = 2'-O-methyluridine-3'-phosphate
  modified_base 6: mod_base = OTHER; note = 2'-O-methylguanosine-3'-phosphate
  modified_base 7: mod_base = OTHER; note = 2'-deoxy-2'-fluorouridine-3'-phosphate
  modified_base 8: mod_base = OTHER; note = 2'-O-methylguanosine-3'-phosphate
  modified_base 9: mod_base = OTHER; note = 2'-deoxy-2'-fluoroadenosine-3'-phosphate
  modified_base 10: mod_base = OTHER; note = 2'-deoxy-2'-fluoroadenosine-3'-phosphate
  modified_base 11: mod_base = OTHER; note = 2'-deoxy-2'-fluoroguanosine-3'-phosphate
  modified_base 12: mod_base = OTHER; note = 2'-O-methyladenosine-3'-phosphate
  modified_base 13: mod_base = OTHER; note = 2'-O-methylguanosine-3'-phosphate
  modified_base 14: mod_base = OTHER; note = 2'-O-methylguanosine-3'-phosphate
  modified_base 15: mod_base = OTHER; note = 2'-O-methyladenosine-3'-phosphate
  modified_base 16: mod_base = OTHER; note = 2'-O-methyladenosine-3'-phosphate
  modified_base 17: mod_base = OTHER; note = 2'-O-methyluridine-3'-phosphate
  modified_base 18: mod_base = OTHER; note = 2'-O-methylguanosine-3'-phosphate
  modified_base 19: mod_base = OTHER; note = 2'-O-methyluridine-3'-phosphate
  modified_base 20: mod_base = OTHER; note = 2'-O-methyladenosine-3'-phosphate
  modified_base 21: mod_base = OTHER; note = 2'-O-methyladenosine
tgagtgtgaagaggaatgtaa

SEQ ID NO: 3608 - RNA, 21 nt, synthetic construct
  source 1..21: mol_type = other RNA
  modified_base 1: mod_base = OTHER; note = 2'-O-methylguanosine-3'-phosphate
  modified_base 2: mod_base = OTHER; note = 2'-O-methyladenosine-3'-phosphate
  modified_base 3: mod_base = OTHER; note = 2'-O-methylguanosine-3'-phosphate
  modified_base 4: mod_base = OTHER; note = 2'-O-methyluridine-3'-phosphate
  modified_base 5: mod_base = OTHER; note = 2'-O-methylguanosine-3'-phosphate
  modified_base 6: mod_base = OTHER; note = 2'-O-methyluridine-3'-phosphate
  modified_base 7: mod_base = OTHER; note = 2'-deoxy-2'-fluoroguanosine-3'-phosphate
  modified_base 8: mod_base = OTHER; note = 2'-O-methyladenosine-3'-phosphate
  modified_base 9: mod_base = OTHER; note = 2'-deoxy-2'-fluoroadenosine-3'-phosphate
  modified_base 10: mod_base = OTHER; note = 2'-deoxy-2'-fluoroguanosine-3'-phosphate
  modified_base 11: mod_base = OTHER; note = 2'-deoxy-2'-fluoroadenosine-3'-phosphate
  modified_base 12: mod_base = OTHER; note = 2'-O-methylguanosine-3'-phosphate
  modified_base 13: mod_base = OTHER; note = 2'-O-methylguanosine-3'-phosphate
  modified_base 14: mod_base = OTHER; note = 2'-O-methyladenosine-3'-phosphate
  modified_base 15: mod_base = OTHER; note = 2'-O-methyladenosine-3'-phosphate
  modified_base 16: mod_base = OTHER; note = 2'-O-methyluridine-3'-phosphate
  modified_base 17: mod_base = OTHER; note = 2'-O-methylguanosine-3'-phosphate
  modified_base 18: mod_base = OTHER; note = 2'-O-methyluridine-3'-phosphate
  modified_base 19: mod_base = OTHER; note = 2'-O-methyladenosine-3'-phosphate
  modified_base 20: mod_base = OTHER; note = 2'-O-methyluridine-3'-phosphate
  modified_base 21: mod_base = OTHER; note = 2'-O-methyladenosine
gagtgtgaagaggaatgtata

SEQ ID NO: 3609 - RNA, 21 nt, synthetic construct
  source 1..21: mol_type = other RNA
  modified_base 1: mod_base = OTHER; note = 2'-O-methyladenosine-3'-phosphate
  modified_base 2: mod_base = OTHER; note = 2'-O-methylguanosine-3'-phosphate
  modified_base 3: mod_base = OTHER; note = 2'-O-methyluridine-3'-phosphate
  modified_base 4: mod_base = OTHER; note = 2'-O-methylguanosine-3'-phosphate
  modified_base 5: mod_base = OTHER; note = 2'-O-methyluridine-3'-phosphate
  modified_base 6: mod_base = OTHER; note = 2'-O-methylguanosine-3'-phosphate
  modified_base 7: mod_base = OTHER; note = 2'-deoxy-2'-fluoroadenosine-3'-phosphate
  modified_base 8: mod_base = OTHER; note = 2'-O-methyladenosine-3'-phosphate
  modified_base 9: mod_base = OTHER; note = 2'-deoxy-2'-fluoroguanosine-3'-phosphate
  modified_base 10: mod_base = OTHER; note = 2'-deoxy-2'-fluoroadenosine-3'-phosphate
  modified_base 11: mod_base = OTHER; note = 2'-deoxy-2'-fluoroguanosine-3'-phosphate
  modified_base 12: mod_base = OTHER; note = 2'-O-methylguanosine-3'-phosphate
  modified_base 13: mod_base = OTHER; note = 2'-O-methyladenosine-3'-phosphate
  modified_base 14: mod_base = OTHER; note = 2'-O-methyladenosine-3'-phosphate
  modified_base 15: mod_base = OTHER; note = 2'-O-methyluridine-3'-phosphate
  modified_base 16: mod_base = OTHER; note = 2'-O-methylguanosine-3'-phosphate
  modified_base 17: mod_base = OTHER; note = 2'-O-methyluridine-3'-phosphate
  modified_base 18: mod_base = OTHER; note = 2'-O-methyladenosine-3'-phosphate
  modified_base 19: mod_base = OTHER; note = 2'-O-methyluridine-3'-phosphate
  modified_base 20: mod_base = OTHER; note = 2'-O-methylguanosine-3'-phosphate
  modified_base 21: mod_base = OTHER; note = 2'-O-methyladenosine
agtgtgaagaggaatgtatga

SEQ ID NO: 3610 - RNA, 21 nt, synthetic construct
  source 1..21: mol_type = other RNA
  modified_base 1: mod_base = OTHER; note = 2'-O-methylguanosine-3'-phosphate
  modified_base 2: mod_base = OTHER; note = 2'-O-methyluridine-3'-phosphate
  modified_base 3: mod_base = OTHER; note = 2'-O-methylguanosine-3'-phosphate
  modified_base 4: mod_base = OTHER; note = 2'-O-methyluridine-3'-phosphate
  modified_base 5: mod_base = OTHER; note = 2'-O-methylguanosine-3'-phosphate
  modified_base 6: mod_base = OTHER; note = 2'-O-methyladenosine-3'-phosphate
  modified_base 7: mod_base = OTHER; note = 2'-deoxy-2'-fluoroadenosine-3'-phosphate
  modified_base 8: mod_base = OTHER; note = 2'-O-methylguanosine-3'-phosphate
  modified_base 9: mod_base = OTHER; note = 2'-deoxy-2'-fluoroadenosine-3'-phosphate
  modified_base 10: mod_base = OTHER; note = 2'-deoxy-2'-fluoroguanosine-3'-phosphate
  modified_base 11: mod_base = OTHER; note = 2'-deoxy-2'-fluoroguanosine-3'-phosphate
  modified_base 12: mod_base = OTHER; note = 2'-O-methyladenosine-3'-phosphate
  modified_base 13: mod_base = OTHER; note = 2'-O-methyladenosine-3'-phosphate
  modified_base 14: mod_base = OTHER; note = 2'-O-methyluridine-3'-phosphate
  modified_base 15: mod_base = OTHER; note = 2'-O-methylguanosine-3'-phosphate
  modified_base 16: mod_base = OTHER; note = 2'-O-methyluridine-3'-phosphate
  modified_base 17: mod_base = OTHER; note = 2'-O-methyladenosine-3'-phosphate
  modified_base 18: mod_base = OTHER; note = 2'-O-methyluridine-3'-phosphate
  modified_base 19: mod_base = OTHER; note = 2'-O-methylguanosine-3'-phosphate
  modified_base 20: mod_base = OTHER; note = 2'-O-methylcytidine-3'-phosphate
  modified_base 21: mod_base = OTHER; note = 2'-O-methyladenosine
gtgtgaagaggaatgtatgca

SEQ ID NO: 3611 - RNA, 21 nt, synthetic construct
  source 1..21: mol_type = other RNA
  modified_base 1: mod_base = OTHER; note = 2'-O-methyluridine-3'-phosphate
  modified_base 2: mod_base = OTHER; note = 2'-O-methylguanosine-3'-phosphate
  modified_base 3: mod_base = OTHER; note = 2'-O-methyluridine-3'-phosphate
  modified_base 4: mod_base = OTHER; note = 2'-O-methylguanosine-3'-phosphate
  modified_base 5: mod_base = OTHER; note = 2'-O-methyladenosine-3'-phosphate
  modified_base 6: mod_base = OTHER; note = 2'-O-methyladenosine-3'-phosphate
  modified_base 7: mod_base = OTHER; note = 2'-deoxy-2'-fluoroguanosine-3'-phosphate
  modified_base 8: mod_base = OTHER; note = 2'-O-methyladenosine-3'-phosphate
  modified_base 9: mod_base = OTHER; note = 2'-deoxy-2'-fluoroguanosine-3'-phosphate
  modified_base 10: mod_base = OTHER; note = 2'-deoxy-2'-fluoroguanosine-3'-phosphate
  modified_base 11: mod_base = OTHER; note = 2'-deoxy-2'-fluoroadenosine-3'-phosphate
  modified_base 12: mod_base = OTHER; note = 2'-O-methyladenosine-3'-phosphate
  modified_base 13: mod_base = OTHER; note = 2'-O-methyluridine-3'-phosphate
  modified_base 14: mod_base = OTHER; note = 2'-O-methylguanosine-3'-phosphate
  modified_base 15: mod_base = OTHER; note = 2'-O-methyluridine-3'-phosphate
  modified_base 16: mod_base = OTHER; note = 2'-O-methyladenosine-3'-phosphate
  modified_base 17: mod_base = OTHER; note = 2'-O-methyluridine-3'-phosphate
  modified_base 18: mod_base = OTHER; note = 2'-O-methylguanosine-3'-phosphate
  modified_base 19: mod_base = OTHER; note = 2'-O-methylcytidine-3'-phosphate
  modified_base 20: mod_base = OTHER; note = 2'-O-methyladenosine-3'-phosphate
  modified_base 21: mod_base = OTHER; note = 2'-O-methyladenosine
tgtgaagaggaatgtatgcaa

SEQ ID NO: 3612 - RNA, 21 nt, synthetic construct
  source 1..21: mol_type = other RNA
  modified_base 1: mod_base = OTHER; note = 2'-O-methylguanosine-3'-phosphate
  modified_base 2: mod_base = OTHER; note = 2'-O-methyluridine-3'-phosphate
  modified_base 3: mod_base = OTHER; note = 2'-O-methylguanosine-3'-phosphate
  modified_base 4: mod_base = OTHER; note = 2'-O-methyladenosine-3'-phosphate
  modified_base 5: mod_base = OTHER; note = 2'-O-methyladenosine-3'-phosphate
  modified_base 6: mod_base = OTHER; note = 2'-O-methylguanosine-3'-phosphate
  modified_base 7: mod_base = OTHER; note = 2'-deoxy-2'-fluoroadenosine-3'-phosphate
  modified_base 8: mod_base = OTHER; note = 2'-O-methylguanosine-3'-phosphate
  modified_base 9: mod_base = OTHER; note = 2'-deoxy-2'-fluoroguanosine-3'-phosphate
  modified_base 10: mod_base = OTHER; note = 2'-deoxy-2'-fluoroadenosine-3'-phosphate
  modified_base 11: mod_base = OTHER; note = 2'-deoxy-2'-fluoroadenosine-3'-phosphate
  modified_base 12: mod_base = OTHER; note = 2'-O-methyluridine-3'-phosphate
  modified_base 13: mod_base = OTHER; note = 2'-O-methylguanosine-3'-phosphate
  modified_base 14: mod_base = OTHER; note = 2'-O-methyluridine-3'-phosphate
  modified_base 15: mod_base = OTHER; note = 2'-O-methyladenosine-3'-phosphate
  modified_base 16: mod_base = OTHER; note = 2'-O-methyluridine-3'-phosphate
  modified_base 17: mod_base = OTHER; note = 2'-O-methylguanosine-3'-phosphate
  modified_base 18: mod_base = OTHER; note = 2'-O-methylcytidine-3'-phosphate
  modified_base 19: mod_base = OTHER; note = 2'-O-methyladenosine-3'-phosphate
  modified_base 20: mod_base = OTHER; note = 2'-O-methyluridine-3'-phosphate
  modified_base 21: mod_base = OTHER; note = 2'-O-methyladenosine
gtgaagaggaatgtatgcata

SEQ ID NO: 3613 - RNA, 21 nt, synthetic construct
  source 1..21: mol_type = other RNA
  modified_base 1: mod_base = OTHER; note = 2'-O-methyluridine-3'-phosphate
  modified_base 2: mod_base = OTHER; note = 2'-O-methylguanosine-3'-phosphate
  modified_base 3: mod_base = OTHER; note = 2'-O-methyladenosine-3'-phosphate
  modified_base 4: mod_base = OTHER; note = 2'-O-methyladenosine-3'-phosphate
  modified_base 5: mod_base = OTHER; note = 2'-O-methylguanosine-3'-phosphate
  modified_base 6: mod_base = OTHER; note = 2'-O-methyladenosine-3'-phosphate
  modified_base 7: mod_base = OTHER; note = 2'-deoxy-2'-fluoroguanosine-3'-phosphate
  modified_base 8: mod_base = OTHER; note = 2'-O-methylguanosine-3'-phosphate
  modified_base 9: mod_base = OTHER; note = 2'-deoxy-2'-fluoroadenosine-3'-phosphate
  modified_base 10: mod_base = OTHER; note = 2'-deoxy-2'-fluoroadenosine-3'-phosphate
  modified_base 11: mod_base = OTHER; note = 2'-deoxy-2'-fluorouridine-3'-phosphate
  modified_base 12: mod_base = OTHER; note = 2'-O-methylguanosine-3'-phosphate
  modified_base 13: mod_base = OTHER; note = 2'-O-methyluridine-3'-phosphate
  modified_base 14: mod_base = OTHER; note = 2'-O-methyladenosine-3'-phosphate
  modified_base 15: mod_base = OTHER; note = 2'-O-methyluridine-3'-phosphate
  modified_base 16: mod_base = OTHER; note = 2'-O-methylguanosine-3'-phosphate
  modified_base 17: mod_base = OTHER; note = 2'-O-methylcytidine-3'-phosphate
  modified_base 18: mod_base = OTHER; note = 2'-O-methyladenosine-3'-phosphate
  modified_base 19: mod_base = OTHER; note = 2'-O-methyluridine-3'-phosphate
  modified_base 20: mod_base = OTHER; note = 2'-O-methyluridine-3'-phosphate
  modified_base 21: mod_base = OTHER; note = 2'-O-methyladenosine
tgaagaggaatgtatgcatta

SEQ ID NO: 3614 - RNA, 21 nt, synthetic construct
  source 1..21: mol_type = other RNA
  modified_base 1: mod_base = OTHER; note = 2'-O-methylguanosine-3'-phosphate
  modified_base 2: mod_base = OTHER; note = 2'-O-methyladenosine-3'-phosphate
  modified_base 3: mod_base = OTHER; note = 2'-O-methyladenosine-3'-phosphate
  modified_base 4: mod_base = OTHER; note = 2'-O-methylguanosine-3'-phosphate
  modified_base 5: mod_base = OTHER; note = 2'-O-methyladenosine-3'-phosphate
  modified_base 6: mod_base = OTHER; note = 2'-O-methylguanosine-3'-phosphate
  modified_base 7: mod_base = OTHER; note = 2'-deoxy-2'-fluoroguanosine-3'-phosphate
  modified_base 8: mod_base = OTHER; note = 2'-O-methyladenosine-3'-phosphate
  modified_base 9: mod_base = OTHER; note = 2'-deoxy-2'-fluoroadenosine-3'-phosphate
  modified_base 10: mod_base = OTHER; note = 2'-deoxy-2'-fluorouridine-3'-phosphate
  modified_base 11: mod_base = OTHER; note = 2'-deoxy-2'-fluoroguanosine-3'-phosphate
  modified_base 12: mod_base = OTHER; note = 2'-O-methyluridine-3'-phosphate
  modified_base 13: mod_base = OTHER; note = 2'-O-methyladenosine-3'-phosphate
  modified_base 14: mod_base = OTHER; note = 2'-O-methyluridine-3'-phosphate
  modified_base 15: mod_base = OTHER; note = 2'-O-methylguanosine-3'-phosphate
  modified_base 16: mod_base = OTHER; note = 2'-O-methylcytidine-3'-phosphate
  modified_base 17: mod_base = OTHER; note = 2'-O-methyladenosine-3'-phosphate
  modified_base 18: mod_base = OTHER; note = 2'-O-methyluridine-3'-phosphate
  modified_base 19: mod_base = OTHER; note = 2'-O-methyluridine-3'-phosphate
  modified_base 20: mod_base = OTHER; note = 2'-O-methylguanosine-3'-phosphate
  modified_base 21: mod_base = OTHER; note = 2'-O-methyladenosine
gaagaggaatgtatgcattga

SEQ ID NO: 3615 - RNA, 21 nt, synthetic construct
  source 1..21: mol_type = other RNA
  modified_base 1: mod_base = OTHER; note = 2'-O-methyladenosine-3'-phosphate
  modified_base 2: mod_base = OTHER; note = 2'-O-methyladenosine-3'-phosphate
  modified_base 3: mod_base = OTHER; note = 2'-O-methylguanosine-3'-phosphate
  modified_base 4: mod_base = OTHER; note = 2'-O-methyladenosine-3'-phosphate
  modified_base 5: mod_base = OTHER; note = 2'-O-methylguanosine-3'-phosphate
  modified_base 6: mod_base = OTHER; note = 2'-O-methylguanosine-3'-phosphate
  modified_base 7: mod_base = OTHER; note = 2'-deoxy-2'-fluoroadenosine-3'-phosphate
  modified_base 8: mod_base = OTHER; note = 2'-O-methyladenosine-3'-phosphate
  modified_base 9: mod_base = OTHER; note = 2'-deoxy-2'-fluorouridine-3'-phosphate
  modified_base 10: mod_base = OTHER; note = 2'-deoxy-2'-fluoroguanosine-3'-phosphate
  modified_base 11: mod_base = OTHER; note = 2'-deoxy-2'-fluorouridine-3'-phosphate
  modified_base 12: mod_base = OTHER; note = 2'-O-methyladenosine-3'-phosphate
  modified_base 13: mod_base = OTHER; note = 2'-O-methyluridine-3'-phosphate
  modified_base 14: mod_base = OTHER; note = 2'-O-methylguanosine-3'-phosphate
  modified_base 15: mod_base = OTHER; note = 2'-O-methylcytidine-3'-phosphate
  modified_base 16: mod_base = OTHER; note = 2'-O-methyladenosine-3'-phosphate
  modified_base 17: mod_base = OTHER; note = 2'-O-methyluridine-3'-phosphate
  modified_base 18: mod_base = OTHER; note = 2'-O-methyluridine-3'-phosphate
  modified_base 19: mod_base = OTHER; note = 2'-O-methylguanosine-3'-phosphate
  modified_base 20: mod_base = OTHER; note = 2'-O-methylcytidine-3'-phosphate
  modified_base 21: mod_base = OTHER; note = 2'-O-methyladenosine
aagaggaatgtatgcattgca

SEQ ID NO: 3616 - RNA, 21 nt, synthetic construct
  source 1..21: mol_type = other RNA
  modified_base 1: mod_base = OTHER; note = 2'-O-methyladenosine-3'-phosphate
  modified_base 2: mod_base = OTHER; note = 2'-O-methylguanosine-3'-phosphate
  modified_base 3: mod_base = OTHER; note = 2'-O-methyladenosine-3'-phosphate
  modified_base 4: mod_base = OTHER; note = 2'-O-methylguanosine-3'-phosphate
  modified_base 5: mod_base = OTHER; note = 2'-O-methylguanosine-3'-phosphate
  modified_base 6: mod_base = OTHER; note = 2'-O-methyladenosine-3'-phosphate
  modified_base 7: mod_base = OTHER; note = 2'-deoxy-2'-fluoroadenosine-3'-phosphate
  modified_base 8: mod_base = OTHER; note = 2'-O-methyluridine-3'-phosphate
  modified_base 9: mod_base = OTHER; note = 2'-deoxy-2'-fluoroguanosine-3'-phosphate
  modified_base 10: mod_base = OTHER; note = 2'-deoxy-2'-fluorouridine-3'-phosphate
  modified_base 11: mod_base = OTHER; note = 2'-deoxy-2'-fluoroadenosine-3'-phosphate
  modified_base 12: mod_base = OTHER; note = 2'-O-methyluridine-3'-phosphate
  modified_base 13: mod_base = OTHER; note = 2'-O-methylguanosine-3'-phosphate
  modified_base 14: mod_base = OTHER; note = 2'-O-methylcytidine-3'-phosphate
  modified_base 15: mod_base = OTHER; note = 2'-O-methyladenosine-3'-phosphate
  modified_base 16: mod_base = OTHER; note = 2'-O-methyluridine-3'-phosphate
  modified_base 17: mod_base = OTHER; note = 2'-O-methyluridine-3'-phosphate
  modified_base 18: mod_base = OTHER; note = 2'-O-methylguanosine-3'-phosphate
  modified_base 19: mod_base = OTHER; note = 2'-O-methylcytidine-3'-phosphate
  modified_base 20: mod_base = OTHER; note = 2'-O-methyladenosine-3'-phosphate
  modified_base 21: mod_base = OTHER; note = 2'-O-methyladenosine
agaggaatgtatgcattgcaa

SEQ ID NO: 3617 - RNA, 21 nt, synthetic construct
  source 1..21: mol_type = other RNA
  modified_base 1: mod_base = OTHER; note = 2'-O-methylguanosine-3'-phosphate
  modified_base 2: mod_base = OTHER; note = 2'-O-methyladenosine-3'-phosphate
  modified_base 3: mod_base = OTHER; note = 2'-O-methylguanosine-3'-phosphate
  modified_base 4: mod_base = OTHER; note = 2'-O-methylguanosine-3'-phosphate
  modified_base 5: mod_base = OTHER; note = 2'-O-methyladenosine-3'-phosphate
  modified_base 6: mod_base = OTHER; note = 2'-O-methyladenosine-3'-phosphate
  modified_base 7: mod_base = OTHER; note = 2'-deoxy-2'-fluorouridine-3'-phosphate
  modified_base 8: mod_base = OTHER; note = 2'-O-methylguanosine-3'-phosphate
  modified_base 9: mod_base = OTHER; note = 2'-deoxy-2'-fluorouridine-3'-phosphate
  modified_base 10: mod_base = OTHER; note = 2'-deoxy-2'-fluoroadenosine-3'-phosphate
  modified_base 11: mod_base = OTHER; note = 2'-deoxy-2'-fluorouridine-3'-phosphate
  modified_base 12: mod_base = OTHER; note = 2'-O-methylguanosine-3'-phosphate
  modified_base 13: mod_base = OTHER; note = 2'-O-methylcytidine-3'-phosphate
  modified_base 14: mod_base = OTHER; note = 2'-O-methyladenosine-3'-phosphate
  modified_base 15: mod_base = OTHER; note = 2'-O-methyluridine-3'-phosphate
  modified_base 16: mod_base = OTHER; note = 2'-O-methyluridine-3'-phosphate
  modified_base 17: mod_base = OTHER; note = 2'-O-methylguanosine-3'-phosphate
  modified_base 18: mod_base = OTHER; note = 2'-O-methylcytidine-3'-phosphate
  modified_base 19: mod_base = OTHER; note = 2'-O-methyladenosine-3'-phosphate
  modified_base 20: mod_base = OTHER; note = 2'-O-methylguanosine-3'-phosphate
  modified_base 21: mod_base = OTHER; note = 2'-O-methyladenosine
gaggaatgtatgcattgcaga

SEQ ID NO: 3618 - RNA, 21 nt, synthetic construct
  source 1..21: mol_type = other RNA
  modified_base 1: mod_base = OTHER; note = 2'-O-methylguanosine-3'-phosphate
  modified_base 2: mod_base = OTHER; note = 2'-O-methylguanosine-3'-phosphate
  modified_base 3: mod_base = OTHER; note = 2'-O-methyladenosine-3'-phosphate
  modified_base 4: mod_base = OTHER; note = 2'-O-methyladenosine-3'-phosphate
  modified_base 5: mod_base = OTHER; note = 2'-O-methyluridine-3'-phosphate
  modified_base 6: mod_base = OTHER; note = 2'-O-methylguanosine-3'-phosphate
  modified_base 7: mod_base = OTHER; note = 2'-deoxy-2'-fluorouridine-3'-phosphate
  modified_base 8: mod_base = OTHER; note = 2'-O-methyladenosine-3'-phosphate
  modified_base 9: mod_base = OTHER; note = 2'-deoxy-2'-fluorouridine-3'-phosphate
  modified_base 10: mod_base = OTHER; note = 2'-deoxy-2'-fluoroguanosine-3'-phosphate
  modified_base 11: mod_base = OTHER; note = 2'-deoxy-2'-fluorocytidine-3'-phosphate
  modified_base 12: mod_base = OTHER; note = 2'-O-methyladenosine-3'-phosphate
  modified_base 13: mod_base = OTHER; note = 2'-O-methyluridine-3'-phosphate
  modified_base 14: mod_base = OTHER; note = 2'-O-methyluridine-3'-phosphate
  modified_base 15: mod_base = OTHER; note = 2'-O-methylguanosine-3'-phosphate
  modified_base 16: mod_base = OTHER; note = 2'-O-methylcytidine-3'-phosphate
  modified_base 17: mod_base = OTHER; note = 2'-O-methyladenosine-3'-phosphate
  modified_base 18: mod_base = OTHER; note = 2'-O-methylguanosine-3'-phosphate
  modified_base 19: mod_base = OTHER; note = 2'-O-methyluridine-3'-phosphate
  modified_base 20: mod_base = OTHER; note = 2'-O-methylguanosine-3'-phosphate
  modified_base 21: mod_base = OTHER; note = 2'-O-methyladenosine
ggaatgtatgcattgcagtga

SEQ ID NO: 3619 - RNA, 21 nt, synthetic construct
  source 1..21: mol_type = other RNA
  modified_base 1: mod_base = OTHER; note = 2'-O-methylguanosine-3'-phosphate
  modified_base 2: mod_base = OTHER; note = 2'-O-methyladenosine-3'-phosphate
  modified_base 3: mod_base = OTHER; note = 2'-O-methyladenosine-3'-phosphate
  modified_base 4: mod_base = OTHER; note = 2'-O-methyluridine-3'-phosphate
  modified_base 5: mod_base = OTHER; note = 2'-O-methylguanosine-3'-phosphate
  modified_base 6: mod_base = OTHER; note = 2'-O-methyluridine-3'-phosphate
  modified_base 7: mod_base = OTHER; note = 2'-deoxy-2'-fluoroadenosine-3'-phosphate
  modified_base 8: mod_base = OTHER; note = 2'-O-methyluridine-3'-phosphate
  modified_base 9: mod_base = OTHER; note = 2'-deoxy-2'-fluoroguanosine-3'-phosphate
  modified_base 10: mod_base = OTHER; note = 2'-deoxy-2'-fluorocytidine-3'-phosphate
  modified_base 11: mod_base = OTHER; note = 2'-deoxy-2'-fluoroadenosine-3'-phosphate
  modified_base 12: mod_base = OTHER; note = 2'-O-methyluridine-3'-phosphate
  modified_base 13: mod_base = OTHER; note = 2'-O-methyluridine-3'-phosphate
  modified_base 14: mod_base = OTHER; note = 2'-O-methylguanosine-3'-phosphate
  modified_base 15: mod_base = OTHER; note = 2'-O-methylcytidine-3'-phosphate
  modified_base 16: mod_base = OTHER; note = 2'-O-methyladenosine-3'-phosphate
  modified_base 17: mod_base = OTHER; note = 2'-O-methylguanosine-3'-phosphate
  modified_base 18: mod_base = OTHER; note = 2'-O-methyluridine-3'-phosphate
  modified_base 19: mod_base = OTHER; note = 2'-O-methylguanosine-3'-phosphate
  modified_base 20: mod_base = OTHER; note = 2'-O-methylguanosine-3'-phosphate
  modified_base 21: mod_base = OTHER; note = 2'-O-methyladenosine
gaatgtatgcattgcagtgga

SEQ ID NO: 3620 - RNA, 21 nt, synthetic construct
  source 1..21: mol_type = other RNA
  modified_base 1: mod_base = OTHER; note = 2'-O-methyladenosine-3'-phosphate
  modified_base 2: mod_base = OTHER; note = 2'-O-methyladenosine-3'-phosphate
  modified_base 3: mod_base = OTHER; note = 2'-O-methyluridine-3'-phosphate
  modified_base 4: mod_base = OTHER; note = 2'-O-methylguanosine-3'-phosphate
  modified_base 5: mod_base = OTHER; note = 2'-O-methyluridine-3'-phosphate
  modified_base 6: mod_base = OTHER; note = 2'-O-methyladenosine-3'-phosphate
  modified_base 7: mod_base = OTHER; note = 2'-deoxy-2'-fluorouridine-3'-phosphate
  modified_base 8: mod_base = OTHER; note = 2'-O-methylguanosine-3'-phosphate
  modified_base 9: mod_base = OTHER; note = 2'-deoxy-2'-fluorocytidine-3'-phosphate
  modified_base 10: mod_base = OTHER; note = 2'-deoxy-2'-fluoroadenosine-3'-phosphate
  modified_base 11: mod_base = OTHER; note = 2'-deoxy-2'-fluorouridine-3'-phosphate
  modified_base 12: mod_base = OTHER; note = 2'-O-methyluridine-3'-phosphate
  modified_base 13: mod_base = OTHER; note = 2'-O-methylguanosine-3'-phosphate
  modified_base 14: mod_base = OTHER; note = 2'-O-methylcytidine-3'-phosphate
  modified_base 15: mod_base = OTHER; note = 2'-O-methyladenosine-3'-phosphate
  modified_base 16: mod_base = OTHER; note = 2'-O-methylguanosine-3'-phosphate
  modified_base 17: mod_base = OTHER; note = 2'-O-methyluridine-3'-phosphate
  modified_base 18: mod_base = OTHER; note = 2'-O-methylguanosine-3'-phosphate
  modified_base 19: mod_base = OTHER; note = 2'-O-methylguanosine-3'-phosphate
  modified_base 20: mod_base = OTHER; note = 2'-O-methyladenosine-3'-phosphate
  modified_base 21: mod_base = OTHER; note = 2'-O-methyladenosine
aatgtatgcattgcagtggaa

SEQ ID NO: 3621 - RNA, 21 nt, synthetic construct
  source 1..21: mol_type = other RNA
  modified_base 1: mod_base = OTHER; note = 2'-O-methyladenosine-3'-phosphate
  modified_base 2: mod_base = OTHER; note = 2'-O-methyluridine-3'-phosphate
  modified_base 3: mod_base = OTHER; note = 2'-O-methylguanosine-3'-phosphate
  modified_base 4: mod_base = OTHER; note = 2'-O-methyluridine-3'-phosphate
  modified_base 5: mod_base = OTHER; note = 2'-O-methyladenosine-3'-phosphate
  modified_base 6: mod_base = OTHER; note = 2'-O-methyluridine-3'-phosphate
  modified_base 7: mod_base = OTHER; note = 2'-deoxy-2'-fluoroguanosine-3'-phosphate
  modified_base 8: mod_base = OTHER; note = 2'-O-methylcytidine-3'-phosphate
  modified_base 9: mod_base = OTHER; note = 2'-deoxy-2'-fluoroadenosine-3'-phosphate
  modified_base 10: mod_base = OTHER; note = 2'-deoxy-2'-fluorouridine-3'-phosphate
  modified_base 11: mod_base = OTHER; note = 2'-deoxy-2'-fluorouridine-3'-phosphate
  modified_base 12: mod_base = OTHER; note = 2'-O-methylguanosine-3'-phosphate
  modified_base 13: mod_base = OTHER; note = 2'-O-methylcytidine-3'-phosphate
  modified_base 14: mod_base = OTHER; note = 2'-O-methyladenosine-3'-phosphate
  modified_base 15: mod_base = OTHER; note = 2'-O-methylguanosine-3'-phosphate
  modified_base 16: mod_base = OTHER; note = 2'-O-methyluridine-3'-phosphate
  modified_base 17: mod_base = OTHER; note = 2'-O-methylguanosine-3'-phosphate
  modified_base 18: mod_base = OTHER; note = 2'-O-methylguanosine-3'-phosphate
  modified_base 19: mod_base = OTHER; note = 2'-O-methyladenosine-3'-phosphate
  modified_base 20: mod_base = OTHER; note = 2'-O-methylguanosine-3'-phosphate
  modified_base 21: mod_base = OTHER; note = 2'-O-methyladenosine
atgtatgcattgcagtggaga

SEQ ID NO: 3622 - RNA, 21 nt, synthetic construct
  source 1..21: mol_type = other RNA
  modified_base 1: mod_base = OTHER; note = 2'-O-methyluridine-3'-phosphate
  modified_base 2: mod_base = OTHER; note = 2'-O-methylguanosine-3'-phosphate
  modified_base 3: mod_base = OTHER; note = 2'-O-methyluridine-3'-phosphate
  modified_base 4: mod_base = OTHER; note = 2'-O-methyladenosine-3'-phosphate
  modified_base 5: mod_base = OTHER; note = 2'-O-methyluridine-3'-phosphate
  modified_base 6: mod_base = OTHER; note = 2'-O-methylguanosine-3'-phosphate
  modified_base 7: mod_base = OTHER; note = 2'-deoxy-2'-fluorocytidine-3'-phosphate
  modified_base 8: mod_base = OTHER; note = 2'-O-methyladenosine-3'-phosphate
  modified_base 9: mod_base = OTHER; note = 2'-deoxy-2'-fluorouridine-3'-phosphate
  modified_base 10: mod_base = OTHER; note = 2'-deoxy-2'-fluorouridine-3'-phosphate
  modified_base 11: mod_base = OTHER; note = 2'-deoxy-2'-fluoroguanosine-3'-phosphate
  modified_base 12: mod_base = OTHER; note = 2'-O-methylcytidine-3'-phosphate
  modified_base 13: mod_base = OTHER; note = 2'-O-methyladenosine-3'-phosphate
  modified_base 14: mod_base = OTHER; note = 2'-O-methylguanosine-3'-phosphate
  modified_base 15: mod_base = OTHER; note = 2'-O-methyluridine-3'-phosphate
  modified_base 16: mod_base = OTHER; note = 2'-O-methylguanosine-3'-phosphate
  modified_base 17: mod_base = OTHER; note = 2'-O-methylguanosine-3'-phosphate
  modified_base 18: mod_base = OTHER; note = 2'-O-methyladenosine-3'-phosphate
  modified_base 19: mod_base = OTHER; note = 2'-O-methylguanosine-3'-phosphate
  modified_base 20: mod_base = OTHER; note = 2'-O-methyladenosine-3'-phosphate
  modified_base 21: mod_base = OTHER; note = 2'-O-methyladenosine
tgtatgcattgcagtggagaa

SEQ ID NO: 3623 - RNA, 21 nt, synthetic construct
  source 1..21: mol_type = other RNA
  modified_base 1: mod_base = OTHER; note = 2'-O-methylguanosine-3'-phosphate
  modified_base 2: mod_base = OTHER; note = 2'-O-methyluridine-3'-phosphate
  modified_base 3: mod_base = OTHER; note = 2'-O-methyladenosine-3'-phosphate
  modified_base 4: mod_base = OTHER; note = 2'-O-methyluridine-3'-phosphate
  modified_base 5: mod_base = OTHER; note = 2'-O-methylguanosine-3'-phosphate
  modified_base 6: mod_base = OTHER; note = 2'-O-methylcytidine-3'-phosphate
  modified_base 7: mod_base = OTHER; note = 2'-deoxy-2'-fluoroadenosine-3'-phosphate
  modified_base 8: mod_base = OTHER; note = 2'-O-methyluridine-3'-phosphate
  modified_base 9: mod_base = OTHER; note = 2'-deoxy-2'-fluorouridine-3'-phosphate
  modified_base 10: mod_base = OTHER; note = 2'-deoxy-2'-fluoroguanosine-3'-phosphate
  modified_base 11: mod_base = OTHER; note = 2'-deoxy-2'-fluorocytidine-3'-phosphate
  modified_base 12: mod_base = OTHER; note = 2'-O-methyladenosine-3'-phosphate
  modified_base 13: mod_base = OTHER; note = 2'-O-methylguanosine-3'-phosphate
  modified_base 14: mod_base = OTHER; note = 2'-O-methyluridine-3'-phosphate
  modified_base 15: mod_base = OTHER; note = 2'-O-methylguanosine-3'-phosphate
  modified_base 16: mod_base = OTHER; note = 2'-O-methylguanosine-3'-phosphate
  modified_base 17: mod_base = OTHER; note = 2'-O-methyladenosine-3'-phosphate
  modified_base 18: mod_base = OTHER; note = 2'-O-methylguanosine-3'-phosphate
  modified_base 19: mod_base = OTHER; note = 2'-O-methyladenosine-3'-phosphate
  modified_base 20: mod_base = OTHER; note = 2'-O-methyladenosine-3'-phosphate
  modified_base 21: mod_base = OTHER; note = 2'-O-methyladenosine
gtatgcattgcagtggagaaa

SEQ ID NO: 3624 - RNA, 21 nt, synthetic construct
  source 1..21: mol_type = other RNA
  modified_base 1: mod_base = OTHER; note = 2'-O-methyluridine-3'-phosphate
  modified_base 2: mod_base = OTHER; note = 2'-O-methyladenosine-3'-phosphate
  modified_base 3: mod_base = OTHER; note = 2'-O-methyluridine-3'-phosphate
  modified_base 4: mod_base = OTHER; note = 2'-O-methylguanosine-3'-phosphate
  modified_base 5: mod_base = OTHER; note = 2'-O-methylcytidine-3'-phosphate
  modified_base 6: mod_base = OTHER; note = 2'-O-methyladenosine-3'-phosphate
  modified_base 7: mod_base = OTHER; note = 2'-deoxy-2'-fluorouridine-3'-phosphate
  modified_base 8: mod_base = OTHER; note = 2'-O-methyluridine-3'-phosphate
  modified_base 9: mod_base = OTHER; note = 2'-deoxy-2'-fluoroguanosine-3'-phosphate
  modified_base 10: mod_base = OTHER; note = 2'-deoxy-2'-fluorocytidine-3'-phosphate
  modified_base 11: mod_base = OTHER; note = 2'-deoxy-2'-fluoroadenosine-3'-phosphate
  modified_base 12: mod_base = OTHER; note = 2'-O-methylguanosine-3'-phosphate
  modified_base 13: mod_base = OTHER; note = 2'-O-methyluridine-3'-phosphate
  modified_base 14: mod_base = OTHER; note = 2'-O-methylguanosine-3'-phosphate
  modified_base 15: mod_base = OTHER; note = 2'-O-methylguanosine-3'-phosphate
  modified_base 16: mod_base = OTHER; note = 2'-O-methyladenosine-3'-phosphate
  modified_base 17: mod_base = OTHER; note = 2'-O-methylguanosine-3'-phosphate
  modified_base 18: mod_base = OTHER; note = 2'-O-methyladenosine-3'-phosphate
  modified_base 19: mod_base = OTHER; note = 2'-O-methyladenosine-3'-phosphate
  modified_base 20: mod_base = OTHER; note = 2'-O-methyladenosine-3'-phosphate
  modified_base 21: mod_base = OTHER; note = 2'-O-methyladenosine
tatgcattgcagtggagaaaa

SEQ ID NO: 3625 - RNA, 21 nt, synthetic construct
  source 1..21: mol_type = other RNA
  modified_base 1: mod_base = OTHER; note = 2'-O-methyladenosine-3'-phosphate
  modified_base 2: mod_base = OTHER; note = 2'-O-methyluridine-3'-phosphate
  modified_base 3: mod_base = OTHER; note = 2'-O-methylguanosine-3'-phosphate
  modified_base 4: mod_base = OTHER; note = 2'-O-methylcytidine-3'-phosphate
  modified_base 5: mod_base = OTHER; note = 2'-O-methyladenosine-3'-phosphate
  modified_base 6: mod_base = OTHER; note = 2'-O-methyluridine-3'-phosphate
  modified_base 7: mod_base = OTHER; note = 2'-deoxy-2'-fluorouridine-3'-phosphate
  modified_base 8: mod_base = OTHER; note = 2'-O-methylguanosine-3'-phosphate
  modified_base 9: mod_base = OTHER; note = 2'-deoxy-2'-fluorocytidine-3'-phosphate
  modified_base 10: mod_base = OTHER; note = 2'-deoxy-2'-fluoroadenosine-3'-phosphate
  modified_base 11: mod_base = OTHER; note = 2'-deoxy-2'-fluoroguanosine-3'-phosphate
  modified_base 12: mod_base = OTHER; note = 2'-O-methyluridine-3'-phosphate
  modified_base 13: mod_base = OTHER; note = 2'-O-methylguanosine-3'-phosphate
  modified_base 14: mod_base = OTHER; note = 2'-O-methylguanosine-3'-phosphate
  modified_base 15: mod_base = OTHER; note = 2'-O-methyladenosine-3'-phosphate
  modified_base 16: mod_base = OTHER; note = 2'-O-methylguanosine-3'-phosphate
  modified_base 17: mod_base = OTHER; note = 2'-O-methyladenosine-3'-phosphate
  modified_base 18: mod_base = OTHER; note = 2'-O-methyladenosine-3'-phosphate
  modified_base 19: mod_base = OTHER; note = 2'-O-methyladenosine-3'-phosphate
  modified_base 20: mod_base = OTHER; note = 2'-O-methyladenosine-3'-phosphate
  modified_base 21: mod_base = OTHER; note = 2'-O-methyladenosine
atgcattgcagtggagaaaaa

SEQ ID NO: 3626 - RNA, 21 nt, synthetic construct
  source 1..21: mol_type = other RNA
  modified_base 1: mod_base = OTHER; note = 2'-O-methyluridine-3'-phosphate
  modified_base 2: mod_base = OTHER; note = 2'-O-methylguanosine-3'-phosphate
  modified_base 3: mod_base = OTHER; note = 2'-O-methylcytidine-3'-phosphate
  modified_base 4: mod_base = OTHER; note = 2'-O-methyladenosine-3'-phosphate
  modified_base 5: mod_base = OTHER; note = 2'-O-methyluridine-3'-phosphate
  modified_base 6: mod_base = OTHER; note = 2'-O-methyluridine-3'-phosphate
  modified_base 7: mod_base = OTHER; note = 2'-deoxy-2'-fluoroguanosine-3'-phosphate
  modified_base 8: mod_base = OTHER; note = 2'-O-methylcytidine-3'-phosphate
  modified_base 9: mod_base = OTHER; note = 2'-deoxy-2'-fluoroadenosine-3'-phosphate
  modified_base 10: mod_base = OTHER; note = 2'-deoxy-2'-fluoroguanosine-3'-phosphate
  modified_base 11: mod_base = OTHER; note = 2'-deoxy-2'-fluorouridine-3'-phosphate
  modified_base 12: mod_base = OTHER; note = 2'-O-methylguanosine-3'-phosphate
  modified_base 13: mod_base = OTHER; note = 2'-O-methylguanosine-3'-phosphate
  modified_base 14: mod_base = OTHER; note = 2'-O-methyladenosine-3'-phosphate
  modified_base 15: mod_base = OTHER; note = 2'-O-methylguanosine-3'-phosphate
  modified_base 16: mod_base = OTHER; note = 2'-O-methyladenosine-3'-phosphate
  modified_base 17: mod_base = OTHER; note = 2'-O-methyladenosine-3'-phosphate
  modified_base 18: mod_base = OTHER; note = 2'-O-methyladenosine-3'-phosphate
  modified_base 19: mod_base = OTHER; note = 2'-O-methyladenosine-3'-phosphate
  modified_base 20: mod_base = OTHER; note = 2'-O-methylcytidine-3'-phosphate
  modified_base 21: mod_base = OTHER; note = 2'-O-methyladenosine
tgcattgcagtggagaaaaca

SEQ ID NO: 3627 - RNA, 21 nt, synthetic construct
  source 1..21: mol_type = other RNA
  modified_base 1: mod_base = OTHER; note = 2'-O-methylguanosine-3'-phosphate
  modified_base 2: mod_base = OTHER; note = 2'-O-methylcytidine-3'-phosphate
  modified_base 3: mod_base = OTHER; note = 2'-O-methyladenosine-3'-phosphate
  modified_base 4: mod_base = OTHER; note = 2'-O-methyluridine-3'-phosphate
  modified_base 5: mod_base = OTHER; note = 2'-O-methyluridine-3'-phosphate
  modified_base 6: mod_base = OTHER; note = 2'-O-methylguanosine-3'-phosphate
  modified_base 7: mod_base = OTHER; note = 2'-deoxy-2'-fluorocytidine-3'-phosphate
  modified_base 8: mod_base = OTHER; note = 2'-O-methyladenosine-3'-phosphate
  modified_base 9: mod_base = OTHER; note = 2'-deoxy-2'-fluoroguanosine-3'-phosphate
  modified_base 10: mod_base = OTHER; note = 2'-deoxy-2'-fluorouridine-3'-phosphate
  modified_base 11: mod_base = OTHER; note = 2'-deoxy-2'-fluoroguanosine-3'-phosphate
  modified_base 12: mod_base = OTHER; note = 2'-O-methylguanosine-3'-phosphate
  modified_base 13: mod_base = OTHER; note = 2'-O-methyladenosine-3'-phosphate
  modified_base 14: mod_base = OTHER; note = 2'-O-methylguanosine-3'-phosphate
  modified_base 15: mod_base = OTHER; note = 2'-O-methyladenosine-3'-phosphate
  modified_base 16: mod_base = OTHER; note = 2'-O-methyladenosine-3'-phosphate
  modified_base 17: mod_base = OTHER; note = 2'-O-methyladenosine-3'-phosphate
  modified_base 18: mod_base = OTHER; note = 2'-O-methyladenosine-3'-phosphate
  modified_base 19: mod_base = OTHER; note = 2'-O-methylcytidine-3'-phosphate
  modified_base 20: mod_base = OTHER; note = 2'-O-methyluridine-3'-phosphate
  modified_base 21: mod_base = OTHER; note = 2'-O-methyladenosine
gcattgcagtggagaaaacta

SEQ ID NO: 3628 - RNA, 21 nt, synthetic construct
  source 1..21: mol_type = other RNA
  modified_base 1: mod_base = OTHER; note = 2'-O-methylcytidine-3'-phosphate
  modified_base 2: mod_base = OTHER; note = 2'-O-methyladenosine-3'-phosphate
  modified_base 3: mod_base = OTHER; note = 2'-O-methyluridine-3'-phosphate
  modified_base 4: mod_base = OTHER; note = 2'-O-methyluridine-3'-phosphate
  modified_base 5: mod_base = OTHER; note = 2'-O-methylguanosine-3'-phosphate
  modified_base 6: mod_base = OTHER; note = 2'-O-methylcytidine-3'-phosphate
  modified_base 7: mod_base = OTHER; note = 2'-deoxy-2'-fluoroadenosine-3'-phosphate
  modified_base 8: mod_base = OTHER; note = 2'-O-methylguanosine-3'-phosphate
  modified_base 9: mod_base = OTHER; note = 2'-deoxy-2'-fluorouridine-3'-phosphate
  modified_base 10: mod_base = OTHER; note = 2'-deoxy-2'-fluoroguanosine-3'-phosphate
  modified_base 11: mod_base = OTHER; note = 2'-deoxy-2'-fluoroguanosine-3'-phosphate
  modified_base 12: mod_base = OTHER; note = 2'-O-methyladenosine-3'-phosphate
  modified_base 13: mod_base = OTHER; note = 2'-O-methylguanosine-3'-phosphate
  modified_base 14: mod_base = OTHER; note = 2'-O-methyladenosine-3'-phosphate
  modified_base 15: mod_base = OTHER; note = 2'-O-methyladenosine-3'-phosphate
  modified_base 16: mod_base = OTHER; note = 2'-O-methyladenosine-3'-phosphate
  modified_base 17: mod_base = OTHER; note = 2'-O-methyladenosine-3'-phosphate
  modified_base 18: mod_base = OTHER; note = 2'-O-methylcytidine-3'-phosphate
  modified_base 19: mod_base = OTHER; note = 2'-O-methyluridine-3'-phosphate
  modified_base 20: mod_base = OTHER; note = 2'-O-methyladenosine-3'-phosphate
  modified_base 21: mod_base = OTHER; note = 2'-O-methyladenosine
cattgcagtggagaaaactaa

SEQ ID NO: 3629 - RNA, 21 nt, synthetic construct
  source 1..21: mol_type = other RNA
  modified_base 1: mod_base = OTHER; note = 2'-O-methyladenosine-3'-phosphate
  modified_base 2: mod_base = OTHER; note = 2'-O-methyluridine-3'-phosphate
  modified_base 3: mod_base = OTHER; note = 2'-O-methyluridine-3'-phosphate
  modified_base 4: mod_base = OTHER; note = 2'-O-methylguanosine-3'-phosphate
  modified_base 5: mod_base = OTHER; note = 2'-O-methylcytidine-3'-phosphate
  modified_base 6: mod_base = OTHER; note = 2'-O-methyladenosine-3'-phosphate
  modified_base 7: mod_base = OTHER; note = 2'-deoxy-2'-fluoroguanosine-3'-phosphate
  modified_base 8: mod_base = OTHER; note = 2'-O-methyluridine-3'-phosphate
  modified_base 9: mod_base = OTHER; note = 2'-deoxy-2'-fluoroguanosine-3'-phosphate
  modified_base 10: mod_base = OTHER; note = 2'-deoxy-2'-fluoroguanosine-3'-phosphate
  modified_base 11: mod_base = OTHER; note = 2'-deoxy-2'-fluoroadenosine-3'-phosphate
  modified_base 12: mod_base = OTHER; note = 2'-O-methylguanosine-3'-phosphate
  modified_base 13: mod_base = OTHER; note = 2'-O-methyladenosine-3'-phosphate
  modified_base 14: mod_base = OTHER; note = 2'-O-methyladenosine-3'-phosphate
  modified_base 15: mod_base = OTHER; note = 2'-O-methyladenosine-3'-phosphate
  modified_base 16: mod_base = OTHER; note = 2'-O-methyladenosine-3'-phosphate
  modified_base 17: mod_base = OTHER; note = 2'-O-methylcytidine-3'-phosphate
  modified_base 18: mod_base = OTHER; note = 2'-O-methyluridine-3'-phosphate
  modified_base 19: mod_base = OTHER; note = 2'-O-methyladenosine-3'-phosphate
  modified_base 20: mod_base = OTHER; note = 2'-O-methyluridine-3'-phosphate
  modified_base 21: mod_base = OTHER; note = 2'-O-methyladenosine
attgcagtggagaaaactata

SEQ ID NO: 3630 - RNA, 21 nt, synthetic construct
  source 1..21: mol_type = other RNA
  modified_base 1: mod_base = OTHER; note = 2'-O-methyluridine-3'-phosphate
  modified_base 2: mod_base = OTHER; note = 2'-O-methyluridine-3'-phosphate
  modified_base 3: mod_base = OTHER; note = 2'-O-methylguanosine-3'-phosphate
  modified_base 4: mod_base = OTHER; note = 2'-O-methylcytidine-3'-phosphate
  modified_base 5: mod_base = OTHER; note = 2'-O-methyladenosine-3'-phosphate
  modified_base 6: mod_base = OTHER; note = 2'-O-methylguanosine-3'-phosphate
  modified_base 7: mod_base = OTHER; note = 2'-deoxy-2'-fluorouridine-3'-phosphate
  modified_base 8: mod_base = OTHER; note = 2'-O-methylguanosine-3'-phosphate
  modified_base 9: mod_base = OTHER; note = 2'-deoxy-2'-fluoroguanosine-3'-phosphate
  modified_base 10: mod_base = OTHER; note = 2'-deoxy-2'-fluoroadenosine-3'-phosphate
  modified_base 11: mod_base = OTHER; note = 2'-deoxy-2'-fluoroguanosine-3'-phosphate
  modified_base 12: mod_base = OTHER; note = 2'-O-methyladenosine-3'-phosphate
  modified_base 13: mod_base = OTHER; note = 2'-O-methyladenosine-3'-phosphate
  modified_base 14: mod_base = OTHER; note = 2'-O-methyladenosine-3'-phosphate
  modified_base 15: mod_base = OTHER; note = 2'-O-methyladenosine-3'-phosphate
  modified_base 16: mod_base = OTHER; note = 2'-O-methylcytidine-3'-phosphate
  modified_base 17: mod_base = OTHER; note = 2'-O-methyluridine-3'-phosphate
  modified_base 18: mod_base = OTHER; note = 2'-O-methyladenosine-3'-phosphate
  modified_base 19: mod_base = OTHER; note = 2'-O-methyluridine-3'-phosphate
  modified_base 20: mod_base = OTHER; note = 2'-O-methylguanosine-3'-phosphate
  modified_base 21: mod_base = OTHER; note = 2'-O-methyladenosine
ttgcagtggagaaaactatga

SEQ ID NO: 3631 - RNA, 21 nt, synthetic construct
  source 1..21: mol_type = other RNA
  modified_base 1: mod_base = OTHER; note = 2'-O-methyluridine-3'-phosphate
  modified_base 2: mod_base = OTHER; note = 2'-O-methylguanosine-3'-phosphate
  modified_base 3: mod_base = OTHER; note = 2'-O-methylcytidine-3'-phosphate
  modified_base 4: mod_base = OTHER; note = 2'-O-methyladenosine-3'-phosphate
  modified_base 5: mod_base = OTHER; note = 2'-O-methylguanosine-3'-phosphate
  modified_base 6: mod_base = OTHER; note = 2'-O-methyluridine-3'-phosphate
  modified_base 7: mod_base = OTHER; note = 2'-deoxy-2'-fluoroguanosine-3'-phosphate
  modified_base 8: mod_base = OTHER; note = 2'-O-methylguanosine-3'-phosphate
  modified_base 9: mod_base = OTHER; note = 2'-deoxy-2'-fluoroadenosine-3'-phosphate
  modified_base 10: mod_base = OTHER; note = 2'-deoxy-2'-fluoroguanosine-3'-phosphate
  modified_base 11: mod_base = OTHER; note = 2'-deoxy-2'-fluoroadenosine-3'-phosphate
  modified_base 12: mod_base = OTHER; note = 2'-O-methyladenosine-3'-phosphate
  modified_base 13: mod_base = OTHER; note = 2'-O-methyladenosine-3'-phosphate
  modified_base 14: mod_base = OTHER; note = 2'-O-methyladenosine-3'-phosphate
  modified_base 15: mod_base = OTHER; note = 2'-O-methylcytidine-3'-phosphate
  modified_base 16: mod_base = OTHER; note = 2'-O-methyluridine-3'-phosphate
  modified_base 17: mod_base = OTHER; note = 2'-O-methyladenosine-3'-phosphate
  modified_base 18: mod_base = OTHER; note = 2'-O-methyluridine-3'-phosphate
  modified_base 19: mod_base = OTHER; note = 2'-O-methylguanosine-3'-phosphate
  modified_base 20: mod_base = OTHER; note = 2'-O-methyladenosine-3'-phosphate
  modified_base 21: mod_base = OTHER; note = 2'-O-methyladenosine
tgcagtggagaaaactatgaa

SEQ ID NO: 3632 - RNA, 21 nt, synthetic construct
  source 1..21: mol_type = other RNA
  modified_base 1: mod_base = OTHER; note = 2'-O-methyladenosine-3'-phosphate
  modified_base 2: mod_base = OTHER; note = 2'-O-methylcytidine-3'-phosphate
  modified_base 3: mod_base = OTHER; note = 2'-O-methylguanosine-3'-phosphate
  modified_base 4: mod_base = OTHER; note = 2'-O-methylguanosine-3'-phosphate
  modified_base 5: mod_base = OTHER; note = 2'-O-methylcytidine-3'-phosphate
  modified_base 6: mod_base = OTHER; note = 2'-O-methyladenosine-3'-phosphate
  modified_base 7: mod_base = OTHER; note = 2'-deoxy-2'-fluoroadenosine-3'-phosphate
  modified_base 8: mod_base = OTHER; note = 2'-O-methyladenosine-3'-phosphate
  modified_base 9: mod_base = OTHER; note = 2'-deoxy-2'-fluoroadenosine-3'-phosphate
  modified_base 10: mod_base = OTHER; note = 2'-deoxy-2'-fluorouridine-3'-phosphate
  modified_base 11: mod_base = OTHER; note = 2'-deoxy-2'-fluorouridine-3'-phosphate
  modified_base 12: mod_base = OTHER; note = 2'-O-methyluridine-3'-phosphate
  modified_base 13: mod_base = OTHER; note = 2'-O-methylcytidine-3'-phosphate
  modified_base 14: mod_base = OTHER; note = 2'-O-methylcytidine-3'-phosphate
  modified_base 15: mod_base = OTHER; note = 2'-O-methyladenosine-3'-phosphate
  modified_base 16: mod_base = OTHER; note = 2'-O-methyladenosine-3'-phosphate
  modified_base 17: mod_base = OTHER; note = 2'-O-methylguanosine-3'-phosphate
  modified_base 18: mod_base = OTHER; note = 2'-O-methyladenosine-3'-phosphate
  modified_base 19: mod_base = OTHER; note = 2'-O-methylcytidine-3'-phosphate
  modified_base 20: mod_base = OTHER; note = 2'-O-methylcytidine-3'-phosphate
  modified_base 21: mod_base = OTHER; note = 2'-O-methyladenosine
acggcaaaatttccaagacca

SEQ ID NO: 3633 - RNA, 21 nt, synthetic construct
  source 1..21: mol_type = other RNA
  modified_base 1: mod_base = OTHER; note = 2'-O-methylcytidine-3'-phosphate
  modified_base 2: mod_base = OTHER; note = 2'-O-methylguanosine-3'-phosphate
  modified_base 3: mod_base = OTHER; note = 2'-O-methylguanosine-3'-phosphate
  modified_base 4: mod_base = OTHER; note = 2'-O-methylcytidine-3'-phosphate
  modified_base 5: mod_base = OTHER; note = 2'-O-methyladenosine-3'-phosphate
  modified_base 6: mod_base = OTHER; note = 2'-O-methyladenosine-3'-phosphate
  modified_base 7: mod_base = OTHER; note = 2'-deoxy-2'-fluoroadenosine-3'-phosphate
  modified_base 8: mod_base = OTHER; note = 2'-O-methyladenosine-3'-phosphate
  modified_base 9: mod_base = OTHER; note = 2'-deoxy-2'-fluorouridine-3'-phosphate
  modified_base 10: mod_base = OTHER; note = 2'-deoxy-2'-fluorouridine-3'-phosphate
  modified_base 11: mod_base = OTHER; note = 2'-deoxy-2'-fluorouridine-3'-phosphate
  modified_base 12: mod_base = OTHER; note = 2'-O-methylcytidine-3'-phosphate
  modified_base 13: mod_base = OTHER; note = 2'-O-methylcytidine-3'-phosphate
  modified_base 14: mod_base = OTHER; note = 2'-O-methyladenosine-3'-phosphate
  modified_base 15: mod_base = OTHER; note = 2'-O-methyladenosine-3'-phosphate
  modified_base 16: mod_base = OTHER; note = 2'-O-methylguanosine-3'-phosphate
  modified_base 17: mod_base = OTHER; note = 2'-O-methyladenosine-3'-phosphate
  modified_base 18: mod_base = OTHER; note = 2'-O-methylcytidine-3'-phosphate
  modified_base 19: mod_base = OTHER; note = 2'-O-methylcytidine-3'-phosphate
  modified_base 20: mod_base = OTHER; note = 2'-O-methyladenosine-3'-phosphate
  modified_base 21: mod_base = OTHER; note = 2'-O-methyladenosine
cggcaaaatttccaagaccaa

SEQ ID NO: 3634 - RNA, 21 nt, synthetic construct
  source 1..21: mol_type = other RNA
  modified_base 1: mod_base = OTHER; note = 2'-O-methylguanosine-3'-phosphate
  modified_base 2: mod_base = OTHER; note = 2'-O-methylguanosine-3'-phosphate
  modified_base 3: mod_base = OTHER; note = 2'-O-methylcytidine-3'-phosphate
  modified_base 4: mod_base = OTHER; note = 2'-O-methyladenosine-3'-phosphate
  modified_base 5: mod_base = OTHER; note = 2'-O-methyladenosine-3'-phosphate
  modified_base 6: mod_base = OTHER; note = 2'-O-methyladenosine-3'-phosphate
  modified_base 7: mod_base = OTHER; note = 2'-deoxy-2'-fluoroadenosine-3'-phosphate
  modified_base 8: mod_base = OTHER; note = 2'-O-methyluridine-3'-phosphate
  modified_base 9: mod_base = OTHER; note = 2'-deoxy-2'-fluorouridine-3'-phosphate
  modified_base 10: mod_base = OTHER; note = 2'-deoxy-2'-fluorouridine-3'-phosphate
  modified_base 11: mod_base = OTHER; note = 2'-deoxy-2'-fluorocytidine-3'-phosphate
  modified_base 12: mod_base = OTHER; note = 2'-O-methylcytidine-3'-phosphate
  modified_base 13: mod_base = OTHER; note = 2'-O-methyladenosine-3'-phosphate
  modified_base 14: mod_base = OTHER; note = 2'-O-methyladenosine-3'-phosphate
  modified_base 15: mod_base = OTHER; note = 2'-O-methylguanosine-3'-phosphate
  modified_base 16: mod_base = OTHER; note = 2'-O-methyladenosine-3'-phosphate
  modified_base 17: mod_base = OTHER; note = 2'-O-methylcytidine-3'-phosphate
  modified_base 18: mod_base = OTHER; note = 2'-O-methylcytidine-3'-phosphate
  modified_base 19: mod_base = OTHER; note = 2'-O-methyladenosine-3'-phosphate
  modified_base 20: mod_base = OTHER; note = 2'-O-methyluridine-3'-phosphate
  modified_base 21: mod_base = OTHER; note = 2'-O-methyladenosine
ggcaaaatttccaagaccata

SEQ ID NO: 3635 - RNA, 21 nt, synthetic construct
  source 1..21: mol_type = other RNA
  modified_base 1: mod_base = OTHER; note = 2'-O-methylguanosine-3'-phosphate
  modified_base 2: mod_base = OTHER; note = 2'-O-methylcytidine-3'-phosphate
  modified_base 3: mod_base = OTHER; note = 2'-O-methyladenosine-3'-phosphate
  modified_base 4: mod_base = OTHER; note = 2'-O-methyladenosine-3'-phosphate
  modified_base 5: mod_base = OTHER; note = 2'-O-methyladenosine-3'-phosphate
  modified_base 6: mod_base = OTHER; note = 2'-O-methyladenosine-3'-phosphate
  modified_base 7: mod_base = OTHER; note = 2'-deoxy-2'-fluorouridine-3'-phosphate
  modified_base 8: mod_base = OTHER; note = 2'-O-methyluridine-3'-phosphate
  modified_base 9: mod_base = OTHER; note = 2'-deoxy-2'-fluorouridine-3'-phosphate
  modified_base 10: mod_base = OTHER; note = 2'-deoxy-2'-fluorocytidine-3'-phosphate
  modified_base 11: mod_base = OTHER; note = 2'-deoxy-2'-fluorocytidine-3'-phosphate
  modified_base 12: mod_base = OTHER; note = 2'-O-methyladenosine-3'-phosphate
  modified_base 13: mod_base = OTHER; note = 2'-O-methyladenosine-3'-phosphate
  modified_base 14: mod_base = OTHER; note = 2'-O-methylguanosine-3'-phosphate
  modified_base 15: mod_base = OTHER; note = 2'-O-methyladenosine-3'-phosphate
  modified_base 16: mod_base = OTHER; note = 2'-O-methylcytidine-3'-phosphate
  modified_base 17: mod_base = OTHER; note = 2'-O-methylcytidine-3'-phosphate
  modified_base 18: mod_base = OTHER; note = 2'-O-methyladenosine-3'-phosphate
  modified_base 19: mod_base = OTHER; note = 2'-O-methyluridine-3'-phosphate
  modified_base 20: mod_base = OTHER; note = 2'-O-methylguanosine-3'-phosphate
  modified_base 21: mod_base = OTHER; note = 2'-O-methyladenosine
gcaaaatttccaagaccatga

SEQ ID NO: 3636 - RNA, 21 nt, synthetic construct
  source 1..21: mol_type = other RNA
  modified_base 1: mod_base = OTHER; note = 2'-O-methylcytidine-3'-phosphate
  modified_base 2: mod_base = OTHER; note = 2'-O-methyladenosine-3'-phosphate
  modified_base 3: mod_base = OTHER; note = 2'-O-methyladenosine-3'-phosphate
  modified_base 4: mod_base = OTHER; note = 2'-O-methyladenosine-3'-phosphate
  modified_base 5: mod_base = OTHER; note = 2'-O-methyladenosine-3'-phosphate
  modified_base 6: mod_base = OTHER; note = 2'-O-methyluridine-3'-phosphate
  modified_base 7: mod_base = OTHER; note = 2'-deoxy-2'-fluorouridine-3'-phosphate
  modified_base 8: mod_base = OTHER; note = 2'-O-methyluridine-3'-phosphate
  modified_base 9: mod_base = OTHER; note = 2'-deoxy-2'-fluorocytidine-3'-phosphate
  modified_base 10: mod_base = OTHER; note = 2'-deoxy-2'-fluorocytidine-3'-phosphate
  modified_base 11: mod_base = OTHER; note = 2'-deoxy-2'-fluoroadenosine-3'-phosphate
  modified_base 12: mod_base = OTHER; note = 2'-O-methyladenosine-3'-phosphate
  modified_base 13: mod_base = OTHER; note = 2'-O-methylguanosine-3'-phosphate
  modified_base 14: mod_base = OTHER; note = 2'-O-methyladenosine-3'-phosphate
  modified_base 15: mod_base = OTHER; note = 2'-O-methylcytidine-3'-phosphate
  modified_base 16: mod_base = OTHER; note = 2'-O-methylcytidine-3'-phosphate
  modified_base 17: mod_base = OTHER; note = 2'-O-methyladenosine-3'-phosphate
  modified_base 18: mod_base = OTHER; note = 2'-O-methyluridine-3'-phosphate
  modified_base 19: mod_base = OTHER; note = 2'-O-methylguanosine-3'-phosphate
  modified_base 20: mod_base = OTHER; note = 2'-O-methyluridine-3'-phosphate
  modified_base 21: mod_base = OTHER; note = 2'-O-methyladenosine
caaaatttccaagaccatgta

SEQ ID NO: 3637 - RNA, 21 nt, synthetic construct
  source 1..21: mol_type = other RNA
  modified_base 1: mod_base = OTHER; note = 2'-O-methyladenosine-3'-phosphate
  modified_base 2: mod_base = OTHER; note = 2'-O-methyladenosine-3'-phosphate
  modified_base 3: mod_base = OTHER; note = 2'-O-methyladenosine-3'-phosphate
  modified_base 4: mod_base = OTHER; note = 2'-O-methyladenosine-3'-phosphate
  modified_base 5: mod_base = OTHER; note = 2'-O-methyluridine-3'-phosphate
  modified_base 6: mod_base = OTHER; note = 2'-O-methyluridine-3'-phosphate
  modified_base 7: mod_base = OTHER; note = 2'-deoxy-2'-fluorouridine-3'-phosphate
  modified_base 8: mod_base = OTHER; note = 2'-O-methylcytidine-3'-phosphate
  modified_base 9: mod_base = OTHER; note = 2'-deoxy-2'-fluorocytidine-3'-phosphate
  modified_base 10: mod_base = OTHER; note = 2'-deoxy-2'-fluoroadenosine-3'-phosphate
  modified_base 11: mod_base = OTHER; note = 2'-deoxy-2'-fluoroadenosine-3'-phosphate
  modified_base 12: mod_base = OTHER; note = 2'-O-methylguanosine-3'-phosphate
  modified_base 13: mod_base = OTHER; note = 2'-O-methyladenosine-3'-phosphate
  modified_base 14: mod_base = OTHER; note = 2'-O-methylcytidine-3'-phosphate
  modified_base 15: mod_base = OTHER; note = 2'-O-methylcytidine-3'-phosphate
  modified_base 16: mod_base = OTHER; note = 2'-O-methyladenosine-3'-phosphate
  modified_base 17: mod_base = OTHER; note = 2'-O-methyluridine-3'-phosphate
  modified_base 18: mod_base = OTHER; note = 2'-O-methylguanosine-3'-phosphate
  modified_base 19: mod_base = OTHER; note = 2'-O-methyluridine-3'-phosphate
  modified_base 20: mod_base = OTHER; note = 2'-O-methylcytidine-3'-phosphate
  modified_base 21: mod_base = OTHER; note = 2'-O-methyladenosine
aaaatttccaagaccatgtca

SEQ ID NO: 3638 - RNA, 21 nt, synthetic construct
  source 1..21: mol_type = other RNA
  modified_base 1: mod_base = OTHER; note = 2'-O-methyladenosine-3'-phosphate
  modified_base 2: mod_base = OTHER; note = 2'-O-methyladenosine-3'-phosphate
  modified_base 3: mod_base = OTHER; note = 2'-O-methyladenosine-3'-phosphate
  modified_base 4: mod_base = OTHER; note = 2'-O-methyluridine-3'-phosphate
  modified_base 5: mod_base = OTHER; note = 2'-O-methyluridine-3'-phosphate
  modified_base 6: mod_base = OTHER; note = 2'-O-methyluridine-3'-phosphate
  modified_base 7: mod_base = OTHER; note = 2'-deoxy-2'-fluorocytidine-3'-phosphate
  modified_base 8: mod_base = OTHER; note = 2'-O-methylcytidine-3'-phosphate
  modified_base 9: mod_base = OTHER; note = 2'-deoxy-2'-fluoroadenosine-3'-phosphate
  modified_base 10: mod_base = OTHER; note = 2'-deoxy-2'-fluoroadenosine-3'-phosphate
  modified_base 11: mod_base = OTHER; note = 2'-deoxy-2'-fluoroguanosine-3'-phosphate
  modified_base 12: mod_base = OTHER; note = 2'-O-methyladenosine-3'-phosphate
  modified_base 13: mod_base = OTHER; note = 2'-O-methylcytidine-3'-phosphate
  modified_base 14: mod_base = OTHER; note = 2'-O-methylcytidine-3'-phosphate
  modified_base 15: mod_base = OTHER; note = 2'-O-methyladenosine-3'-phosphate
  modified_base 16: mod_base = OTHER; note = 2'-O-methyluridine-3'-phosphate
  modified_base 17: mod_base = OTHER; note = 2'-O-methylguanosine-3'-phosphate
  modified_base 18: mod_base = OTHER; note = 2'-O-methyluridine-3'-phosphate
  modified_base 19: mod_base = OTHER; note = 2'-O-methylcytidine-3'-phosphate
  modified_base 20: mod_base = OTHER; note = 2'-O-methyluridine-3'-phosphate
  modified_base 21: mod_base = OTHER; note = 2'-O-methyladenosine
aaatttccaagaccatgtcta

SEQ ID NO: 3639 - RNA, 21 nt, synthetic construct
  source 1..21: mol_type = other RNA
  modified_base 1: mod_base = OTHER; note = 2'-O-methyladenosine-3'-phosphate
  modified_base 2: mod_base = OTHER; note = 2'-O-methyladenosine-3'-phosphate
  modified_base 3: mod_base = OTHER; note = 2'-O-methyluridine-3'-phosphate
  modified_base 4: mod_base = OTHER; note = 2'-O-methyluridine-3'-phosphate
  modified_base 5: mod_base = OTHER; note = 2'-O-methyluridine-3'-phosphate
  modified_base 6: mod_base = OTHER; note = 2'-O-methylcytidine-3'-phosphate
  modified_base 7: mod_base = OTHER; note = 2'-deoxy-2'-fluorocytidine-3'-phosphate
  modified_base 8: mod_base = OTHER; note = 2'-O-methyladenosine-3'-phosphate
  modified_base 9: mod_base = OTHER; note = 2'-deoxy-2'-fluoroadenosine-3'-phosphate
  modified_base 10: mod_base = OTHER; note = 2'-deoxy-2'-fluoroguanosine-3'-phosphate
  modified_base 11: mod_base = OTHER; note = 2'-deoxy-2'-fluoroadenosine-3'-phosphate
  modified_base 12: mod_base = OTHER; note = 2'-O-methylcytidine-3'-phosphate
  modified_base 13: mod_base = OTHER; note = 2'-O-methylcytidine-3'-phosphate
  modified_base 14: mod_base = OTHER; note = 2'-O-methyladenosine-3'-phosphate
  modified_base 15: mod_base = OTHER; note = 2'-O-methyluridine-3'-phosphate
  modified_base 16: mod_base = OTHER; note = 2'-O-methylguanosine-3'-phosphate
  modified_base 17: mod_base = OTHER; note = 2'-O-methyluridine-3'-phosphate
  modified_base 18: mod_base = OTHER; note = 2'-O-methylcytidine-3'-phosphate
  modified_base 19: mod_base = OTHER; note = 2'-O-methyluridine-3'-phosphate
  modified_base 20: mod_base = OTHER; note = 2'-O-methylguanosine-3'-phosphate
  modified_base 21: mod_base = OTHER; note = 2'-O-methyladenosine
aatttccaagaccatgtctga

SEQ ID NO: 3640 - RNA, 21 nt, synthetic construct
  source 1..21: mol_type = other RNA
  modified_base 1: mod_base = OTHER; note = 2'-O-methyladenosine-3'-phosphate
  modified_base 2: mod_base = OTHER; note = 2'-O-methyluridine-3'-phosphate
  modified_base 3: mod_base = OTHER; note = 2'-O-methyluridine-3'-phosphate
  modified_base 4: mod_base = OTHER; note = 2'-O-methyluridine-3'-phosphate
  modified_base 5: mod_base = OTHER; note = 2'-O-methylcytidine-3'-phosphate
  modified_base 6: mod_base = OTHER; note = 2'-O-methylcytidine-3'-phosphate
  modified_base 7: mod_base = OTHER; note = 2'-deoxy-2'-fluoroadenosine-3'-phosphate
  modified_base 8: mod_base = OTHER; note = 2'-O-methyladenosine-3'-phosphate
  modified_base 9: mod_base = OTHER; note = 2'-deoxy-2'-fluoroguanosine-3'-phosphate
  modified_base 10: mod_base = OTHER; note = 2'-deoxy-2'-fluoroadenosine-3'-phosphate
  modified_base 11: mod_base = OTHER; note = 2'-deoxy-2'-fluorocytidine-3'-phosphate
  modified_base 12: mod_base = OTHER; note = 2'-O-methylcytidine-3'-phosphate
  modified_base 13: mod_base = OTHER; note = 2'-O-methyladenosine-3'-phosphate
  modified_base 14: mod_base = OTHER; note = 2'-O-methyluridine-3'-phosphate
  modified_base 15: mod_base = OTHER; note = 2'-O-methylguanosine-3'-phosphate
  modified_base 16: mod_base = OTHER; note = 2'-O-methyluridine-3'-phosphate
  modified_base 17: mod_base = OTHER; note = 2'-O-methylcytidine-3'-phosphate
  modified_base 18: mod_base = OTHER; note = 2'-O-methyluridine-3'-phosphate
  modified_base 19: mod_base = OTHER; note = 2'-O-methylguanosine-3'-phosphate
  modified_base 20: mod_base = OTHER; note = 2'-O-methylguanosine-3'-phosphate
  modified_base 21: mod_base = OTHER; note = 2'-O-methyladenosine
atttccaagaccatgtctgga

SEQ ID NO: 3641 - RNA, 21 nt, synthetic construct
  source 1..21: mol_type = other RNA
  modified_base 1: mod_base = OTHER; note = 2'-O-methyluridine-3'-phosphate
  modified_base 2: mod_base = OTHER; note = 2'-O-methyluridine-3'-phosphate
  modified_base 3: mod_base = OTHER; note = 2'-O-methyluridine-3'-phosphate
  modified_base 4: mod_base = OTHER; note = 2'-O-methylcytidine-3'-phosphate
  modified_base 5: mod_base = OTHER; note = 2'-O-methylcytidine-3'-phosphate
  modified_base 6: mod_base = OTHER; note = 2'-O-methyladenosine-3'-phosphate
  modified_base 7: mod_base = OTHER; note = 2'-deoxy-2'-fluoroadenosine-3'-phosphate
  modified_base 8: mod_base = OTHER; note = 2'-O-methylguanosine-3'-phosphate
  modified_base 9: mod_base = OTHER; note = 2'-deoxy-2'-fluoroadenosine-3'-phosphate
  modified_base 10: mod_base = OTHER; note = 2'-deoxy-2'-fluorocytidine-3'-phosphate
  modified_base 11: mod_base = OTHER; note = 2'-deoxy-2'-fluorocytidine-3'-phosphate
  modified_base 12: mod_base = OTHER; note = 2'-O-methyladenosine-3'-phosphate
  modified_base 13: mod_base = OTHER; note = 2'-O-methyluridine-3'-phosphate
  modified_base 14: mod_base = OTHER; note = 2'-O-methylguanosine-3'-phosphate
  modified_base 15: mod_base = OTHER; note = 2'-O-methyluridine-3'-phosphate
  modified_base 16: mod_base = OTHER; note = 2'-O-methylcytidine-3'-phosphate
  modified_base 17: mod_base = OTHER; note = 2'-O-methyluridine-3'-phosphate
  modified_base 18: mod_base = OTHER; note = 2'-O-methylguanosine-3'-phosphate
  modified_base 19: mod_base = OTHER; note = 2'-O-methylguanosine-3'-phosphate
  modified_base 20: mod_base = OTHER; note = 2'-O-methyladenosine-3'-phosphate
  modified_base 21: mod_base = OTHER; note = 2'-O-methyladenosine
tttccaagaccatgtctggaa

SEQ ID NO: 3642 - RNA, 21 nt, synthetic construct
  source 1..21: mol_type = other RNA
  modified_base 1: mod_base = OTHER; note = 2'-O-methyladenosine-3'-phosphate
  modified_base 2: mod_base = OTHER; note = 2'-O-methyladenosine-3'-phosphate
  modified_base 3: mod_base = OTHER; note = 2'-O-methyluridine-3'-phosphate
  modified_base 4: mod_base = OTHER; note = 2'-O-methylguanosine-3'-phosphate
  modified_base 5: mod_base = OTHER; note = 2'-O-methylcytidine-3'-phosphate
  modified_base 6: mod_base = OTHER; note = 2'-O-methylcytidine-3'-phosphate
  modified_base 7: mod_base = OTHER; note = 2'-deoxy-2'-fluoroadenosine-3'-phosphate
  modified_base 8: mod_base = OTHER; note = 2'-O-methylguanosine-3'-phosphate
  modified_base 9: mod_base = OTHER; note = 2'-deoxy-2'-fluoroguanosine-3'-phosphate
  modified_base 10: mod_base = OTHER; note = 2'-deoxy-2'-fluorocytidine-3'-phosphate
  modified_base 11: mod_base = OTHER; note = 2'-deoxy-2'-fluorocytidine-3'-phosphate
  modified_base 12: mod_base = OTHER; note = 2'-O-methyluridine-3'-phosphate
  modified_base 13: mod_base = OTHER; note = 2'-O-methylguanosine-3'-phosphate
  modified_base 14: mod_base = OTHER; note = 2'-O-methylguanosine-3'-phosphate
  modified_base 15: mod_base = OTHER; note = 2'-O-methylguanosine-3'-phosphate
  modified_base 16: mod_base = OTHER; note = 2'-O-methyladenosine-3'-phosphate
  modified_base 17: mod_base = OTHER; note = 2'-O-methylcytidine-3'-phosphate
  modified_base 18: mod_base = OTHER; note = 2'-O-methyluridine-3'-phosphate
  modified_base 19: mod_base = OTHER; note = 2'-O-methylcytidine-3'-phosphate
  modified_base 20: mod_base = OTHER; note = 2'-O-methyluridine-3'-phosphate
  modified_base 21: mod_base = OTHER; note = 2'-O-methyladenosine
aatgccaggcctgggactcta

SEQ ID NO: 3643 - RNA, 21 nt, synthetic construct
  source 1..21: mol_type = other RNA
  modified_base 1: mod_base = OTHER; note = 2'-O-methylguanosine-3'-phosphate
  modified_base 2: mod_base = OTHER; note = 2'-O-methylcytidine-3'-phosphate
  modified_base 3: mod_base = OTHER; note = 2'-O-methylcytidine-3'-phosphate
  modified_base 4: mod_base = OTHER; note = 2'-O-methyladenosine-3'-phosphate
  modified_base 5: mod_base = OTHER; note = 2'-O-methylguanosine-3'-phosphate
  modified_base 6: mod_base = OTHER; note = 2'-O-methylguanosine-3'-phosphate
  modified_base 7: mod_base = OTHER; note = 2'-deoxy-2'-fluorocytidine-3'-phosphate
  modified_base 8: mod_base = OTHER; note = 2'-O-methylcytidine-3'-phosphate
  modified_base 9: mod_base = OTHER; note = 2'-deoxy-2'-fluorouridine-3'-phosphate
  modified_base 10: mod_base = OTHER; note = 2'-deoxy-2'-fluoroguanosine-3'-phosphate
  modified_base 11: mod_base = OTHER; note = 2'-deoxy-2'-fluoroguanosine-3'-phosphate
  modified_base 12: mod_base = OTHER; note = 2'-O-methylguanosine-3'-phosphate
  modified_base 13: mod_base = OTHER; note = 2'-O-methyladenosine-3'-phosphate
  modified_base 14: mod_base = OTHER; note = 2'-O-methylcytidine-3'-phosphate
  modified_base 15: mod_base = OTHER; note = 2'-O-methyluridine-3'-phosphate
  modified_base 16: mod_base = OTHER; note = 2'-O-methylcytidine-3'-phosphate
  modified_base 17: mod_base = OTHER; note = 2'-O-methyluridine-3'-phosphate
  modified_base 18: mod_base = OTHER; note = 2'-O-methylcytidine-3'-phosphate
  modified_base 19: mod_base = OTHER; note = 2'-O-methyladenosine-3'-phosphate
  modified_base 20: mod_base = OTHER; note = 2'-O-methylguanosine-3'-phosphate
  modified_base 21: mod_base = OTHER; note = 2'-O-methyladenosine
gccaggcctgggactctcaga

SEQ ID NO: 3644 - RNA, 21 nt, synthetic construct
  source 1..21: mol_type = other RNA
  modified_base 1: mod_base = OTHER; note = 2'-O-methylcytidine-3'-phosphate
  modified_base 2: mod_base = OTHER; note = 2'-O-methylcytidine-3'-phosphate
  modified_base 3: mod_base = OTHER; note = 2'-O-methyladenosine-3'-phosphate
  modified_base 4: mod_base = OTHER; note = 2'-O-methylguanosine-3'-phosphate
  modified_base 5: mod_base = OTHER; note = 2'-O-methylguanosine-3'-phosphate
  modified_base 6: mod_base = OTHER; note = 2'-O-methylcytidine-3'-phosphate
  modified_base 7: mod_base = OTHER; note = 2'-deoxy-2'-fluorocytidine-3'-phosphate
  modified_base 8: mod_base = OTHER; note = 2'-O-methyluridine-3'-phosphate
  modified_base 9: mod_base = OTHER; note = 2'-deoxy-2'-fluoroguanosine-3'-phosphate
  modified_base 10: mod_base = OTHER; note = 2'-deoxy-2'-fluoroguanosine-3'-phosphate
  modified_base 11: mod_base = OTHER; note = 2'-deoxy-2'-fluoroguanosine-3'-phosphate
  modified_base 12: mod_base = OTHER; note = 2'-O-methyladenosine-3'-phosphate
  modified_base 13: mod_base = OTHER; note = 2'-O-methylcytidine-3'-phosphate
  modified_base 14: mod_base = OTHER; note = 2'-O-methyluridine-3'-phosphate
  modified_base 15: mod_base = OTHER; note = 2'-O-methylcytidine-3'-phosphate
  modified_base 16: mod_base = OTHER; note = 2'-O-methyluridine-3'-phosphate
  modified_base 17: mod_base = OTHER; note = 2'-O-methylcytidine-3'-phosphate
  modified_base 18: mod_base = OTHER; note = 2'-O-methyladenosine-3'-phosphate
  modified_base 19: mod_base = OTHER; note = 2'-O-methylguanosine-3'-phosphate
  modified_base 20: mod_base = OTHER; note = 2'-O-methyladenosine-3'-phosphate
  modified_base 21: mod_base = OTHER; note = 2'-O-methyladenosine
ccaggcctgggactctcagaa

SEQ ID NO: 3645 - RNA, 21 nt, synthetic construct
  source 1..21: mol_type = other RNA
  modified_base 1: mod_base = OTHER; note = 2'-O-methyladenosine-3'-phosphate
  modified_base 2: mod_base = OTHER; note = 2'-O-methylguanosine-3'-phosphate
  modified_base 3: mod_base = OTHER; note = 2'-O-methylcytidine-3'-phosphate
  modified_base 4: mod_base = OTHER; note = 2'-O-methylcytidine-3'-phosphate
  modified_base 5: mod_base = OTHER; note = 2'-O-methylcytidine-3'-phosphate
  modified_base 6: mod_base = OTHER; note = 2'-O-methyladenosine-3'-phosphate
  modified_base 7: mod_base = OTHER; note = 2'-deoxy-2'-fluorocytidine-3'-phosphate
  modified_base 8: mod_base = OTHER; note = 2'-O-methyladenosine-3'-phosphate
  modified_base 9: mod_base = OTHER; note = 2'-deoxy-2'-fluorocytidine-3'-phosphate
  modified_base 10: mod_base = OTHER; note = 2'-deoxy-2'-fluoroguanosine-3'-phosphate
  modified_base 11: mod_base = OTHER; note = 2'-deoxy-2'-fluorocytidine-3'-phosphate
  modified_base 12: mod_base = OTHER; note = 2'-O-methyluridine-3'-phosphate
  modified_base 13: mod_base = OTHER; note = 2'-O-methylcytidine-3'-phosphate
  modified_base 14: mod_base = OTHER; note = 2'-O-methyladenosine-3'-phosphate
  modified_base 15: mod_base = OTHER; note = 2'-O-methyluridine-3'-phosphate
  modified_base 16: mod_base = OTHER; note = 2'-O-methylguanosine-3'-phosphate
  modified_base 17: mod_base = OTHER; note = 2'-O-methylguanosine-3'-phosphate
  modified_base 18: mod_base = OTHER; note = 2'-O-methyladenosine-3'-phosphate
  modified_base 19: mod_base = OTHER; note = 2'-O-methyluridine-3'-phosphate
  modified_base 20: mod_base = OTHER; note = 2'-O-methyladenosine-3'-phosphate
  modified_base 21: mod_base = OTHER; note = 2'-O-methyladenosine
agcccacacgctcatggataa

SEQ ID NO: 3646 - RNA, 21 nt, synthetic construct
  source 1..21: mol_type = other RNA
  modified_base 1: mod_base = OTHER; note = 2'-O-methylcytidine-3'-phosphate
  modified_base 2: mod_base = OTHER; note = 2'-O-methylcytidine-3'-phosphate
  modified_base 3: mod_base = OTHER; note = 2'-O-methyladenosine-3'-phosphate
  modified_base 4: mod_base = OTHER; note = 2'-O-methylcytidine-3'-phosphate
  modified_base 5: mod_base = OTHER; note = 2'-O-methyladenosine-3'-phosphate
  modified_base 6: mod_base = OTHER; note = 2'-O-methylcytidine-3'-phosphate
  modified_base 7: mod_base = OTHER; note = 2'-deoxy-2'-fluoroguanosine-3'-phosphate
  modified_base 8: mod_base = OTHER; note = 2'-O-methylcytidine-3'-phosphate
  modified_base 9: mod_base = OTHER; note = 2'-deoxy-2'-fluorouridine-3'-phosphate
  modified_base 10: mod_base = OTHER; note = 2'-deoxy-2'-fluorocytidine-3'-phosphate
  modified_base 11: mod_base = OTHER; note = 2'-deoxy-2'-fluoroadenosine-3'-phosphate
  modified_base 12: mod_base = OTHER; note = 2'-O-methyluridine-3'-phosphate
  modified_base 13: mod_base = OTHER; note = 2'-O-methylguanosine-3'-phosphate
  modified_base 14: mod_base = OTHER; note = 2'-O-methylguanosine-3'-phosphate
  modified_base 15: mod_base = OTHER; note = 2'-O-methyladenosine-3'-phosphate
  modified_base 16: mod_base = OTHER; note = 2'-O-methyluridine-3'-phosphate
  modified_base 17: mod_base = OTHER; note = 2'-O-methyladenosine-3'-phosphate
  modified_base 18: mod_base = OTHER; note = 2'-O-methylcytidine-3'-phosphate
  modified_base 19: mod_base = OTHER; note = 2'-O-methyladenosine-3'-phosphate
  modified_base 20: mod_base = OTHER; note = 2'-O-methyluridine-3'-phosphate
  modified_base 21: mod_base = OTHER; note = 2'-O-methyladenosine
ccacacgctcatggatacata

SEQ ID NO: 3647 - RNA, 21 nt, synthetic construct
  source 1..21: mol_type = other RNA
  modified_base 1: mod_base = OTHER; note = 2'-O-methylcytidine-3'-phosphate
  modified_base 2: mod_base = OTHER; note = 2'-O-methyladenosine-3'-phosphate
  modified_base 3: mod_base = OTHER; note = 2'-O-methylcytidine-3'-phosphate
  modified_base 4: mod_base = OTHER; note = 2'-O-methyladenosine-3'-phosphate
  modified_base 5: mod_base = OTHER; note = 2'-O-methylcytidine-3'-phosphate
  modified_base 6: mod_base = OTHER; note = 2'-O-methylguanosine-3'-phosphate
  modified_base 7: mod_base = OTHER; note = 2'-deoxy-2'-fluorocytidine-3'-phosphate
  modified_base 8: mod_base = OTHER; note = 2'-O-methyluridine-3'-phosphate
  modified_base 9: mod_base = OTHER; note = 2'-deoxy-2'-fluorocytidine-3'-phosphate
  modified_base 10: mod_base = OTHER; note = 2'-deoxy-2'-fluoroadenosine-3'-phosphate
  modified_base 11: mod_base = OTHER; note = 2'-deoxy-2'-fluorouridine-3'-phosphate
  modified_base 12: mod_base = OTHER; note = 2'-O-methylguanosine-3'-phosphate
  modified_base 13: mod_base = OTHER; note = 2'-O-methylguanosine-3'-phosphate
  modified_base 14: mod_base = OTHER; note = 2'-O-methyladenosine-3'-phosphate
  modified_base 15: mod_base = OTHER; note = 2'-O-methyluridine-3'-phosphate
  modified_base 16: mod_base = OTHER; note = 2'-O-methyladenosine-3'-phosphate
  modified_base 17: mod_base = OTHER; note = 2'-O-methylcytidine-3'-phosphate
  modified_base 18: mod_base = OTHER; note = 2'-O-methyladenosine-3'-phosphate
  modified_base 19: mod_base = OTHER; note = 2'-O-methyluridine-3'-phosphate
  modified_base 20: mod_base = OTHER; note = 2'-O-methyluridine-3'-phosphate
  modified_base 21: mod_base = OTHER; note = 2'-O-methyladenosine
cacacgctcatggatacatta

SEQ ID NO: 3648 - RNA, 21 nt, synthetic construct
  source 1..21: mol_type = other RNA
  modified_base 1: mod_base = OTHER; note = 2'-O-methyladenosine-3'-phosphate
  modified_base 2: mod_base = OTHER; note = 2'-O-methylcytidine-3'-phosphate
  modified_base 3: mod_base = OTHER; note = 2'-O-methylguanosine-3'-phosphate
  modified_base 4: mod_base = OTHER; note = 2'-O-methylcytidine-3'-phosphate
  modified_base 5: mod_base = OTHER; note = 2'-O-methyluridine-3'-phosphate
  modified_base 6: mod_base = OTHER; note = 2'-O-methylcytidine-3'-phosphate
  modified_base 7: mod_base = OTHER; note = 2'-deoxy-2'-fluoroadenosine-3'-phosphate
  modified_base 8: mod_base = OTHER; note = 2'-O-methyluridine-3'-phosphate
  modified_base 9: mod_base = OTHER; note = 2'-deoxy-2'-fluoroguanosine-3'-phosphate
  modified_base 10: mod_base = OTHER; note = 2'-deoxy-2'-fluoroguanosine-3'-phosphate
  modified_base 11: mod_base = OTHER; note = 2'-deoxy-2'-fluoroadenosine-3'-phosphate
  modified_base 12: mod_base = OTHER; note = 2'-O-methyluridine-3'-phosphate
  modified_base 13: mod_base = OTHER; note = 2'-O-methyladenosine-3'-phosphate
  modified_base 14: mod_base = OTHER; note = 2'-O-methylcytidine-3'-phosphate
  modified_base 15: mod_base = OTHER; note = 2'-O-methyladenosine-3'-phosphate
  modified_base 16: mod_base = OTHER; note = 2'-O-methyluridine-3'-phosphate
  modified_base 17: mod_base = OTHER; note = 2'-O-methyluridine-3'-phosphate
  modified_base 18: mod_base = OTHER; note = 2'-O-methylcytidine-3'-phosphate
  modified_base 19: mod_base = OTHER; note = 2'-O-methylcytidine-3'-phosphate
  modified_base 20: mod_base = OTHER; note = 2'-O-methyluridine-3'-phosphate
  modified_base 21: mod_base = OTHER; note = 2'-O-methyladenosine
acgctcatggatacattccta

SEQ ID NO: 3649 - RNA, 21 nt, synthetic construct
  source 1..21: mol_type = other RNA
  modified_base 1: mod_base = OTHER; note = 2'-O-methylcytidine-3'-phosphate
  modified_base 2: mod_base = OTHER; note = 2'-O-methylguanosine-3'-phosphate
  modified_base 3: mod_base = OTHER; note = 2'-O-methylcytidine-3'-phosphate
  modified_base 4: mod_base = OTHER; note = 2'-O-methyluridine-3'-phosphate
  modified_base 5: mod_base = OTHER; note = 2'-O-methylcytidine-3'-phosphate
  modified_base 6: mod_base = OTHER; note = 2'-O-methyladenosine-3'-phosphate
  modified_base 7: mod_base = OTHER; note = 2'-deoxy-2'-fluorouridine-3'-phosphate
  modified_base 8: mod_base = OTHER; note = 2'-O-methylguanosine-3'-phosphate
  modified_base 9: mod_base = OTHER; note = 2'-deoxy-2'-fluoroguanosine-3'-phosphate
  modified_base 10: mod_base = OTHER; note = 2'-deoxy-2'-fluoroadenosine-3'-phosphate
  modified_base 11: mod_base = OTHER; note = 2'-deoxy-2'-fluorouridine-3'-phosphate
  modified_base 12: mod_base = OTHER; note = 2'-O-methyladenosine-3'-phosphate
  modified_base 13: mod_base = OTHER; note = 2'-O-methylcytidine-3'-phosphate
  modified_base 14: mod_base = OTHER; note = 2'-O-methyladenosine-3'-phosphate
  modified_base 15: mod_base = OTHER; note = 2'-O-methyluridine-3'-phosphate
  modified_base 16: mod_base = OTHER; note = 2'-O-methyluridine-3'-phosphate
  modified_base 17: mod_base = OTHER; note = 2'-O-methylcytidine-3'-phosphate
  modified_base 18: mod_base = OTHER; note = 2'-O-methylcytidine-3'-phosphate
  modified_base 19: mod_base = OTHER; note = 2'-O-methyluridine-3'-phosphate
  modified_base 20: mod_base = OTHER; note = 2'-O-methyluridine-3'-phosphate
  modified_base 21: mod_base = OTHER; note = 2'-O-methyladenosine
cgctcatggatacattcctta

SEQ ID NO: 3650 - RNA, 21 nt, synthetic construct
  source 1..21: mol_type = other RNA
  modified_base 1: mod_base = OTHER; note = 2'-O-methylguanosine-3'-phosphate
  modified_base 2: mod_base = OTHER; note = 2'-O-methylcytidine-3'-phosphate
  modified_base 3: mod_base = OTHER; note = 2'-O-methyluridine-3'-phosphate
  modified_base 4: mod_base = OTHER; note = 2'-O-methylcytidine-3'-phosphate
  modified_base 5: mod_base = OTHER; note = 2'-O-methyladenosine-3'-phosphate
  modified_base 6: mod_base = OTHER; note = 2'-O-methyluridine-3'-phosphate
  modified_base 7: mod_base = OTHER; note = 2'-deoxy-2'-fluoroguanosine-3'-phosphate
  modified_base 8: mod_base = OTHER; note = 2'-O-methylguanosine-3'-phosphate
  modified_base 9: mod_base = OTHER; note = 2'-deoxy-2'-fluoroadenosine-3'-phosphate
  modified_base 10: mod_base = OTHER; note = 2'-deoxy-2'-fluorouridine-3'-phosphate
  modified_base 11: mod_base = OTHER; note = 2'-deoxy-2'-fluoroadenosine-3'-phosphate
  modified_base 12: mod_base = OTHER; note = 2'-O-methylcytidine-3'-phosphate
  modified_base 13: mod_base = OTHER; note = 2'-O-methyladenosine-3'-phosphate
  modified_base 14: mod_base = OTHER; note = 2'-O-methyluridine-3'-phosphate
  modified_base 15: mod_base = OTHER; note = 2'-O-methyluridine-3'-phosphate
  modified_base 16: mod_base = OTHER; note = 2'-O-methylcytidine-3'-phosphate
  modified_base 17: mod_base = OTHER; note = 2'-O-methylcytidine-3'-phosphate
  modified_base 18: mod_base = OTHER; note = 2'-O-methyluridine-3'-phosphate
  modified_base 19: mod_base = OTHER; note = 2'-O-methyluridine-3'-phosphate
  modified_base 20: mod_base = OTHER; note = 2'-O-methylcytidine-3'-phosphate
  modified_base 21: mod_base = OTHER; note = 2'-O-methyladenosine
gctcatggatacattccttca

SEQ ID NO: 3651 - RNA, 21 nt, synthetic construct
  source 1..21: mol_type = other RNA
  modified_base 1: mod_base = OTHER; note = 2'-O-methylcytidine-3'-phosphate
  modified_base 2: mod_base = OTHER; note = 2'-O-methyluridine-3'-phosphate
  modified_base 3: mod_base = OTHER; note = 2'-O-methylcytidine-3'-phosphate
  modified_base 4: mod_base = OTHER; note = 2'-O-methyladenosine-3'-phosphate
  modified_base 5: mod_base = OTHER; note = 2'-O-methyluridine-3'-phosphate
  modified_base 6: mod_base = OTHER; note = 2'-O-methylguanosine-3'-phosphate
  modified_base 7: mod_base = OTHER; note = 2'-deoxy-2'-fluoroguanosine-3'-phosphate
  modified_base 8: mod_base = OTHER; note = 2'-O-methyladenosine-3'-phosphate
  modified_base 9: mod_base = OTHER; note = 2'-deoxy-2'-fluorouridine-3'-phosphate
  modified_base 10: mod_base = OTHER; note = 2'-deoxy-2'-fluoroadenosine-3'-phosphate
  modified_base 11: mod_base = OTHER; note = 2'-deoxy-2'-fluorocytidine-3'-phosphate
  modified_base 12: mod_base = OTHER; note = 2'-O-methyladenosine-3'-phosphate
  modified_base 13: mod_base = OTHER; note = 2'-O-methyluridine-3'-phosphate
  modified_base 14: mod_base = OTHER; note = 2'-O-methyluridine-3'-phosphate
  modified_base 15: mod_base = OTHER; note = 2'-O-methylcytidine-3'-phosphate
  modified_base 16: mod_base = OTHER; note = 2'-O-methylcytidine-3'-phosphate
  modified_base 17: mod_base = OTHER; note = 2'-O-methyluridine-3'-phosphate
  modified_base 18: mod_base = OTHER; note = 2'-O-methyluridine-3'-phosphate
  modified_base 19: mod_base = OTHER; note = 2'-O-methylcytidine-3'-phosphate
  modified_base 20: mod_base = OTHER; note = 2'-O-methylcytidine-3'-phosphate
  modified_base 21: mod_base = OTHER; note = 2'-O-methyladenosine
ctcatggatacattccttcca

SEQ ID NO: 3652 - RNA, 21 nt, synthetic construct
  source 1..21: mol_type = other RNA
  modified_base 1: mod_base = OTHER; note = 2'-O-methyluridine-3'-phosphate
  modified_base 2: mod_base = OTHER; note = 2'-O-methylcytidine-3'-phosphate
  modified_base 3: mod_base = OTHER; note = 2'-O-methyladenosine-3'-phosphate
  modified_base 4: mod_base = OTHER; note = 2'-O-methyluridine-3'-phosphate
  modified_base 5: mod_base = OTHER; note = 2'-O-methylguanosine-3'-phosphate
  modified_base 6: mod_base = OTHER; note = 2'-O-methylguanosine-3'-phosphate
  modified_base 7: mod_base = OTHER; note = 2'-deoxy-2'-fluoroadenosine-3'-phosphate
  modified_base 8: mod_base = OTHER; note = 2'-O-methyluridine-3'-phosphate
  modified_base 9: mod_base = OTHER; note = 2'-deoxy-2'-fluoroadenosine-3'-phosphate
  modified_base 10: mod_base = OTHER; note = 2'-deoxy-2'-fluorocytidine-3'-phosphate
  modified_base 11: mod_base = OTHER; note = 2'-deoxy-2'-fluoroadenosine-3'-phosphate
  modified_base 12: mod_base = OTHER; note = 2'-O-methyluridine-3'-phosphate
  modified_base 13: mod_base = OTHER; note = 2'-O-methyluridine-3'-phosphate
  modified_base 14: mod_base = OTHER; note = 2'-O-methylcytidine-3'-phosphate
  modified_base 15: mod_base = OTHER; note = 2'-O-methylcytidine-3'-phosphate
  modified_base 16: mod_base = OTHER; note = 2'-O-methyluridine-3'-phosphate
  modified_base 17: mod_base = OTHER; note = 2'-O-methyluridine-3'-phosphate
  modified_base 18: mod_base = OTHER; note = 2'-O-methylcytidine-3'-phosphate
  modified_base 19: mod_base = OTHER; note = 2'-O-methylcytidine-3'-phosphate
  modified_base 20: mod_base = OTHER; note = 2'-O-methyladenosine-3'-phosphate
  modified_base 21: mod_base = OTHER; note = 2'-O-methyladenosine
tcatggatacattccttccaa

SEQ ID NO: 3653 - RNA, 21 nt, synthetic construct
  source 1..21: mol_type = other RNA
  modified_base 1: mod_base = OTHER; note = 2'-O-methylcytidine-3'-phosphate
  modified_base 2: mod_base = OTHER; note = 2'-O-methyladenosine-3'-phosphate
  modified_base 3: mod_base = OTHER; note = 2'-O-methyluridine-3'-phosphate
  modified_base 4: mod_base = OTHER; note = 2'-O-methylguanosine-3'-phosphate
  modified_base 5: mod_base = OTHER; note = 2'-O-methylguanosine-3'-phosphate
  modified_base 6: mod_base = OTHER; note = 2'-O-methyladenosine-3'-phosphate
  modified_base 7: mod_base = OTHER; note = 2'-deoxy-2'-fluorouridine-3'-phosphate
  modified_base 8: mod_base = OTHER; note = 2'-O-methyladenosine-3'-phosphate
  modified_base 9: mod_base = OTHER; note = 2'-deoxy-2'-fluorocytidine-3'-phosphate
  modified_base 10: mod_base = OTHER; note = 2'-deoxy-2'-fluoroadenosine-3'-phosphate
  modified_base 11: mod_base = OTHER; note = 2'-deoxy-2'-fluorouridine-3'-phosphate
  modified_base 12: mod_base = OTHER; note = 2'-O-methyluridine-3'-phosphate
  modified_base 13: mod_base = OTHER; note = 2'-O-methylcytidine-3'-phosphate
  modified_base 14: mod_base = OTHER; note = 2'-O-methylcytidine-3'-phosphate
  modified_base 15: mod_base = OTHER; note = 2'-O-methyluridine-3'-phosphate
  modified_base 16: mod_base = OTHER; note = 2'-O-methyluridine-3'-phosphate
  modified_base 17: mod_base = OTHER; note = 2'-O-methylcytidine-3'-phosphate
  modified_base 18: mod_base = OTHER; note = 2'-O-methylcytidine-3'-phosphate
  modified_base 19: mod_base = OTHER; note = 2'-O-methyladenosine-3'-phosphate
  modified_base 20: mod_base = OTHER; note = 2'-O-methyladenosine-3'-phosphate
  modified_base 21: mod_base = OTHER; note = 2'-O-methyladenosine
catggatacattccttccaaa

SEQ ID NO: 3654 - RNA, 21 nt, synthetic construct
  source 1..21: mol_type = other RNA
  modified_base 1: mod_base = OTHER; note = 2'-O-methyladenosine-3'-phosphate
  modified_base 2: mod_base = OTHER; note = 2'-O-methyluridine-3'-phosphate
  modified_base 3: mod_base = OTHER; note = 2'-O-methylguanosine-3'-phosphate
  modified_base 4: mod_base = OTHER; note = 2'-O-methylguanosine-3'-phosphate
  modified_base 5: mod_base = OTHER; note = 2'-O-methyladenosine-3'-phosphate
  modified_base 6: mod_base = OTHER; note = 2'-O-methyluridine-3'-phosphate
  modified_base 7: mod_base = OTHER; note = 2'-deoxy-2'-fluoroadenosine-3'-phosphate
  modified_base 8: mod_base = OTHER; note = 2'-O-methylcytidine-3'-phosphate
  modified_base 9: mod_base = OTHER; note = 2'-deoxy-2'-fluoroadenosine-3'-phosphate
  modified_base 10: mod_base = OTHER; note = 2'-deoxy-2'-fluorouridine-3'-phosphate
  modified_base 11: mod_base = OTHER; note = 2'-deoxy-2'-fluorouridine-3'-phosphate
  modified_base 12: mod_base = OTHER; note = 2'-O-methylcytidine-3'-phosphate
  modified_base 13: mod_base = OTHER; note = 2'-O-methylcytidine-3'-phosphate
  modified_base 14: mod_base = OTHER; note = 2'-O-methyluridine-3'-phosphate
  modified_base 15: mod_base = OTHER; note = 2'-O-methyluridine-3'-phosphate
  modified_base 16: mod_base = OTHER; note = 2'-O-methylcytidine-3'-phosphate
  modified_base 17: mod_base = OTHER; note = 2'-O-methylcytidine-3'-phosphate
  modified_base 18: mod_base = OTHER; note = 2'-O-methyladenosine-3'-phosphate
  modified_base 19: mod_base = OTHER; note = 2'-O-methyladenosine-3'-phosphate
  modified_base 20: mod_base = OTHER; note = 2'-O-methyladenosine-3'-phosphate
  modified_base 21: mod_base = OTHER; note = 2'-O-methyladenosine
atggatacattccttccaaaa

SEQ ID NO: 3655 - RNA, 21 nt, synthetic construct
  source 1..21: mol_type = other RNA
  modified_base 1: mod_base = OTHER; note = 2'-O-methyluridine-3'-phosphate
  modified_base 2: mod_base = OTHER; note = 2'-O-methylguanosine-3'-phosphate
  modified_base 3: mod_base = OTHER; note = 2'-O-methylguanosine-3'-phosphate
  modified_base 4: mod_base = OTHER; note = 2'-O-methyladenosine-3'-phosphate
  modified_base 5: mod_base = OTHER; note = 2'-O-methyluridine-3'-phosphate
  modified_base 6: mod_base = OTHER; note = 2'-O-methyladenosine-3'-phosphate
  modified_base 7: mod_base = OTHER; note = 2'-deoxy-2'-fluorocytidine-3'-phosphate
  modified_base 8: mod_base = OTHER; note = 2'-O-methyladenosine-3'-phosphate
  modified_base 9: mod_base = OTHER; note = 2'-deoxy-2'-fluorouridine-3'-phosphate
  modified_base 10: mod_base = OTHER; note = 2'-deoxy-2'-fluorouridine-3'-phosphate
  modified_base 11: mod_base = OTHER; note = 2'-deoxy-2'-fluorocytidine-3'-phosphate
  modified_base 12: mod_base = OTHER; note = 2'-O-methylcytidine-3'-phosphate
  modified_base 13: mod_base = OTHER; note = 2'-O-methyluridine-3'-phosphate
  modified_base 14: mod_base = OTHER; note = 2'-O-methyluridine-3'-phosphate
  modified_base 15: mod_base = OTHER; note = 2'-O-methylcytidine-3'-phosphate
  modified_base 16: mod_base = OTHER; note = 2'-O-methylcytidine-3'-phosphate
  modified_base 17: mod_base = OTHER; note = 2'-O-methyladenosine-3'-phosphate
  modified_base 18: mod_base = OTHER; note = 2'-O-methyladenosine-3'-phosphate
  modified_base 19: mod_base = OTHER; note = 2'-O-methyladenosine-3'-phosphate
  modified_base 20: mod_base = OTHER; note = 2'-O-methyluridine-3'-phosphate
  modified_base 21: mod_base = OTHER; note = 2'-O-methyladenosine
tggatacattccttccaaata

SEQ ID NO: 3656 - RNA, 21 nt, synthetic construct
  source 1..21: mol_type = other RNA
  modified_base 1: mod_base = OTHER; note = 2'-O-methylguanosine-3'-phosphate
  modified_base 2: mod_base = OTHER; note = 2'-O-methylguanosine-3'-phosphate
  modified_base 3: mod_base = OTHER; note = 2'-O-methyladenosine-3'-phosphate
  modified_base 4: mod_base = OTHER; note = 2'-O-methyluridine-3'-phosphate
  modified_base 5: mod_base = OTHER; note = 2'-O-methyladenosine-3'-phosphate
  modified_base 6: mod_base = OTHER; note = 2'-O-methylcytidine-3'-phosphate
  modified_base 7: mod_base = OTHER; note = 2'-deoxy-2'-fluoroadenosine-3'-phosphate
  modified_base 8: mod_base = OTHER; note = 2'-O-methyluridine-3'-phosphate
  modified_base 9: mod_base = OTHER; note = 2'-deoxy-2'-fluorouridine-3'-phosphate
  modified_base 10: mod_base = OTHER; note = 2'-deoxy-2'-fluorocytidine-3'-phosphate
  modified_base 11: mod_base = OTHER; note = 2'-deoxy-2'-fluorocytidine-3'-phosphate
  modified_base 12: mod_base = OTHER; note = 2'-O-methyluridine-3'-phosphate
  modified_base 13: mod_base = OTHER; note = 2'-O-methyluridine-3'-phosphate
  modified_base 14: mod_base = OTHER; note = 2'-O-methylcytidine-3'-phosphate
  modified_base 15: mod_base = OTHER; note = 2'-O-methylcytidine-3'-phosphate
  modified_base 16: mod_base = OTHER; note = 2'-O-methyladenosine-3'-phosphate
  modified_base 17: mod_base = OTHER; note = 2'-O-methyladenosine-3'-phosphate
  modified_base 18: mod_base = OTHER; note = 2'-O-methyladenosine-3'-phosphate
  modified_base 19: mod_base = OTHER; note = 2'-O-methyluridine-3'-phosphate
  modified_base 20: mod_base = OTHER; note = 2'-O-methyluridine-3'-phosphate
  modified_base 21: mod_base = OTHER; note = 2'-O-methyladenosine
ggatacattccttccaaatta

SEQ ID NO: 3657 - RNA, 21 nt, synthetic construct
  source 1..21: mol_type = other RNA
  modified_base 1: mod_base = OTHER; note = 2'-O-methylguanosine-3'-phosphate
  modified_base 2: mod_base = OTHER; note = 2'-O-methyladenosine-3'-phosphate
  modified_base 3: mod_base = OTHER; note = 2'-O-methyluridine-3'-phosphate
  modified_base 4: mod_base = OTHER; note = 2'-O-methyladenosine-3'-phosphate
  modified_base 5: mod_base = OTHER; note = 2'-O-methylcytidine-3'-phosphate
  modified_base 6: mod_base = OTHER; note = 2'-O-methyladenosine-3'-phosphate
  modified_base 7: mod_base = OTHER; note = 2'-deoxy-2'-fluorouridine-3'-phosphate
  modified_base 8: mod_base = OTHER; note = 2'-O-methyluridine-3'-phosphate
  modified_base 9: mod_base = OTHER; note = 2'-deoxy-2'-fluorocytidine-3'-phosphate
  modified_base 10: mod_base = OTHER; note = 2'-deoxy-2'-fluorocytidine-3'-phosphate
  modified_base 11: mod_base = OTHER; note = 2'-deoxy-2'-fluorouridine-3'-phosphate
  modified_base 12: mod_base = OTHER; note = 2'-O-methyluridine-3'-phosphate
  modified_base 13: mod_base = OTHER; note = 2'-O-methylcytidine-3'-phosphate
  modified_base 14: mod_base = OTHER; note = 2'-O-methylcytidine-3'-phosphate
  modified_base 15: mod_base = OTHER; note = 2'-O-methyladenosine-3'-phosphate
  modified_base 16: mod_base = OTHER; note = 2'-O-methyladenosine-3'-phosphate
  modified_base 17: mod_base = OTHER; note = 2'-O-methyladenosine-3'-phosphate
  modified_base 18: mod_base = OTHER; note = 2'-O-methyluridine-3'-phosphate
  modified_base 19: mod_base = OTHER; note = 2'-O-methyluridine-3'-phosphate
  modified_base 20: mod_base = OTHER; note = 2'-O-methyluridine-3'-phosphate
  modified_base 21: mod_base = OTHER; note = 2'-O-methyladenosine
gatacattccttccaaattta

SEQ ID NO: 3658 - RNA, 21 nt, synthetic construct
  source 1..21: mol_type = other RNA
  modified_base 1: mod_base = OTHER; note = 2'-O-methyladenosine-3'-phosphate
  modified_base 2: mod_base = OTHER; note = 2'-O-methyluridine-3'-phosphate
  modified_base 3: mod_base = OTHER; note = 2'-O-methyladenosine-3'-phosphate
  modified_base 4: mod_base = OTHER; note = 2'-O-methylcytidine-3'-phosphate
  modified_base 5: mod_base = OTHER; note = 2'-O-methyladenosine-3'-phosphate
  modified_base 6: mod_base = OTHER; note = 2'-O-methyluridine-3'-phosphate
  modified_base 7: mod_base = OTHER; note = 2'-deoxy-2'-fluorouridine-3'-phosphate
  modified_base 8: mod_base = OTHER; note = 2'-O-methylcytidine-3'-phosphate
  modified_base 9: mod_base = OTHER; note = 2'-deoxy-2'-fluorocytidine-3'-phosphate
  modified_base 10: mod_base = OTHER; note = 2'-deoxy-2'-fluorouridine-3'-phosphate
  modified_base 11: mod_base = OTHER; note = 2'-deoxy-2'-fluorouridine-3'-phosphate
  modified_base 12: mod_base = OTHER; note = 2'-O-methylcytidine-3'-phosphate
  modified_base 13: mod_base = OTHER; note = 2'-O-methylcytidine-3'-phosphate
  modified_base 14: mod_base = OTHER; note = 2'-O-methyladenosine-3'-phosphate
  modified_base 15: mod_base = OTHER; note = 2'-O-methyladenosine-3'-phosphate
  modified_base 16: mod_base = OTHER; note = 2'-O-methyladenosine-3'-phosphate
  modified_base 17: mod_base = OTHER; note = 2'-O-methyluridine-3'-phosphate
  modified_base 18: mod_base = OTHER; note = 2'-O-methyluridine-3'-phosphate
  modified_base 19: mod_base = OTHER; note = 2'-O-methyluridine-3'-phosphate
  modified_base 20: mod_base = OTHER; note = 2'-O-methylcytidine-3'-phosphate
  modified_base 21: mod_base = OTHER; note = 2'-O-methyladenosine
atacattccttccaaatttca

SEQ ID NO: 3659 - RNA, 21 nt, synthetic construct
  source 1..21: mol_type = other RNA
  modified_base 1: mod_base = OTHER; note = 2'-O-methyluridine-3'-phosphate
  modified_base 2: mod_base = OTHER; note = 2'-O-methyladenosine-3'-phosphate
  modified_base 3: mod_base = OTHER; note = 2'-O-methylcytidine-3'-phosphate
  modified_base 4: mod_base = OTHER; note = 2'-O-methyladenosine-3'-phosphate
  modified_base 5: mod_base = OTHER; note = 2'-O-methyluridine-3'-phosphate
  modified_base 6: mod_base = OTHER; note = 2'-O-methyluridine-3'-phosphate
  modified_base 7: mod_base = OTHER; note = 2'-deoxy-2'-fluorocytidine-3'-phosphate
  modified_base 8: mod_base = OTHER; note = 2'-O-methylcytidine-3'-phosphate
  modified_base 9: mod_base = OTHER; note = 2'-deoxy-2'-fluorouridine-3'-phosphate
  modified_base 10: mod_base = OTHER; note = 2'-deoxy-2'-fluorouridine-3'-phosphate
  modified_base 11: mod_base = OTHER; note = 2'-deoxy-2'-fluorocytidine-3'-phosphate
  modified_base 12: mod_base = OTHER; note = 2'-O-methylcytidine-3'-phosphate
  modified_base 13: mod_base = OTHER; note = 2'-O-methyladenosine-3'-phosphate
  modified_base 14: mod_base = OTHER; note = 2'-O-methyladenosine-3'-phosphate
  modified_base 15: mod_base = OTHER; note = 2'-O-methyladenosine-3'-phosphate
  modified_base 16: mod_base = OTHER; note = 2'-O-methyluridine-3'-phosphate
  modified_base 17: mod_base = OTHER; note = 2'-O-methyluridine-3'-phosphate
  modified_base 18: mod_base = OTHER; note = 2'-O-methyluridine-3'-phosphate
  modified_base 19: mod_base = OTHER; note = 2'-O-methylcytidine-3'-phosphate
  modified_base 20: mod_base = OTHER; note = 2'-O-methylcytidine-3'-phosphate
  modified_base 21: mod_base = OTHER; note = 2'-O-methyladenosine
tacattccttccaaatttcca

SEQ ID NO: 3660 - RNA, 21 nt, synthetic construct
  source 1..21: mol_type = other RNA
  modified_base 1: mod_base = OTHER; note = 2'-O-methyladenosine-3'-phosphate
  modified_base 2: mod_base = OTHER; note = 2'-O-methylcytidine-3'-phosphate
  modified_base 3: mod_base = OTHER; note = 2'-O-methyladenosine-3'-phosphate
  modified_base 4: mod_base = OTHER; note = 2'-O-methyluridine-3'-phosphate
  modified_base 5: mod_base = OTHER; note = 2'-O-methyluridine-3'-phosphate
  modified_base 6: mod_base = OTHER; note = 2'-O-methylcytidine-3'-phosphate
  modified_base 7: mod_base = OTHER; note = 2'-deoxy-2'-fluorocytidine-3'-phosphate
  modified_base 8: mod_base = OTHER; note = 2'-O-methyluridine-3'-phosphate
  modified_base 9: mod_base = OTHER; note = 2'-deoxy-2'-fluorouridine-3'-phosphate
  modified_base 10: mod_base = OTHER; note = 2'-deoxy-2'-fluorocytidine-3'-phosphate
  modified_base 11: mod_base = OTHER; note = 2'-deoxy-2'-fluorocytidine-3'-phosphate
  modified_base 12: mod_base = OTHER; note = 2'-O-methyladenosine-3'-phosphate
  modified_base 13: mod_base = OTHER; note = 2'-O-methyladenosine-3'-phosphate
  modified_base 14: mod_base = OTHER; note = 2'-O-methyladenosine-3'-phosphate
  modified_base 15: mod_base = OTHER; note = 2'-O-methyluridine-3'-phosphate
  modified_base 16: mod_base = OTHER; note = 2'-O-methyluridine-3'-phosphate
  modified_base 17: mod_base = OTHER; note = 2'-O-methyluridine-3'-phosphate
  modified_base 18: mod_base = OTHER; note = 2'-O-methylcytidine-3'-phosphate
  modified_base 19: mod_base = OTHER; note = 2'-O-methylcytidine-3'-phosphate
  modified_base 20: mod_base = OTHER; note = 2'-O-methyladenosine-3'-phosphate
  modified_base 21: mod_base = OTHER; note = 2'-O-methyladenosine
acattccttccaaatttccaa

SEQ ID NO: 3661 - RNA, 21 nt, synthetic construct
  source 1..21: mol_type = other RNA
  modified_base 1: mod_base = OTHER; note = 2'-O-methylcytidine-3'-phosphate
  modified_base 2: mod_base = OTHER; note = 2'-O-methyladenosine-3'-phosphate
  modified_base 3: mod_base = OTHER; note = 2'-O-methyluridine-3'-phosphate
  modified_base 4: mod_base = OTHER; note = 2'-O-methyluridine-3'-phosphate
  modified_base 5: mod_base = OTHER; note = 2'-O-methylcytidine-3'-phosphate
  modified_base 6: mod_base = OTHER; note = 2'-O-methylcytidine-3'-phosphate
  modified_base 7: mod_base = OTHER; note = 2'-deoxy-2'-fluorouridine-3'-phosphate
  modified_base 8: mod_base = OTHER; note = 2'-O-methyluridine-3'-phosphate
  modified_base 9: mod_base = OTHER; note = 2'-deoxy-2'-fluorocytidine-3'-phosphate
  modified_base 10: mod_base = OTHER; note = 2'-deoxy-2'-fluorocytidine-3'-phosphate
  modified_base 11: mod_base = OTHER; note = 2'-deoxy-2'-fluoroadenosine-3'-phosphate
  modified_base 12: mod_base = OTHER; note = 2'-O-methyladenosine-3'-phosphate
  modified_base 13: mod_base = OTHER; note = 2'-O-methyladenosine-3'-phosphate
  modified_base 14: mod_base = OTHER; note = 2'-O-methyluridine-3'-phosphate
  modified_base 15: mod_base = OTHER; note = 2'-O-methyluridine-3'-phosphate
  modified_base 16: mod_base = OTHER; note = 2'-O-methyluridine-3'-phosphate
  modified_base 17: mod_base = OTHER; note = 2'-O-methylcytidine-3'-phosphate
  modified_base 18: mod_base = OTHER; note = 2'-O-methylcytidine-3'-phosphate
  modified_base 19: mod_base = OTHER; note = 2'-O-methyladenosine-3'-phosphate
  modified_base 20: mod_base = OTHER; note = 2'-O-methyladenosine-3'-phosphate
  modified_base 21: mod_base = OTHER; note = 2'-O-methyladenosine
cattccttccaaatttccaaa

SEQ ID NO: 3662 - RNA, 21 nt, synthetic construct
  source 1..21: mol_type = other RNA
  modified_base 1: mod_base = OTHER; note = 2'-O-methyladenosine-3'-phosphate
  modified_base 2: mod_base = OTHER; note = 2'-O-methyluridine-3'-phosphate
  modified_base 3: mod_base = OTHER; note = 2'-O-methyluridine-3'-phosphate
  modified_base 4: mod_base = OTHER; note = 2'-O-methylcytidine-3'-phosphate
  modified_base 5: mod_base = OTHER; note = 2'-O-methylcytidine-3'-phosphate
  modified_base 6: mod_base = OTHER; note = 2'-O-methyluridine-3'-phosphate
  modified_base 7: mod_base = OTHER; note = 2'-deoxy-2'-fluorouridine-3'-phosphate
  modified_base 8: mod_base = OTHER; note = 2'-O-methylcytidine-3'-phosphate
  modified_base 9: mod_base = OTHER; note = 2'-deoxy-2'-fluorocytidine-3'-phosphate
  modified_base 10: mod_base = OTHER; note = 2'-deoxy-2'-fluoroadenosine-3'-phosphate
  modified_base 11: mod_base = OTHER; note = 2'-deoxy-2'-fluoroadenosine-3'-phosphate
  modified_base 12: mod_base = OTHER; note = 2'-O-methyladenosine-3'-phosphate
  modified_base 13: mod_base = OTHER; note = 2'-O-methyluridine-3'-phosphate
  modified_base 14: mod_base = OTHER; note = 2'-O-methyluridine-3'-phosphate
  modified_base 15: mod_base = OTHER; note = 2'-O-methyluridine-3'-phosphate
  modified_base 16: mod_base = OTHER; note = 2'-O-methylcytidine-3'-phosphate
  modified_base 17: mod_base = OTHER; note = 2'-O-methylcytidine-3'-phosphate
  modified_base 18: mod_base = OTHER; note = 2'-O-methyladenosine-3'-phosphate
  modified_base 19: mod_base = OTHER; note = 2'-O-methyladenosine-3'-phosphate
  modified_base 20: mod_base = OTHER; note = 2'-O-methyladenosine-3'-phosphate
  modified_base 21: mod_base = OTHER; note = 2'-O-methyladenosine
attccttccaaatttccaaaa

SEQ ID NO: 3663 - RNA, 21 nt, synthetic construct
  source 1..21: mol_type = other RNA
  modified_base 1: mod_base = OTHER; note = 2'-O-methyluridine-3'-phosphate
  modified_base 2: mod_base = OTHER; note = 2'-O-methyluridine-3'-phosphate
  modified_base 3: mod_base = OTHER; note = 2'-O-methylcytidine-3'-phosphate
  modified_base 4: mod_base = OTHER; note = 2'-O-methylcytidine-3'-phosphate
  modified_base 5: mod_base = OTHER; note = 2'-O-methyluridine-3'-phosphate
  modified_base 6: mod_base = OTHER; note = 2'-O-methyluridine-3'-phosphate
  modified_base 7: mod_base = OTHER; note = 2'-deoxy-2'-fluorocytidine-3'-phosphate
  modified_base 8: mod_base = OTHER; note = 2'-O-methylcytidine-3'-phosphate
  modified_base 9: mod_base = OTHER; note = 2'-deoxy-2'-fluoroadenosine-3'-phosphate
  modified_base 10: mod_base = OTHER; note = 2'-deoxy-2'-fluoroadenosine-3'-phosphate
  modified_base 11: mod_base = OTHER; note = 2'-deoxy-2'-fluoroadenosine-3'-phosphate
  modified_base 12: mod_base = OTHER; note = 2'-O-methyluridine-3'-phosphate
  modified_base 13: mod_base = OTHER; note = 2'-O-methyluridine-3'-phosphate
  modified_base 14: mod_base = OTHER; note = 2'-O-methyluridine-3'-phosphate
  modified_base 15: mod_base = OTHER; note = 2'-O-methylcytidine-3'-phosphate
  modified_base 16: mod_base = OTHER; note = 2'-O-methylcytidine-3'-phosphate
  modified_base 17: mod_base = OTHER; note = 2'-O-methyladenosine-3'-phosphate
  modified_base 18: mod_base = OTHER; note = 2'-O-methyladenosine-3'-phosphate
  modified_base 19: mod_base = OTHER; note = 2'-O-methyladenosine-3'-phosphate
  modified_base 20: mod_base = OTHER; note = 2'-O-methylcytidine-3'-phosphate
  modified_base 21: mod_base = OTHER; note = 2'-O-methyladenosine
ttccttccaaatttccaaaca

SEQ ID NO: 3664 - RNA, 21 nt, synthetic construct
  source 1..21: mol_type = other RNA
  modified_base 1: mod_base = OTHER; note = 2'-O-methyluridine-3'-phosphate
  modified_base 2: mod_base = OTHER; note = 2'-O-methylcytidine-3'-phosphate
  modified_base 3: mod_base = OTHER; note = 2'-O-methylcytidine-3'-phosphate
  modified_base 4: mod_base = OTHER; note = 2'-O-methyluridine-3'-phosphate
  modified_base 5: mod_base = OTHER; note = 2'-O-methyluridine-3'-phosphate
  modified_base 6: mod_base = OTHER; note = 2'-O-methylcytidine-3'-phosphate
  modified_base 7: mod_base = OTHER; note = 2'-deoxy-2'-fluorocytidine-3'-phosphate
  modified_base 8: mod_base = OTHER; note = 2'-O-methyladenosine-3'-phosphate
  modified_base 9: mod_base = OTHER; note = 2'-deoxy-2'-fluoroadenosine-3'-phosphate
  modified_base 10: mod_base = OTHER; note = 2'-deoxy-2'-fluoroadenosine-3'-phosphate
  modified_base 11: mod_base = OTHER; note = 2'-deoxy-2'-fluorouridine-3'-phosphate
  modified_base 12: mod_base = OTHER; note = 2'-O-methyluridine-3'-phosphate
  modified_base 13: mod_base = OTHER; note = 2'-O-methyluridine-3'-phosphate
  modified_base 14: mod_base = OTHER; note = 2'-O-methylcytidine-3'-phosphate
  modified_base 15: mod_base = OTHER; note = 2'-O-methylcytidine-3'-phosphate
  modified_base 16: mod_base = OTHER; note = 2'-O-methyladenosine-3'-phosphate
  modified_base 17: mod_base = OTHER; note = 2'-O-methyladenosine-3'-phosphate
  modified_base 18: mod_base = OTHER; note = 2'-O-methyladenosine-3'-phosphate
  modified_base 19: mod_base = OTHER; note = 2'-O-methylcytidine-3'-phosphate
  modified_base 20: mod_base = OTHER; note = 2'-O-methyladenosine-3'-phosphate
  modified_base 21: mod_base = OTHER; note = 2'-O-methyladenosine
tccttccaaatttccaaacaa

SEQ ID NO: 3665 - RNA, 21 nt, synthetic construct
  source 1..21: mol_type = other RNA
  modified_base 1: mod_base = OTHER; note = 2'-O-methylcytidine-3'-phosphate
  modified_base 2: mod_base = OTHER; note = 2'-O-methylcytidine-3'-phosphate
  modified_base 3: mod_base = OTHER; note = 2'-O-methyluridine-3'-phosphate
  modified_base 4: mod_base = OTHER; note = 2'-O-methyluridine-3'-phosphate
  modified_base 5: mod_base = OTHER; note = 2'-O-methylcytidine-3'-phosphate
  modified_base 6: mod_base = OTHER; note = 2'-O-methylcytidine-3'-phosphate
  modified_base 7: mod_base = OTHER; note = 2'-deoxy-2'-fluoroadenosine-3'-phosphate
  modified_base 8: mod_base = OTHER; note = 2'-O-methyladenosine-3'-phosphate
  modified_base 9: mod_base = OTHER; note = 2'-deoxy-2'-fluoroadenosine-3'-phosphate
  modified_base 10: mod_base = OTHER; note = 2'-deoxy-2'-fluorouridine-3'-phosphate
  modified_base 11: mod_base = OTHER; note = 2'-deoxy-2'-fluorouridine-3'-phosphate
  modified_base 12: mod_base = OTHER; note = 2'-O-methyluridine-3'-phosphate
  modified_base 13: mod_base = OTHER; note = 2'-O-methylcytidine-3'-phosphate
  modified_base 14: mod_base = OTHER; note = 2'-O-methylcytidine-3'-phosphate
  modified_base 15: mod_base = OTHER; note = 2'-O-methyladenosine-3'-phosphate
  modified_base 16: mod_base = OTHER; note = 2'-O-methyladenosine-3'-phosphate
  modified_base 17: mod_base = OTHER; note = 2'-O-methyladenosine-3'-phosphate
  modified_base 18: mod_base = OTHER; note = 2'-O-methylcytidine-3'-phosphate
  modified_base 19: mod_base = OTHER; note = 2'-O-methyladenosine-3'-phosphate
  modified_base 20: mod_base = OTHER; note = 2'-O-methyladenosine-3'-phosphate
  modified_base 21: mod_base = OTHER; note = 2'-O-methyladenosine
ccttccaaatttccaaacaaa

SEQ ID NO: 3666 - RNA, 21 nt, synthetic construct
  source 1..21: mol_type = other RNA
  modified_base 1: mod_base = OTHER; note = 2'-O-methylcytidine-3'-phosphate
  modified_base 2: mod_base = OTHER; note = 2'-O-methyluridine-3'-phosphate
  modified_base 3: mod_base = OTHER; note = 2'-O-methyluridine-3'-phosphate
  modified_base 4: mod_base = OTHER; note = 2'-O-methylcytidine-3'-phosphate
  modified_base 5: mod_base = OTHER; note = 2'-O-methylcytidine-3'-phosphate
  modified_base 6: mod_base = OTHER; note = 2'-O-methyladenosine-3'-phosphate
  modified_base 7: mod_base = OTHER; note = 2'-deoxy-2'-fluoroadenosine-3'-phosphate
  modified_base 8: mod_base = OTHER; note = 2'-O-methyladenosine-3'-phosphate
  modified_base 9: mod_base = OTHER; note = 2'-deoxy-2'-fluorouridine-3'-phosphate
  modified_base 10: mod_base = OTHER; note = 2'-deoxy-2'-fluorouridine-3'-phosphate
  modified_base 11: mod_base = OTHER; note = 2'-deoxy-2'-fluorouridine-3'-phosphate
  modified_base 12: mod_base = OTHER; note = 2'-O-methylcytidine-3'-phosphate
  modified_base 13: mod_base = OTHER; note = 2'-O-methylcytidine-3'-phosphate
  modified_base 14: mod_base = OTHER; note = 2'-O-methyladenosine-3'-phosphate
  modified_base 15: mod_base = OTHER; note = 2'-O-methyladenosine-3'-phosphate
  modified_base 16: mod_base = OTHER; note = 2'-O-methyladenosine-3'-phosphate
  modified_base 17: mod_base = OTHER; note = 2'-O-methylcytidine-3'-phosphate
  modified_base 18: mod_base = OTHER; note = 2'-O-methyladenosine-3'-phosphate
  modified_base 19: mod_base = OTHER; note = 2'-O-methyladenosine-3'-phosphate
  modified_base 20: mod_base = OTHER; note = 2'-O-methylguanosine-3'-phosphate
  modified_base 21: mod_base = OTHER; note = 2'-O-methyladenosine
cttccaaatttccaaacaaga

SEQ ID NO: 3667 - RNA, 21 nt, synthetic construct
  source 1..21: mol_type = other RNA
  modified_base 1: mod_base = OTHER; note = 2'-O-methyluridine-3'-phosphate
  modified_base 2: mod_base = OTHER; note = 2'-O-methyluridine-3'-phosphate
  modified_base 3: mod_base = OTHER; note = 2'-O-methylcytidine-3'-phosphate
  modified_base 4: mod_base = OTHER; note = 2'-O-methylcytidine-3'-phosphate
  modified_base 5: mod_base = OTHER; note = 2'-O-methyladenosine-3'-phosphate
  modified_base 6: mod_base = OTHER; note = 2'-O-methyladenosine-3'-phosphate
  modified_base 7: mod_base = OTHER; note = 2'-deoxy-2'-fluoroadenosine-3'-phosphate
  modified_base 8: mod_base = OTHER; note = 2'-O-methyluridine-3'-phosphate
  modified_base 9: mod_base = OTHER; note = 2'-deoxy-2'-fluorouridine-3'-phosphate
  modified_base 10: mod_base = OTHER; note = 2'-deoxy-2'-fluorouridine-3'-phosphate
  modified_base 11: mod_base = OTHER; note = 2'-deoxy-2'-fluorocytidine-3'-phosphate
  modified_base 12: mod_base = OTHER; note = 2'-O-methylcytidine-3'-phosphate
  modified_base 13: mod_base = OTHER; note = 2'-O-methyladenosine-3'-phosphate
  modified_base 14: mod_base = OTHER; note = 2'-O-methyladenosine-3'-phosphate
  modified_base 15: mod_base = OTHER; note = 2'-O-methyladenosine-3'-phosphate
  modified_base 16: mod_base = OTHER; note = 2'-O-methylcytidine-3'-phosphate
  modified_base 17: mod_base = OTHER; note = 2'-O-methyladenosine-3'-phosphate
  modified_base 18: mod_base = OTHER; note = 2'-O-methyladenosine-3'-phosphate
  modified_base 19: mod_base = OTHER; note = 2'-O-methylguanosine-3'-phosphate
  modified_base 20: mod_base = OTHER; note = 2'-O-methyladenosine-3'-phosphate
  modified_base 21: mod_base = OTHER; note = 2'-O-methyladenosine
ttccaaatttccaaacaagaa

SEQ ID NO: 3668 - RNA, 21 nt, synthetic construct
  source 1..21: mol_type = other RNA
  modified_base 1: mod_base = OTHER; note = 2'-O-methyluridine-3'-phosphate
  modified_base 2: mod_base = OTHER; note = 2'-O-methylcytidine-3'-phosphate
  modified_base 3: mod_base = OTHER; note = 2'-O-methylcytidine-3'-phosphate
  modified_base 4: mod_base = OTHER; note = 2'-O-methyladenosine-3'-phosphate
  modified_base 5: mod_base = OTHER; note = 2'-O-methyladenosine-3'-phosphate
  modified_base 6: mod_base = OTHER; note = 2'-O-methyladenosine-3'-phosphate
  modified_base 7: mod_base = OTHER; note = 2'-deoxy-2'-fluorouridine-3'-phosphate
  modified_base 8: mod_base = OTHER; note = 2'-O-methyluridine-3'-phosphate
  modified_base 9: mod_base = OTHER; note = 2'-deoxy-2'-fluorouridine-3'-phosphate
  modified_base 10: mod_base = OTHER; note = 2'-deoxy-2'-fluorocytidine-3'-phosphate
  modified_base 11: mod_base = OTHER; note = 2'-deoxy-2'-fluorocytidine-3'-phosphate
  modified_base 12: mod_base = OTHER; note = 2'-O-methyladenosine-3'-phosphate
  modified_base 13: mod_base = OTHER; note = 2'-O-methyladenosine-3'-phosphate
  modified_base 14: mod_base = OTHER; note = 2'-O-methyladenosine-3'-phosphate
  modified_base 15: mod_base = OTHER; note = 2'-O-methylcytidine-3'-phosphate
  modified_base 16: mod_base = OTHER; note = 2'-O-methyladenosine-3'-phosphate
  modified_base 17: mod_base = OTHER; note = 2'-O-methyladenosine-3'-phosphate
  modified_base 18: mod_base = OTHER; note = 2'-O-methylguanosine-3'-phosphate
  modified_base 19: mod_base = OTHER; note = 2'-O-methyladenosine-3'-phosphate
  modified_base 20: mod_base = OTHER; note = 2'-O-methyladenosine-3'-phosphate
  modified_base 21: mod_base = OTHER; note = 2'-O-methyladenosine
tccaaatttccaaacaagaaa

SEQ ID NO: 3669 - RNA, 21 nt, synthetic construct
  source 1..21: mol_type = other RNA
  modified_base 1: mod_base = OTHER; note = 2'-O-methylcytidine-3'-phosphate
  modified_base 2: mod_base = OTHER; note = 2'-O-methylcytidine-3'-phosphate
  modified_base 3: mod_base = OTHER; note = 2'-O-methyladenosine-3'-phosphate
  modified_base 4: mod_base = OTHER; note = 2'-O-methyladenosine-3'-phosphate
  modified_base 5: mod_base = OTHER; note = 2'-O-methyladenosine-3'-phosphate
  modified_base 6: mod_base = OTHER; note = 2'-O-methyluridine-3'-phosphate
  modified_base 7: mod_base = OTHER; note = 2'-deoxy-2'-fluorouridine-3'-phosphate
  modified_base 8: mod_base = OTHER; note = 2'-O-methyluridine-3'-phosphate
  modified_base 9: mod_base = OTHER; note = 2'-deoxy-2'-fluorocytidine-3'-phosphate
  modified_base 10: mod_base = OTHER; note = 2'-deoxy-2'-fluorocytidine-3'-phosphate
  modified_base 11: mod_base = OTHER; note = 2'-deoxy-2'-fluoroadenosine-3'-phosphate
  modified_base 12: mod_base = OTHER; note = 2'-O-methyladenosine-3'-phosphate
  modified_base 13: mod_base = OTHER; note = 2'-O-methyladenosine-3'-phosphate
  modified_base 14: mod_base = OTHER; note = 2'-O-methylcytidine-3'-phosphate
  modified_base 15: mod_base = OTHER; note = 2'-O-methyladenosine-3'-phosphate
  modified_base 16: mod_base = OTHER; note = 2'-O-methyladenosine-3'-phosphate
  modified_base 17: mod_base = OTHER; note = 2'-O-methylguanosine-3'-phosphate
  modified_base 18: mod_base = OTHER; note = 2'-O-methyladenosine-3'-phosphate
  modified_base 19: mod_base = OTHER; note = 2'-O-methyladenosine-3'-phosphate
  modified_base 20: mod_base = OTHER; note = 2'-O-methylcytidine-3'-phosphate
  modified_base 21: mod_base = OTHER; note = 2'-O-methyladenosine
ccaaatttccaaacaagaaca

SEQ ID NO: 3670 - RNA, 21 nt, synthetic construct
  source 1..21: mol_type = other RNA
  modified_base 1: mod_base = OTHER; note = 2'-O-methylcytidine-3'-phosphate
  modified_base 2: mod_base = OTHER; note = 2'-O-methyladenosine-3'-phosphate
  modified_base 3: mod_base = OTHER; note = 2'-O-methyladenosine-3'-phosphate
  modified_base 4: mod_base = OTHER; note = 2'-O-methyladenosine-3'-phosphate
  modified_base 5: mod_base = OTHER; note = 2'-O-methyluridine-3'-phosphate
  modified_base 6: mod_base = OTHER; note = 2'-O-methyluridine-3'-phosphate
  modified_base 7: mod_base = OTHER; note = 2'-deoxy-2'-fluorouridine-3'-phosphate
  modified_base 8: mod_base = OTHER; note = 2'-O-methylcytidine-3'-phosphate
  modified_base 9: mod_base = OTHER; note = 2'-deoxy-2'-fluorocytidine-3'-phosphate
  modified_base 10: mod_base = OTHER; note = 2'-deoxy-2'-fluoroadenosine-3'-phosphate
  modified_base 11: mod_base = OTHER; note = 2'-deoxy-2'-fluoroadenosine-3'-phosphate
  modified_base 12: mod_base = OTHER; note = 2'-O-methyladenosine-3'-phosphate
  modified_base 13: mod_base = OTHER; note = 2'-O-methylcytidine-3'-phosphate
  modified_base 14: mod_base = OTHER; note = 2'-O-methyladenosine-3'-phosphate
  modified_base 15: mod_base = OTHER; note = 2'-O-methyladenosine-3'-phosphate
  modified_base 16: mod_base = OTHER; note = 2'-O-methylguanosine-3'-phosphate
  modified_base 17: mod_base = OTHER; note = 2'-O-methyladenosine-3'-phosphate
  modified_base 18: mod_base = OTHER; note = 2'-O-methyladenosine-3'-phosphate
  modified_base 19: mod_base = OTHER; note = 2'-O-methylcytidine-3'-phosphate
  modified_base 20: mod_base = OTHER; note = 2'-O-methylcytidine-3'-phosphate
  modified_base 21: mod_base = OTHER; note = 2'-O-methyladenosine
caaatttccaaacaagaacca

SEQ ID NO: 3671 - RNA, 21 nt, synthetic construct
  source 1..21: mol_type = other RNA
  modified_base 1: mod_base = OTHER; note = 2'-O-methyladenosine-3'-phosphate
  modified_base 2: mod_base = OTHER; note = 2'-O-methyladenosine-3'-phosphate
  modified_base 3: mod_base = OTHER; note = 2'-O-methyladenosine-3'-phosphate
  modified_base 4: mod_base = OTHER; note = 2'-O-methyluridine-3'-phosphate
  modified_base 5: mod_base = OTHER; note = 2'-O-methyluridine-3'-phosphate
  modified_base 6: mod_base = OTHER; note = 2'-O-methyluridine-3'-phosphate
  modified_base 7: mod_base = OTHER; note = 2'-deoxy-2'-fluorocytidine-3'-phosphate
  modified_base 8: mod_base = OTHER; note = 2'-O-methylcytidine-3'-phosphate
  modified_base 9: mod_base = OTHER; note = 2'-deoxy-2'-fluoroadenosine-3'-phosphate
  modified_base 10: mod_base = OTHER; note = 2'-deoxy-2'-fluoroadenosine-3'-phosphate
  modified_base 11: mod_base = OTHER; note = 2'-deoxy-2'-fluoroadenosine-3'-phosphate
  modified_base 12: mod_base = OTHER; note = 2'-O-methylcytidine-3'-phosphate
  modified_base 13: mod_base = OTHER; note = 2'-O-methyladenosine-3'-phosphate
  modified_base 14: mod_base = OTHER; note = 2'-O-methyladenosine-3'-phosphate
  modified_base 15: mod_base = OTHER; note = 2'-O-methylguanosine-3'-phosphate
  modified_base 16: mod_base = OTHER; note = 2'-O-methyladenosine-3'-phosphate
  modified_base 17: mod_base = OTHER; note = 2'-O-methyladenosine-3'-phosphate
  modified_base 18: mod_base = OTHER; note = 2'-O-methylcytidine-3'-phosphate
  modified_base 19: mod_base = OTHER; note = 2'-O-methylcytidine-3'-phosphate
  modified_base 20: mod_base = OTHER; note = 2'-O-methyluridine-3'-phosphate
  modified_base 21: mod_base = OTHER; note = 2'-O-methyladenosine
aaatttccaaacaagaaccta

SEQ ID NO: 3672 - RNA, 21 nt, synthetic construct
  source 1..21: mol_type = other RNA
  modified_base 1: mod_base = OTHER; note = 2'-O-methyladenosine-3'-phosphate
  modified_base 2: mod_base = OTHER; note = 2'-O-methyladenosine-3'-phosphate
  modified_base 3: mod_base = OTHER; note = 2'-O-methyluridine-3'-phosphate
  modified_base 4: mod_base = OTHER; note = 2'-O-methyluridine-3'-phosphate
  modified_base 5: mod_base = OTHER; note = 2'-O-methyluridine-3'-phosphate
  modified_base 6: mod_base = OTHER; note = 2'-O-methylcytidine-3'-phosphate
  modified_base 7: mod_base = OTHER; note = 2'-deoxy-2'-fluorocytidine-3'-phosphate
  modified_base 8: mod_base = OTHER; note = 2'-O-methyladenosine-3'-phosphate
  modified_base 9: mod_base = OTHER; note = 2'-deoxy-2'-fluoroadenosine-3'-phosphate
  modified_base 10: mod_base = OTHER; note = 2'-deoxy-2'-fluoroadenosine-3'-phosphate
  modified_base 11: mod_base = OTHER; note = 2'-deoxy-2'-fluorocytidine-3'-phosphate
  modified_base 12: mod_base = OTHER; note = 2'-O-methyladenosine-3'-phosphate
  modified_base 13: mod_base = OTHER; note = 2'-O-methyladenosine-3'-phosphate
  modified_base 14: mod_base = OTHER; note = 2'-O-methylguanosine-3'-phosphate
  modified_base 15: mod_base = OTHER; note = 2'-O-methyladenosine-3'-phosphate
  modified_base 16: mod_base = OTHER; note = 2'-O-methyladenosine-3'-phosphate
  modified_base 17: mod_base = OTHER; note = 2'-O-methylcytidine-3'-phosphate
  modified_base 18: mod_base = OTHER; note = 2'-O-methylcytidine-3'-phosphate
  modified_base 19: mod_base = OTHER; note = 2'-O-methyluridine-3'-phosphate
  modified_base 20: mod_base = OTHER; note = 2'-O-methylguanosine-3'-phosphate
  modified_base 21: mod_base = OTHER; note = 2'-O-methyladenosine
aatttccaaacaagaacctga

SEQ ID NO: 3673 - RNA, 21 nt, synthetic construct
  source 1..21: mol_type = other RNA
  modified_base 1: mod_base = OTHER; note = 2'-O-methyladenosine-3'-phosphate
  modified_base 2: mod_base = OTHER; note = 2'-O-methyluridine-3'-phosphate
  modified_base 3: mod_base = OTHER; note = 2'-O-methyluridine-3'-phosphate
  modified_base 4: mod_base = OTHER; note = 2'-O-methyluridine-3'-phosphate
  modified_base 5: mod_base = OTHER; note = 2'-O-methylcytidine-3'-phosphate
  modified_base 6: mod_base = OTHER; note = 2'-O-methylcytidine-3'-phosphate
  modified_base 7: mod_base = OTHER; note = 2'-deoxy-2'-fluoroadenosine-3'-phosphate
  modified_base 8: mod_base = OTHER; note = 2'-O-methyladenosine-3'-phosphate
  modified_base 9: mod_base = OTHER; note = 2'-deoxy-2'-fluoroadenosine-3'-phosphate
  modified_base 10: mod_base = OTHER; note = 2'-deoxy-2'-fluorocytidine-3'-phosphate
  modified_base 11: mod_base = OTHER; note = 2'-deoxy-2'-fluoroadenosine-3'-phosphate
  modified_base 12: mod_base = OTHER; note = 2'-O-methyladenosine-3'-phosphate
  modified_base 13: mod_base = OTHER; note = 2'-O-methylguanosine-3'-phosphate
  modified_base 14: mod_base = OTHER; note = 2'-O-methyladenosine-3'-phosphate
  modified_base 15: mod_base = OTHER; note = 2'-O-methyladenosine-3'-phosphate
  modified_base 16: mod_base = OTHER; note = 2'-O-methylcytidine-3'-phosphate
  modified_base 17: mod_base = OTHER; note = 2'-O-methylcytidine-3'-phosphate
  modified_base 18: mod_base = OTHER; note = 2'-O-methyluridine-3'-phosphate
  modified_base 19: mod_base = OTHER; note = 2'-O-methylguanosine-3'-phosphate
  modified_base 20: mod_base = OTHER; note = 2'-O-methyladenosine-3'-phosphate
  modified_base 21: mod_base = OTHER; note = 2'-O-methyladenosine
atttccaaacaagaacctgaa

SEQ ID NO: 3674 - RNA, 21 nt, synthetic construct
  source 1..21: mol_type = other RNA
  modified_base 1: mod_base = OTHER; note = 2'-O-methyluridine-3'-phosphate
  modified_base 2: mod_base = OTHER; note = 2'-O-methyluridine-3'-phosphate
  modified_base 3: mod_base = OTHER; note = 2'-O-methyluridine-3'-phosphate
  modified_base 4: mod_base = OTHER; note = 2'-O-methylcytidine-3'-phosphate
  modified_base 5: mod_base = OTHER; note = 2'-O-methylcytidine-3'-phosphate
  modified_base 6: mod_base = OTHER; note = 2'-O-methyladenosine-3'-phosphate
  modified_base 7: mod_base = OTHER; note = 2'-deoxy-2'-fluoroadenosine-3'-phosphate
  modified_base 8: mod_base = OTHER; note = 2'-O-methyladenosine-3'-phosphate
  modified_base 9: mod_base = OTHER; note = 2'-deoxy-2'-fluorocytidine-3'-phosphate
  modified_base 10: mod_base = OTHER; note = 2'-deoxy-2'-fluoroadenosine-3'-phosphate
  modified_base 11: mod_base = OTHER; note = 2'-deoxy-2'-fluoroadenosine-3'-phosphate
  modified_base 12: mod_base = OTHER; note = 2'-O-methylguanosine-3'-phosphate
  modified_base 13: mod_base = OTHER; note = 2'-O-methyladenosine-3'-phosphate
  modified_base 14: mod_base = OTHER; note = 2'-O-methyladenosine-3'-phosphate
  modified_base 15: mod_base = OTHER; note = 2'-O-methylcytidine-3'-phosphate
  modified_base 16: mod_base = OTHER; note = 2'-O-methylcytidine-3'-phosphate
  modified_base 17: mod_base = OTHER; note = 2'-O-methyluridine-3'-phosphate
  modified_base 18: mod_base = OTHER; note = 2'-O-methylguanosine-3'-phosphate
  modified_base 19: mod_base = OTHER; note = 2'-O-methyladenosine-3'-phosphate
  modified_base 20: mod_base = OTHER; note = 2'-O-methyladenosine-3'-phosphate
  modified_base 21: mod_base = OTHER; note = 2'-O-methyladenosine
tttccaaacaagaacctgaaa

SEQ ID NO: 3675 - RNA, 21 nt, synthetic construct
  source 1..21: mol_type = other RNA
  modified_base 1: mod_base = OTHER; note = 2'-O-methyluridine-3'-phosphate
  modified_base 2: mod_base = OTHER; note = 2'-O-methyluridine-3'-phosphate
  modified_base 3: mod_base = OTHER; note = 2'-O-methylcytidine-3'-phosphate
  modified_base 4: mod_base = OTHER; note = 2'-O-methylcytidine-3'-phosphate
  modified_base 5: mod_base = OTHER; note = 2'-O-methyladenosine-3'-phosphate
  modified_base 6: mod_base = OTHER; note = 2'-O-methyladenosine-3'-phosphate
  modified_base 7: mod_base = OTHER; note = 2'-deoxy-2'-fluoroadenosine-3'-phosphate
  modified_base 8: mod_base = OTHER; note = 2'-O-methylcytidine-3'-phosphate
  modified_base 9: mod_base = OTHER; note = 2'-deoxy-2'-fluoroadenosine-3'-phosphate
  modified_base 10: mod_base = OTHER; note = 2'-deoxy-2'-fluoroadenosine-3'-phosphate
  modified_base 11: mod_base = OTHER; note = 2'-deoxy-2'-fluoroguanosine-3'-phosphate
  modified_base 12: mod_base = OTHER; note = 2'-O-methyladenosine-3'-phosphate
  modified_base 13: mod_base = OTHER; note = 2'-O-methyladenosine-3'-phosphate
  modified_base 14: mod_base = OTHER; note = 2'-O-methylcytidine-3'-phosphate
  modified_base 15: mod_base = OTHER; note = 2'-O-methylcytidine-3'-phosphate
  modified_base 16: mod_base = OTHER; note = 2'-O-methyluridine-3'-phosphate
  modified_base 17: mod_base = OTHER; note = 2'-O-methylguanosine-3'-phosphate
  modified_base 18: mod_base = OTHER; note = 2'-O-methyladenosine-3'-phosphate
  modified_base 19: mod_base = OTHER; note = 2'-O-methyladenosine-3'-phosphate
  modified_base 20: mod_base = OTHER; note = 2'-O-methylguanosine-3'-phosphate
  modified_base 21: mod_base = OTHER; note = 2'-O-methyladenosine
ttccaaacaagaacctgaaga

SEQ ID NO: 3676 - RNA, 21 nt, synthetic construct
  source 1..21: mol_type = other RNA
  modified_base 1: mod_base = OTHER; note = 2'-O-methyluridine-3'-phosphate
  modified_base 2: mod_base = OTHER; note = 2'-O-methylcytidine-3'-phosphate
  modified_base 3: mod_base = OTHER; note = 2'-O-methylcytidine-3'-phosphate
  modified_base 4: mod_base = OTHER; note = 2'-O-methyladenosine-3'-phosphate
  modified_base 5: mod_base = OTHER; note = 2'-O-methyladenosine-3'-phosphate
  modified_base 6: mod_base = OTHER; note = 2'-O-methyladenosine-3'-phosphate
  modified_base 7: mod_base = OTHER; note = 2'-deoxy-2'-fluorocytidine-3'-phosphate
  modified_base 8: mod_base = OTHER; note = 2'-O-methyladenosine-3'-phosphate
  modified_base 9: mod_base = OTHER; note = 2'-deoxy-2'-fluoroadenosine-3'-phosphate
  modified_base 10: mod_base = OTHER; note = 2'-deoxy-2'-fluoroguanosine-3'-phosphate
  modified_base 11: mod_base = OTHER; note = 2'-deoxy-2'-fluoroadenosine-3'-phosphate
  modified_base 12: mod_base = OTHER; note = 2'-O-methyladenosine-3'-phosphate
  modified_base 13: mod_base = OTHER; note = 2'-O-methylcytidine-3'-phosphate
  modified_base 14: mod_base = OTHER; note = 2'-O-methylcytidine-3'-phosphate
  modified_base 15: mod_base = OTHER; note = 2'-O-methyluridine-3'-phosphate
  modified_base 16: mod_base = OTHER; note = 2'-O-methylguanosine-3'-phosphate
  modified_base 17: mod_base = OTHER; note = 2'-O-methyladenosine-3'-phosphate
  modified_base 18: mod_base = OTHER; note = 2'-O-methyladenosine-3'-phosphate
  modified_base 19: mod_base = OTHER; note = 2'-O-methylguanosine-3'-phosphate
  modified_base 20: mod_base = OTHER; note = 2'-O-methyladenosine-3'-phosphate
  modified_base 21: mod_base = OTHER; note = 2'-O-methyladenosine
tccaaacaagaacctgaagaa

SEQ ID NO: 3677 - RNA, 21 nt, synthetic construct
  source 1..21: mol_type = other RNA
  modified_base 1: mod_base = OTHER; note = 2'-O-methylcytidine-3'-phosphate
  modified_base 2: mod_base = OTHER; note = 2'-O-methylcytidine-3'-phosphate
  modified_base 3: mod_base = OTHER; note = 2'-O-methyladenosine-3'-phosphate
  modified_base 4: mod_base = OTHER; note = 2'-O-methyladenosine-3'-phosphate
  modified_base 5: mod_base = OTHER; note = 2'-O-methyladenosine-3'-phosphate
  modified_base 6: mod_base = OTHER; note = 2'-O-methylcytidine-3'-phosphate
  modified_base 7: mod_base = OTHER; note = 2'-deoxy-2'-fluoroadenosine-3'-phosphate
  modified_base 8: mod_base = OTHER; note = 2'-O-methyladenosine-3'-phosphate
  modified_base 9: mod_base = OTHER; note = 2'-deoxy-2'-fluoroguanosine-3'-phosphate
  modified_base 10: mod_base = OTHER; note = 2'-deoxy-2'-fluoroadenosine-3'-phosphate
  modified_base 11: mod_base = OTHER; note = 2'-deoxy-2'-fluoroadenosine-3'-phosphate
  modified_base 12: mod_base = OTHER; note = 2'-O-methylcytidine-3'-phosphate
  modified_base 13: mod_base = OTHER; note = 2'-O-methylcytidine-3'-phosphate
  modified_base 14: mod_base = OTHER; note = 2'-O-methyluridine-3'-phosphate
  modified_base 15: mod_base = OTHER; note = 2'-O-methylguanosine-3'-phosphate
  modified_base 16: mod_base = OTHER; note = 2'-O-methyladenosine-3'-phosphate
  modified_base 17: mod_base = OTHER; note = 2'-O-methyladenosine-3'-phosphate
  modified_base 18: mod_base = OTHER; note = 2'-O-methylguanosine-3'-phosphate
  modified_base 19: mod_base = OTHER; note = 2'-O-methyladenosine-3'-phosphate
  modified_base 20: mod_base = OTHER; note = 2'-O-methyladenosine-3'-phosphate
  modified_base 21: mod_base = OTHER; note = 2'-O-methyladenosine
ccaaacaagaacctgaagaaa

SEQ ID NO: 3678 - RNA, 21 nt, synthetic construct
  source 1..21: mol_type = other RNA
  modified_base 1: mod_base = OTHER; note = 2'-O-methylcytidine-3'-phosphate
  modified_base 2: mod_base = OTHER; note = 2'-O-methyladenosine-3'-phosphate
  modified_base 3: mod_base = OTHER; note = 2'-O-methyladenosine-3'-phosphate
  modified_base 4: mod_base = OTHER; note = 2'-O-methyladenosine-3'-phosphate
  modified_base 5: mod_base = OTHER; note = 2'-O-methylcytidine-3'-phosphate
  modified_base 6: mod_base = OTHER; note = 2'-O-methyladenosine-3'-phosphate
  modified_base 7: mod_base = OTHER; note = 2'-deoxy-2'-fluoroadenosine-3'-phosphate
  modified_base 8: mod_base = OTHER; note = 2'-O-methylguanosine-3'-phosphate
  modified_base 9: mod_base = OTHER; note = 2'-deoxy-2'-fluoroadenosine-3'-phosphate
  modified_base 10: mod_base = OTHER; note = 2'-deoxy-2'-fluoroadenosine-3'-phosphate
  modified_base 11: mod_base = OTHER; note = 2'-deoxy-2'-fluorocytidine-3'-phosphate
  modified_base 12: mod_base = OTHER; note = 2'-O-methylcytidine-3'-phosphate
  modified_base 13: mod_base = OTHER; note = 2'-O-methyluridine-3'-phosphate
  modified_base 14: mod_base = OTHER; note = 2'-O-methylguanosine-3'-phosphate
  modified_base 15: mod_base = OTHER; note = 2'-O-methyladenosine-3'-phosphate
  modified_base 16: mod_base = OTHER; note = 2'-O-methyladenosine-3'-phosphate
  modified_base 17: mod_base = OTHER; note = 2'-O-methylguanosine-3'-phosphate
  modified_base 18: mod_base = OTHER; note = 2'-O-methyladenosine-3'-phosphate
  modified_base 19: mod_base = OTHER; note = 2'-O-methyladenosine-3'-phosphate
  modified_base 20: mod_base = OTHER; note = 2'-O-methylguanosine-3'-phosphate
  modified_base 21: mod_base = OTHER; note = 2'-O-methyladenosine
caaacaagaacctgaagaaga

SEQ ID NO: 3679 - RNA, 21 nt, synthetic construct
  source 1..21: mol_type = other RNA
  modified_base 1: mod_base = OTHER; note = 2'-O-methyladenosine-3'-phosphate
  modified_base 2: mod_base = OTHER; note = 2'-O-methyladenosine-3'-phosphate
  modified_base 3: mod_base = OTHER; note = 2'-O-methyladenosine-3'-phosphate
  modified_base 4: mod_base = OTHER; note = 2'-O-methylcytidine-3'-phosphate
  modified_base 5: mod_base = OTHER; note = 2'-O-methyladenosine-3'-phosphate
  modified_base 6: mod_base = OTHER; note = 2'-O-methyladenosine-3'-phosphate
  modified_base 7: mod_base = OTHER; note = 2'-deoxy-2'-fluoroguanosine-3'-phosphate
  modified_base 8: mod_base = OTHER; note = 2'-O-methyladenosine-3'-phosphate
  modified_base 9: mod_base = OTHER; note = 2'-deoxy-2'-fluoroadenosine-3'-phosphate
  modified_base 10: mod_base = OTHER; note = 2'-deoxy-2'-fluorocytidine-3'-phosphate
  modified_base 11: mod_base = OTHER; note = 2'-deoxy-2'-fluorocytidine-3'-phosphate
  modified_base 12: mod_base = OTHER; note = 2'-O-methyluridine-3'-phosphate
  modified_base 13: mod_base = OTHER; note = 2'-O-methylguanosine-3'-phosphate
  modified_base 14: mod_base = OTHER; note = 2'-O-methyladenosine-3'-phosphate
  modified_base 15: mod_base = OTHER; note = 2'-O-methyladenosine-3'-phosphate
  modified_base 16: mod_base = OTHER; note = 2'-O-methylguanosine-3'-phosphate
  modified_base 17: mod_base = OTHER; note = 2'-O-methyladenosine-3'-phosphate
  modified_base 18: mod_base = OTHER; note = 2'-O-methyladenosine-3'-phosphate
  modified_base 19: mod_base = OTHER; note = 2'-O-methylguanosine-3'-phosphate
  modified_base 20: mod_base = OTHER; note = 2'-O-methyladenosine-3'-phosphate
  modified_base 21: mod_base = OTHER; note = 2'-O-methyladenosine
aaacaagaacctgaagaagaa

SEQ ID NO: 3680 - RNA, 21 nt, synthetic construct
  source 1..21: mol_type = other RNA
  modified_base 1: mod_base = OTHER; note = 2'-O-methyladenosine-3'-phosphate
  modified_base 2: mod_base = OTHER; note = 2'-O-methyladenosine-3'-phosphate
  modified_base 3: mod_base = OTHER; note = 2'-O-methylcytidine-3'-phosphate
  modified_base 4: mod_base = OTHER; note = 2'-O-methyladenosine-3'-phosphate
  modified_base 5: mod_base = OTHER; note = 2'-O-methyladenosine-3'-phosphate
  modified_base 6: mod_base = OTHER; note = 2'-O-methylguanosine-3'-phosphate
  modified_base 7: mod_base = OTHER; note = 2'-deoxy-2'-fluoroadenosine-3'-phosphate
  modified_base 8: mod_base = OTHER; note = 2'-O-methyladenosine-3'-phosphate
  modified_base 9: mod_base = OTHER; note = 2'-deoxy-2'-fluorocytidine-3'-phosphate
  modified_base 10: mod_base = OTHER; note = 2'-deoxy-2'-fluorocytidine-3'-phosphate
  modified_base 11: mod_base = OTHER; note = 2'-deoxy-2'-fluorouridine-3'-phosphate
  modified_base 12: mod_base = OTHER; note = 2'-O-methylguanosine-3'-phosphate
  modified_base 13: mod_base = OTHER; note = 2'-O-methyladenosine-3'-phosphate
  modified_base 14: mod_base = OTHER; note = 2'-O-methyladenosine-3'-phosphate
  modified_base 15: mod_base = OTHER; note = 2'-O-methylguanosine-3'-phosphate
  modified_base 16: mod_base = OTHER; note = 2'-O-methyladenosine-3'-phosphate
  modified_base 17: mod_base = OTHER; note = 2'-O-methyladenosine-3'-phosphate
  modified_base 18: mod_base = OTHER; note = 2'-O-methylguanosine-3'-phosphate
  modified_base 19: mod_base = OTHER; note = 2'-O-methyladenosine-3'-phosphate
  modified_base 20: mod_base = OTHER; note = 2'-O-methyladenosine-3'-phosphate
  modified_base 21: mod_base = OTHER; note = 2'-O-methyladenosine
aacaagaacctgaagaagaaa

SEQ ID NO: 3681 - RNA, 21 nt, synthetic construct
  source 1..21: mol_type = other RNA
  modified_base 1: mod_base = OTHER; note = 2'-O-methyladenosine-3'-phosphate
  modified_base 2: mod_base = OTHER; note = 2'-O-methylcytidine-3'-phosphate
  modified_base 3: mod_base = OTHER; note = 2'-O-methyladenosine-3'-phosphate
  modified_base 4: mod_base = OTHER; note = 2'-O-methyladenosine-3'-phosphate
  modified_base 5: mod_base = OTHER; note = 2'-O-methylguanosine-3'-phosphate
  modified_base 6: mod_base = OTHER; note = 2'-O-methyladenosine-3'-phosphate
  modified_base 7: mod_base = OTHER; note = 2'-deoxy-2'-fluoroadenosine-3'-phosphate
  modified_base 8: mod_base = OTHER; note = 2'-O-methylcytidine-3'-phosphate
  modified_base 9: mod_base = OTHER; note = 2'-deoxy-2'-fluorocytidine-3'-phosphate
  modified_base 10: mod_base = OTHER; note = 2'-deoxy-2'-fluorouridine-3'-phosphate
  modified_base 11: mod_base = OTHER; note = 2'-deoxy-2'-fluoroguanosine-3'-phosphate
  modified_base 12: mod_base = OTHER; note = 2'-O-methyladenosine-3'-phosphate
  modified_base 13: mod_base = OTHER; note = 2'-O-methyladenosine-3'-phosphate
  modified_base 14: mod_base = OTHER; note = 2'-O-methylguanosine-3'-phosphate
  modified_base 15: mod_base = OTHER; note = 2'-O-methyladenosine-3'-phosphate
  modified_base 16: mod_base = OTHER; note = 2'-O-methyladenosine-3'-phosphate
  modified_base 17: mod_base = OTHER; note = 2'-O-methylguanosine-3'-phosphate
  modified_base 18: mod_base = OTHER; note = 2'-O-methyladenosine-3'-phosphate
  modified_base 19: mod_base = OTHER; note = 2'-O-methyladenosine-3'-phosphate
  modified_base 20: mod_base = OTHER; note = 2'-O-methyluridine-3'-phosphate
  modified_base 21: mod_base = OTHER; note = 2'-O-methyladenosine
acaagaacctgaagaagaata

SEQ ID NO: 3682 - RNA, 21 nt, synthetic construct
  source 1..21: mol_type = other RNA
  modified_base 1: mod_base = OTHER; note = 2'-O-methylcytidine-3'-phosphate
  modified_base 2: mod_base = OTHER; note = 2'-O-methyladenosine-3'-phosphate
  modified_base 3: mod_base = OTHER; note = 2'-O-methyladenosine-3'-phosphate
  modified_base 4: mod_base = OTHER; note = 2'-O-methylguanosine-3'-phosphate
  modified_base 5: mod_base = OTHER; note = 2'-O-methyladenosine-3'-phosphate
  modified_base 6: mod_base = OTHER; note = 2'-O-methyladenosine-3'-phosphate
  modified_base 7: mod_base = OTHER; note = 2'-deoxy-2'-fluorocytidine-3'-phosphate
  modified_base 8: mod_base = OTHER; note = 2'-O-methylcytidine-3'-phosphate
  modified_base 9: mod_base = OTHER; note = 2'-deoxy-2'-fluorouridine-3'-phosphate
  modified_base 10: mod_base = OTHER; note = 2'-deoxy-2'-fluoroguanosine-3'-phosphate
  modified_base 11: mod_base = OTHER; note = 2'-deoxy-2'-fluoroadenosine-3'-phosphate
  modified_base 12: mod_base = OTHER; note = 2'-O-methyladenosine-3'-phosphate
  modified_base 13: mod_base = OTHER; note = 2'-O-methylguanosine-3'-phosphate
  modified_base 14: mod_base = OTHER; note = 2'-O-methyladenosine-3'-phosphate
  modified_base 15: mod_base = OTHER; note = 2'-O-methyladenosine-3'-phosphate
  modified_base 16: mod_base = OTHER; note = 2'-O-methylguanosine-3'-phosphate
  modified_base 17: mod_base = OTHER; note = 2'-O-methyladenosine-3'-phosphate
  modified_base 18: mod_base = OTHER; note = 2'-O-methyladenosine-3'-phosphate
  modified_base 19: mod_base = OTHER; note = 2'-O-methyluridine-3'-phosphate
  modified_base 20: mod_base = OTHER; note = 2'-O-methyluridine-3'-phosphate
  modified_base 21: mod_base = OTHER; note = 2'-O-methyladenosine
caagaacctgaagaagaatta

SEQ ID NO: 3683 - RNA, 21 nt, synthetic construct
  source 1..21: mol_type = other RNA
  modified_base 1: mod_base = OTHER; note = 2'-O-methyladenosine-3'-phosphate
  modified_base 2: mod_base = OTHER; note = 2'-O-methyladenosine-3'-phosphate
  modified_base 3: mod_base = OTHER; note = 2'-O-methylguanosine-3'-phosphate
  modified_base 4: mod_base = OTHER; note = 2'-O-methyladenosine-3'-phosphate
  modified_base 5: mod_base = OTHER; note = 2'-O-methyladenosine-3'-phosphate
  modified_base 6: mod_base = OTHER; note = 2'-O-methylcytidine-3'-phosphate
  modified_base 7: mod_base = OTHER; note = 2'-deoxy-2'-fluorocytidine-3'-phosphate
  modified_base 8: mod_base = OTHER; note = 2'-O-methyluridine-3'-phosphate
  modified_base 9: mod_base = OTHER; note = 2'-deoxy-2'-fluoroguanosine-3'-phosphate
  modified_base 10: mod_base = OTHER; note = 2'-deoxy-2'-fluoroadenosine-3'-phosphate
  modified_base 11: mod_base = OTHER; note = 2'-deoxy-2'-fluoroadenosine-3'-phosphate
  modified_base 12: mod_base = OTHER; note = 2'-O-methylguanosine-3'-phosphate
  modified_base 13: mod_base = OTHER; note = 2'-O-methyladenosine-3'-phosphate
  modified_base 14: mod_base = OTHER; note = 2'-O-methyladenosine-3'-phosphate
  modified_base 15: mod_base = OTHER; note = 2'-O-methylguanosine-3'-phosphate
  modified_base 16: mod_base = OTHER; note = 2'-O-methyladenosine-3'-phosphate
  modified_base 17: mod_base = OTHER; note = 2'-O-methyladenosine-3'-phosphate
  modified_base 18: mod_base = OTHER; note = 2'-O-methyluridine-3'-phosphate
  modified_base 19: mod_base = OTHER; note = 2'-O-methyluridine-3'-phosphate
  modified_base 20: mod_base = OTHER; note = 2'-O-methyladenosine-3'-phosphate
  modified_base 21: mod_base = OTHER; note = 2'-O-methyladenosine
aagaacctgaagaagaattaa

SEQ ID NO: 3684 - RNA, 21 nt, synthetic construct
  source 1..21: mol_type = other RNA
  modified_base 1: mod_base = OTHER; note = 2'-O-methyladenosine-3'-phosphate
  modified_base 2: mod_base = OTHER; note = 2'-O-methylguanosine-3'-phosphate
  modified_base 3: mod_base = OTHER; note = 2'-O-methyladenosine-3'-phosphate
  modified_base 4: mod_base = OTHER; note = 2'-O-methyladenosine-3'-phosphate
  modified_base 5: mod_base = OTHER; note = 2'-O-methylcytidine-3'-phosphate
  modified_base 6: mod_base = OTHER; note = 2'-O-methylcytidine-3'-phosphate
  modified_base 7: mod_base = OTHER; note = 2'-deoxy-2'-fluorouridine-3'-phosphate
  modified_base 8: mod_base = OTHER; note = 2'-O-methylguanosine-3'-phosphate
  modified_base 9: mod_base = OTHER; note = 2'-deoxy-2'-fluoroadenosine-3'-phosphate
  modified_base 10: mod_base = OTHER; note = 2'-deoxy-2'-fluoroadenosine-3'-phosphate
  modified_base 11: mod_base = OTHER; note = 2'-deoxy-2'-fluoroguanosine-3'-phosphate
  modified_base 12: mod_base = OTHER; note = 2'-O-methyladenosine-3'-phosphate
  modified_base 13: mod_base = OTHER; note = 2'-O-methyladenosine-3'-phosphate
  modified_base 14: mod_base = OTHER; note = 2'-O-methylguanosine-3'-phosphate
  modified_base 15: mod_base = OTHER; note = 2'-O-methyladenosine-3'-phosphate
  modified_base 16: mod_base = OTHER; note = 2'-O-methyladenosine-3'-phosphate
  modified_base 17: mod_base = OTHER; note = 2'-O-methyluridine-3'-phosphate
  modified_base 18: mod_base = OTHER; note = 2'-O-methyluridine-3'-phosphate
  modified_base 19: mod_base = OTHER; note = 2'-O-methyladenosine-3'-phosphate
  modified_base 20: mod_base = OTHER; note = 2'-O-methylcytidine-3'-phosphate
  modified_base 21: mod_base = OTHER; note = 2'-O-methyladenosine
agaacctgaagaagaattaca

SEQ ID NO: 3685 - RNA, 21 nt, synthetic construct
  source 1..21: mol_type = other RNA
  modified_base 1: mod_base = OTHER; note = 2'-O-methylguanosine-3'-phosphate
  modified_base 2: mod_base = OTHER; note = 2'-O-methyladenosine-3'-phosphate
  modified_base 3: mod_base = OTHER; note = 2'-O-methyladenosine-3'-phosphate
  modified_base 4: mod_base = OTHER; note = 2'-O-methylcytidine-3'-phosphate
  modified_base 5: mod_base = OTHER; note = 2'-O-methylcytidine-3'-phosphate
  modified_base 6: mod_base = OTHER; note = 2'-O-methyluridine-3'-phosphate
  modified_base 7: mod_base = OTHER; note = 2'-deoxy-2'-fluoroguanosine-3'-phosphate
  modified_base 8: mod_base = OTHER; note = 2'-O-methyladenosine-3'-phosphate
  modified_base 9: mod_base = OTHER; note = 2'-deoxy-2'-fluoroadenosine-3'-phosphate
  modified_base 10: mod_base = OTHER; note = 2'-deoxy-2'-fluoroguanosine-3'-phosphate
  modified_base 11: mod_base = OTHER; note = 2'-deoxy-2'-fluoroadenosine-3'-phosphate
  modified_base 12: mod_base = OTHER; note = 2'-O-methyladenosine-3'-phosphate
  modified_base 13: mod_base = OTHER; note = 2'-O-methylguanosine-3'-phosphate
  modified_base 14: mod_base = OTHER; note = 2'-O-methyladenosine-3'-phosphate
  modified_base 15: mod_base = OTHER; note = 2'-O-methyladenosine-3'-phosphate
  modified_base 16: mod_base = OTHER; note = 2'-O-methyluridine-3'-phosphate
  modified_base 17: mod_base = OTHER; note = 2'-O-methyluridine-3'-phosphate
  modified_base 18: mod_base = OTHER; note = 2'-O-methyladenosine-3'-phosphate
  modified_base 19: mod_base = OTHER; note = 2'-O-methylcytidine-3'-phosphate
  modified_base 20: mod_base = OTHER; note = 2'-O-methyluridine-3'-phosphate
  modified_base 21: mod_base = OTHER; note = 2'-O-methyladenosine
gaacctgaagaagaattacta

SEQ ID NO: 3686 - RNA, 21 nt, synthetic construct
  source 1..21: mol_type = other RNA
  modified_base 1: mod_base = OTHER; note = 2'-O-methyladenosine-3'-phosphate
  modified_base 2: mod_base = OTHER; note = 2'-O-methyladenosine-3'-phosphate
  modified_base 3: mod_base = OTHER; note = 2'-O-methylcytidine-3'-phosphate
  modified_base 4: mod_base = OTHER; note = 2'-O-methylcytidine-3'-phosphate
  modified_base 5: mod_base = OTHER; note = 2'-O-methyluridine-3'-phosphate
  modified_base 6: mod_base = OTHER; note = 2'-O-methylguanosine-3'-phosphate
  modified_base 7: mod_base = OTHER; note = 2'-deoxy-2'-fluoroadenosine-3'-phosphate
  modified_base 8: mod_base = OTHER; note = 2'-O-methyladenosine-3'-phosphate
  modified_base 9: mod_base = OTHER; note = 2'-deoxy-2'-fluoroguanosine-3'-phosphate
  modified_base 10: mod_base = OTHER; note = 2'-deoxy-2'-fluoroadenosine-3'-phosphate
  modified_base 11: mod_base = OTHER; note = 2'-deoxy-2'-fluoroadenosine-3'-phosphate
  modified_base 12: mod_base = OTHER; note = 2'-O-methylguanosine-3'-phosphate
  modified_base 13: mod_base = OTHER; note = 2'-O-methyladenosine-3'-phosphate
  modified_base 14: mod_base = OTHER; note = 2'-O-methyladenosine-3'-phosphate
  modified_base 15: mod_base = OTHER; note = 2'-O-methyluridine-3'-phosphate
  modified_base 16: mod_base = OTHER; note = 2'-O-methyluridine-3'-phosphate
  modified_base 17: mod_base = OTHER; note = 2'-O-methyladenosine-3'-phosphate
  modified_base 18: mod_base = OTHER; note = 2'-O-methylcytidine-3'-phosphate
  modified_base 19: mod_base = OTHER; note = 2'-O-methyluridine-3'-phosphate
  modified_base 20: mod_base = OTHER; note = 2'-O-methylguanosine-3'-phosphate
  modified_base 21: mod_base = OTHER; note = 2'-O-methyladenosine
aacctgaagaagaattactga

SEQ ID NO: 3687 - RNA, 21 nt, synthetic construct
  source 1..21: mol_type = other RNA
  modified_base 1: mod_base = OTHER; note = 2'-O-methyladenosine-3'-phosphate
  modified_base 2: mod_base = OTHER; note = 2'-O-methylcytidine-3'-phosphate
  modified_base 3: mod_base = OTHER; note = 2'-O-methylcytidine-3'-phosphate
  modified_base 4: mod_base = OTHER; note = 2'-O-methyluridine-3'-phosphate
  modified_base 5: mod_base = OTHER; note = 2'-O-methylguanosine-3'-phosphate
  modified_base 6: mod_base = OTHER; note = 2'-O-methyladenosine-3'-phosphate
  modified_base 7: mod_base = OTHER; note = 2'-deoxy-2'-fluoroadenosine-3'-phosphate
  modified_base 8: mod_base = OTHER; note = 2'-O-methylguanosine-3'-phosphate
  modified_base 9: mod_base = OTHER; note = 2'-deoxy-2'-fluoroadenosine-3'-phosphate
  modified_base 10: mod_base = OTHER; note = 2'-deoxy-2'-fluoroadenosine-3'-phosphate
  modified_base 11: mod_base = OTHER; note = 2'-deoxy-2'-fluoroguanosine-3'-phosphate
  modified_base 12: mod_base = OTHER; note = 2'-O-methyladenosine-3'-phosphate
  modified_base 13: mod_base = OTHER; note = 2'-O-methyladenosine-3'-phosphate
  modified_base 14: mod_base = OTHER; note = 2'-O-methyluridine-3'-phosphate
  modified_base 15: mod_base = OTHER; note = 2'-O-methyluridine-3'-phosphate
  modified_base 16: mod_base = OTHER; note = 2'-O-methyladenosine-3'-phosphate
  modified_base 17: mod_base = OTHER; note = 2'-O-methylcytidine-3'-phosphate
  modified_base 18: mod_base = OTHER; note = 2'-O-methyluridine-3'-phosphate
  modified_base 19: mod_base = OTHER; note = 2'-O-methylguanosine-3'-phosphate
  modified_base 20: mod_base = OTHER; note = 2'-O-methyluridine-3'-phosphate
  modified_base 21: mod_base = OTHER; note = 2'-O-methyladenosine
acctgaagaagaattactgta

SEQ ID NO: 3688 - RNA, 21 nt, synthetic construct
  source 1..21: mol_type = other RNA
  modified_base 1: mod_base = OTHER; note = 2'-O-methylcytidine-3'-phosphate
  modified_base 2: mod_base = OTHER; note = 2'-O-methylcytidine-3'-phosphate
  modified_base 3: mod_base = OTHER; note = 2'-O-methyluridine-3'-phosphate
  modified_base 4: mod_base = OTHER; note = 2'-O-methylguanosine-3'-phosphate
  modified_base 5: mod_base = OTHER; note = 2'-O-methyladenosine-3'-phosphate
  modified_base 6: mod_base = OTHER; note = 2'-O-methyladenosine-3'-phosphate
  modified_base 7: mod_base = OTHER; note = 2'-deoxy-2'-fluoroguanosine-3'-phosphate
  modified_base 8: mod_base = OTHER; note = 2'-O-methyladenosine-3'-phosphate
  modified_base 9: mod_base = OTHER; note = 2'-deoxy-2'-fluoroadenosine-3'-phosphate
  modified_base 10: mod_base = OTHER; note = 2'-deoxy-2'-fluoroguanosine-3'-phosphate
  modified_base 11: mod_base = OTHER; note = 2'-deoxy-2'-fluoroadenosine-3'-phosphate
  modified_base 12: mod_base = OTHER; note = 2'-O-methyladenosine-3'-phosphate
  modified_base 13: mod_base = OTHER; note = 2'-O-methyluridine-3'-phosphate
  modified_base 14: mod_base = OTHER; note = 2'-O-methyluridine-3'-phosphate
  modified_base 15: mod_base = OTHER; note = 2'-O-methyladenosine-3'-phosphate
  modified_base 16: mod_base = OTHER; note = 2'-O-methylcytidine-3'-phosphate
  modified_base 17: mod_base = OTHER; note = 2'-O-methyluridine-3'-phosphate
  modified_base 18: mod_base = OTHER; note = 2'-O-methylguanosine-3'-phosphate
  modified_base 19: mod_base = OTHER; note = 2'-O-methyluridine-3'-phosphate
  modified_base 20: mod_base = OTHER; note = 2'-O-methylcytidine-3'-phosphate
  modified_base 21: mod_base = OTHER; note = 2'-O-methyladenosine
cctgaagaagaattactgtca

SEQ ID NO: 3689 - RNA, 21 nt, synthetic construct
  source 1..21: mol_type = other RNA
  modified_base 1: mod_base = OTHER; note = 2'-O-methylcytidine-3'-phosphate
  modified_base 2: mod_base = OTHER; note = 2'-O-methyluridine-3'-phosphate
  modified_base 3: mod_base = OTHER; note = 2'-O-methylguanosine-3'-phosphate
  modified_base 4: mod_base = OTHER; note = 2'-O-methyladenosine-3'-phosphate
  modified_base 5: mod_base = OTHER; note = 2'-O-methyladenosine-3'-phosphate
  modified_base 6: mod_base = OTHER; note = 2'-O-methylguanosine-3'-phosphate
  modified_base 7: mod_base = OTHER; note = 2'-deoxy-2'-fluoroadenosine-3'-phosphate
  modified_base 8: mod_base = OTHER; note = 2'-O-methyladenosine-3'-phosphate
  modified_base 9: mod_base = OTHER; note = 2'-deoxy-2'-fluoroguanosine-3'-phosphate
  modified_base 10: mod_base = OTHER; note = 2'-deoxy-2'-fluoroadenosine-3'-phosphate
  modified_base 11: mod_base = OTHER; note = 2'-deoxy-2'-fluoroadenosine-3'-phosphate
  modified_base 12: mod_base = OTHER; note = 2'-O-methyluridine-3'-phosphate
  modified_base 13: mod_base = OTHER; note = 2'-O-methyluridine-3'-phosphate
  modified_base 14: mod_base = OTHER; note = 2'-O-methyladenosine-3'-phosphate
  modified_base 15: mod_base = OTHER; note = 2'-O-methylcytidine-3'-phosphate
  modified_base 16: mod_base = OTHER; note = 2'-O-methyluridine-3'-phosphate
  modified_base 17: mod_base = OTHER; note = 2'-O-methylguanosine-3'-phosphate
  modified_base 18: mod_base = OTHER; note = 2'-O-methyluridine-3'-phosphate
  modified_base 19: mod_base = OTHER; note = 2'-O-methylcytidine-3'-phosphate
  modified_base 20: mod_base = OTHER; note = 2'-O-methylguanosine-3'-phosphate
  modified_base 21: mod_base = OTHER; note = 2'-O-methyladenosine
ctgaagaagaattactgtcga

SEQ ID NO: 3690 - RNA, 21 nt, synthetic construct
  source 1..21: mol_type = other RNA
  modified_base 1: mod_base = OTHER; note = 2'-O-methyluridine-3'-phosphate
  modified_base 2: mod_base = OTHER; note = 2'-O-methylguanosine-3'-phosphate
  modified_base 3: mod_base = OTHER; note = 2'-O-methyladenosine-3'-phosphate
  modified_base 4: mod_base = OTHER; note = 2'-O-methyladenosine-3'-phosphate
  modified_base 5: mod_base = OTHER; note = 2'-O-methylguanosine-3'-phosphate
  modified_base 6: mod_base = OTHER; note = 2'-O-methyladenosine-3'-phosphate
  modified_base 7: mod_base = OTHER; note = 2'-deoxy-2'-fluoroadenosine-3'-phosphate
  modified_base 8: mod_base = OTHER; note = 2'-O-methylguanosine-3'-phosphate
  modified_base 9: mod_base = OTHER; note = 2'-deoxy-2'-fluoroadenosine-3'-phosphate
  modified_base 10: mod_base = OTHER; note = 2'-deoxy-2'-fluoroadenosine-3'-phosphate
  modified_base 11: mod_base = OTHER; note = 2'-deoxy-2'-fluorouridine-3'-phosphate
  modified_base 12: mod_base = OTHER; note = 2'-O-methyluridine-3'-phosphate
  modified_base 13: mod_base = OTHER; note = 2'-O-methyladenosine-3'-phosphate
  modified_base 14: mod_base = OTHER; note = 2'-O-methylcytidine-3'-phosphate
  modified_base 15: mod_base = OTHER; note = 2'-O-methyluridine-3'-phosphate
  modified_base 16: mod_base = OTHER; note = 2'-O-methylguanosine-3'-phosphate
  modified_base 17: mod_base = OTHER; note = 2'-O-methyluridine-3'-phosphate
  modified_base 18: mod_base = OTHER; note = 2'-O-methylcytidine-3'-phosphate
  modified_base 19: mod_base = OTHER; note = 2'-O-methylguanosine-3'-phosphate
  modified_base 20: mod_base = OTHER; note = 2'-O-methyluridine-3'-phosphate
  modified_base 21: mod_base = OTHER; note = 2'-O-methyladenosine
tgaagaagaattactgtcgta

SEQ ID NO: 3691 - RNA, 21 nt, synthetic construct
  source 1..21: mol_type = other RNA
  modified_base 1: mod_base = OTHER; note = 2'-O-methylguanosine-3'-phosphate
  modified_base 2: mod_base = OTHER; note = 2'-O-methyladenosine-3'-phosphate
  modified_base 3: mod_base = OTHER; note = 2'-O-methyladenosine-3'-phosphate
  modified_base 4: mod_base = OTHER; note = 2'-O-methylguanosine-3'-phosphate
  modified_base 5: mod_base = OTHER; note = 2'-O-methyladenosine-3'-phosphate
  modified_base 6: mod_base = OTHER; note = 2'-O-methyladenosine-3'-phosphate
  modified_base 7: mod_base = OTHER; note = 2'-deoxy-2'-fluoroguanosine-3'-phosphate
  modified_base 8: mod_base = OTHER; note = 2'-O-methyladenosine-3'-phosphate
  modified_base 9: mod_base = OTHER; note = 2'-deoxy-2'-fluoroadenosine-3'-phosphate
  modified_base 10: mod_base = OTHER; note = 2'-deoxy-2'-fluorouridine-3'-phosphate
  modified_base 11: mod_base = OTHER; note = 2'-deoxy-2'-fluorouridine-3'-phosphate
  modified_base 12: mod_base = OTHER; note = 2'-O-methyladenosine-3'-phosphate
  modified_base 13: mod_base = OTHER; note = 2'-O-methylcytidine-3'-phosphate
  modified_base 14: mod_base = OTHER; note = 2'-O-methyluridine-3'-phosphate
  modified_base 15: mod_base = OTHER; note = 2'-O-methylguanosine-3'-phosphate
  modified_base 16: mod_base = OTHER; note = 2'-O-methyluridine-3'-phosphate
  modified_base 17: mod_base = OTHER; note = 2'-O-methylcytidine-3'-phosphate
  modified_base 18: mod_base = OTHER; note = 2'-O-methylguanosine-3'-phosphate
  modified_base 19: mod_base = OTHER; note = 2'-O-methyluridine-3'-phosphate
  modified_base 20: mod_base = OTHER; note = 2'-O-methyladenosine-3'-phosphate
  modified_base 21: mod_base = OTHER; note = 2'-O-methyladenosine
gaagaagaattactgtcgtaa

SEQ ID NO: 3692 - RNA, 21 nt, synthetic construct
  source 1..21: mol_type = other RNA
  modified_base 1: mod_base = OTHER; note = 2'-O-methyladenosine-3'-phosphate
  modified_base 2: mod_base = OTHER; note = 2'-O-methyladenosine-3'-phosphate
  modified_base 3: mod_base = OTHER; note = 2'-O-methylguanosine-3'-phosphate
  modified_base 4: mod_base = OTHER; note = 2'-O-methyladenosine-3'-phosphate
  modified_base 5: mod_base = OTHER; note = 2'-O-methyladenosine-3'-phosphate
  modified_base 6: mod_base = OTHER; note = 2'-O-methylguanosine-3'-phosphate
  modified_base 7: mod_base = OTHER; note = 2'-deoxy-2'-fluoroadenosine-3'-phosphate
  modified_base 8: mod_base = OTHER; note = 2'-O-methyladenosine-3'-phosphate
  modified_base 9: mod_base = OTHER; note = 2'-deoxy-2'-fluorouridine-3'-phosphate
  modified_base 10: mod_base = OTHER; note = 2'-deoxy-2'-fluorouridine-3'-phosphate
  modified_base 11: mod_base = OTHER; note = 2'-deoxy-2'-fluoroadenosine-3'-phosphate
  modified_base 12: mod_base = OTHER; note = 2'-O-methylcytidine-3'-phosphate
  modified_base 13: mod_base = OTHER; note = 2'-O-methyluridine-3'-phosphate
  modified_base 14: mod_base = OTHER; note = 2'-O-methylguanosine-3'-phosphate
  modified_base 15: mod_base = OTHER; note = 2'-O-methyluridine-3'-phosphate
  modified_base 16: mod_base = OTHER; note = 2'-O-methylcytidine-3'-phosphate
  modified_base 17: mod_base = OTHER; note = 2'-O-methylguanosine-3'-phosphate
  modified_base 18: mod_base = OTHER; note = 2'-O-methyluridine-3'-phosphate
  modified_base 19: mod_base = OTHER; note = 2'-O-methyladenosine-3'-phosphate
  modified_base 20: mod_base = OTHER; note = 2'-O-methyladenosine-3'-phosphate
  modified_base 21: mod_base = OTHER; note = 2'-O-methyladenosine
aagaagaattactgtcgtaaa

SEQ ID NO: 3693 - RNA, 21 nt, synthetic construct
  source 1..21: mol_type = other RNA
  modified_base 1: mod_base = OTHER; note = 2'-O-methyladenosine-3'-phosphate
  modified_base 2: mod_base = OTHER; note = 2'-O-methylguanosine-3'-phosphate
  modified_base 3: mod_base = OTHER; note = 2'-O-methylguanosine-3'-phosphate
  modified_base 4: mod_base = OTHER; note = 2'-O-methylguanosine-3'-phosphate
  modified_base 5: mod_base = OTHER; note = 2'-O-methyladenosine-3'-phosphate
  modified_base 6: mod_base = OTHER; note = 2'-O-methylguanosine-3'-phosphate
  modified_base 7: mod_base = OTHER; note = 2'-deoxy-2'-fluorocytidine-3'-phosphate
  modified_base 8: mod_base = OTHER; note = 2'-O-methyluridine-3'-phosphate
  modified_base 9: mod_base = OTHER; note = 2'-deoxy-2'-fluoroguanosine-3'-phosphate
  modified_base 10: mod_base = OTHER; note = 2'-deoxy-2'-fluorocytidine-3'-phosphate
  modified_base 11: mod_base = OTHER; note = 2'-deoxy-2'-fluoroguanosine-3'-phosphate
  modified_base 12: mod_base = OTHER; note = 2'-O-methylguanosine-3'-phosphate
  modified_base 13: mod_base = OTHER; note = 2'-O-methylcytidine-3'-phosphate
  modified_base 14: mod_base = OTHER; note = 2'-O-methylcytidine-3'-phosphate
  modified_base 15: mod_base = OTHER; note = 2'-O-methyluridine-3'-phosphate
  modified_base 16: mod_base = OTHER; note = 2'-O-methyluridine-3'-phosphate
  modified_base 17: mod_base = OTHER; note = 2'-O-methylguanosine-3'-phosphate
  modified_base 18: mod_base = OTHER; note = 2'-O-methylguanosine-3'-phosphate
  modified_base 19: mod_base = OTHER; note = 2'-O-methyluridine-3'-phosphate
  modified_base 20: mod_base = OTHER; note = 2'-O-methylguanosine-3'-phosphate
  modified_base 21: mod_base = OTHER; note = 2'-O-methyladenosine
agggagctgcggccttggtga

SEQ ID NO: 3694 - RNA, 21 nt, synthetic construct
  source 1..21: mol_type = other RNA
  modified_base 1: mod_base = OTHER; note = 2'-O-methylguanosine-3'-phosphate
  modified_base 2: mod_base = OTHER; note = 2'-O-methylguanosine-3'-phosphate
  modified_base 3: mod_base = OTHER; note = 2'-O-methyladenosine-3'-phosphate
  modified_base 4: mod_base = OTHER; note = 2'-O-methylguanosine-3'-phosphate
  modified_base 5: mod_base = OTHER; note = 2'-O-methylcytidine-3'-phosphate
  modified_base 6: mod_base = OTHER; note = 2'-O-methyluridine-3'-phosphate
  modified_base 7: mod_base = OTHER; note = 2'-deoxy-2'-fluoroguanosine-3'-phosphate
  modified_base 8: mod_base = OTHER; note = 2'-O-methylcytidine-3'-phosphate
  modified_base 9: mod_base = OTHER; note = 2'-deoxy-2'-fluoroguanosine-3'-phosphate
  modified_base 10: mod_base = OTHER; note = 2'-deoxy-2'-fluoroguanosine-3'-phosphate
  modified_base 11: mod_base = OTHER; note = 2'-deoxy-2'-fluorocytidine-3'-phosphate
  modified_base 12: mod_base = OTHER; note = 2'-O-methylcytidine-3'-phosphate
  modified_base 13: mod_base = OTHER; note = 2'-O-methyluridine-3'-phosphate
  modified_base 14: mod_base = OTHER; note = 2'-O-methyluridine-3'-phosphate
  modified_base 15: mod_base = OTHER; note = 2'-O-methylguanosine-3'-phosphate
  modified_base 16: mod_base = OTHER; note = 2'-O-methylguanosine-3'-phosphate
  modified_base 17: mod_base = OTHER; note = 2'-O-methyluridine-3'-phosphate
  modified_base 18: mod_base = OTHER; note = 2'-O-methylguanosine-3'-phosphate
  modified_base 19: mod_base = OTHER; note = 2'-O-methyluridine-3'-phosphate
  modified_base 20: mod_base = OTHER; note = 2'-O-methyluridine-3'-phosphate
  modified_base 21: mod_base = OTHER; note = 2'-O-methyladenosine
ggagctgcggccttggtgtta

SEQ ID NO: 3695 - RNA, 21 nt, synthetic construct
  source 1..21: mol_type = other RNA
  modified_base 1: mod_base = OTHER; note = 2'-O-methylguanosine-3'-phosphate
  modified_base 2: mod_base = OTHER; note = 2'-O-methyladenosine-3'-phosphate
  modified_base 3: mod_base = OTHER; note = 2'-O-methylguanosine-3'-phosphate
  modified_base 4: mod_base = OTHER; note = 2'-O-methylcytidine-3'-phosphate
  modified_base 5: mod_base = OTHER; note = 2'-O-methyluridine-3'-phosphate
  modified_base 6: mod_base = OTHER; note = 2'-O-methylguanosine-3'-phosphate
  modified_base 7: mod_base = OTHER; note = 2'-deoxy-2'-fluorocytidine-3'-phosphate
  modified_base 8: mod_base = OTHER; note = 2'-O-methylguanosine-3'-phosphate
  modified_base 9: mod_base = OTHER; note = 2'-deoxy-2'-fluoroguanosine-3'-phosphate
  modified_base 10: mod_base = OTHER; note = 2'-deoxy-2'-fluorocytidine-3'-phosphate
  modified_base 11: mod_base = OTHER; note = 2'-deoxy-2'-fluorocytidine-3'-phosphate
  modified_base 12: mod_base = OTHER; note = 2'-O-methyluridine-3'-phosphate
  modified_base 13: mod_base = OTHER; note = 2'-O-methyluridine-3'-phosphate
  modified_base 14: mod_base = OTHER; note = 2'-O-methylguanosine-3'-phosphate
  modified_base 15: mod_base = OTHER; note = 2'-O-methylguanosine-3'-phosphate
  modified_base 16: mod_base = OTHER; note = 2'-O-methyluridine-3'-phosphate
  modified_base 17: mod_base = OTHER; note = 2'-O-methylguanosine-3'-phosphate
  modified_base 18: mod_base = OTHER; note = 2'-O-methyluridine-3'-phosphate
  modified_base 19: mod_base = OTHER; note = 2'-O-methyluridine-3'-phosphate
  modified_base 20: mod_base = OTHER; note = 2'-O-methyluridine-3'-phosphate
  modified_base 21: mod_base = OTHER; note = 2'-O-methyladenosine
gagctgcggccttggtgttta

SEQ ID NO: 3696 - RNA, 21 nt, synthetic construct
  source 1..21: mol_type = other RNA
  modified_base 1: mod_base = OTHER; note = 2'-O-methyladenosine-3'-phosphate
  modified_base 2: mod_base = OTHER; note = 2'-O-methylguanosine-3'-phosphate
  modified_base 3: mod_base = OTHER; note = 2'-O-methylcytidine-3'-phosphate
  modified_base 4: mod_base = OTHER; note = 2'-O-methyluridine-3'-phosphate
  modified_base 5: mod_base = OTHER; note = 2'-O-methylguanosine-3'-phosphate
  modified_base 6: mod_base = OTHER; note = 2'-O-methylcytidine-3'-phosphate
  modified_base 7: mod_base = OTHER; note = 2'-deoxy-2'-fluoroguanosine-3'-phosphate
  modified_base 8: mod_base = OTHER; note = 2'-O-methylguanosine-3'-phosphate
  modified_base 9: mod_base = OTHER; note = 2'-deoxy-2'-fluorocytidine-3'-phosphate
  modified_base 10: mod_base = OTHER; note = 2'-deoxy-2'-fluorocytidine-3'-phosphate
  modified_base 11: mod_base = OTHER; note = 2'-deoxy-2'-fluorouridine-3'-phosphate
  modified_base 12: mod_base = OTHER; note = 2'-O-methyluridine-3'-phosphate
  modified_base 13: mod_base = OTHER; note = 2'-O-methylguanosine-3'-phosphate
  modified_base 14: mod_base = OTHER; note = 2'-O-methylguanosine-3'-phosphate
  modified_base 15: mod_base = OTHER; note = 2'-O-methyluridine-3'-phosphate
  modified_base 16: mod_base = OTHER; note = 2'-O-methylguanosine-3'-phosphate
  modified_base 17: mod_base = OTHER; note = 2'-O-methyluridine-3'-phosphate
  modified_base 18: mod_base = OTHER; note = 2'-O-methyluridine-3'-phosphate
  modified_base 19: mod_base = OTHER; note = 2'-O-methyluridine-3'-phosphate
  modified_base 20: mod_base = OTHER; note = 2'-O-methylcytidine-3'-phosphate
  modified_base 21: mod_base = OTHER; note = 2'-O-methyladenosine
agctgcggccttggtgtttca

SEQ ID NO: 3697 - RNA, 21 nt, synthetic construct
  source 1..21: mol_type = other RNA
  modified_base 1: mod_base = OTHER; note = 2'-O-methyluridine-3'-phosphate
  modified_base 2: mod_base = OTHER; note = 2'-O-methylguanosine-3'-phosphate
  modified_base 3: mod_base = OTHER; note = 2'-O-methylcytidine-3'-phosphate
  modified_base 4: mod_base = OTHER; note = 2'-O-methylguanosine-3'-phosphate
  modified_base 5: mod_base = OTHER; note = 2'-O-methylguanosine-3'-phosphate
  modified_base 6: mod_base = OTHER; note = 2'-O-methylcytidine-3'-phosphate
  modified_base 7: mod_base = OTHER; note = 2'-deoxy-2'-fluorocytidine-3'-phosphate
  modified_base 8: mod_base = OTHER; note = 2'-O-methyluridine-3'-phosphate
  modified_base 9: mod_base = OTHER; note = 2'-deoxy-2'-fluorouridine-3'-phosphate
  modified_base 10: mod_base = OTHER; note = 2'-deoxy-2'-fluoroguanosine-3'-phosphate
  modified_base 11: mod_base = OTHER; note = 2'-deoxy-2'-fluoroguanosine-3'-phosphate
  modified_base 12: mod_base = OTHER; note = 2'-O-methyluridine-3'-phosphate
  modified_base 13: mod_base = OTHER; note = 2'-O-methylguanosine-3'-phosphate
  modified_base 14: mod_base = OTHER; note = 2'-O-methyluridine-3'-phosphate
  modified_base 15: mod_base = OTHER; note = 2'-O-methyluridine-3'-phosphate
  modified_base 16: mod_base = OTHER; note = 2'-O-methyluridine-3'-phosphate
  modified_base 17: mod_base = OTHER; note = 2'-O-methylcytidine-3'-phosphate
  modified_base 18: mod_base = OTHER; note = 2'-O-methyladenosine-3'-phosphate
  modified_base 19: mod_base = OTHER; note = 2'-O-methylcytidine-3'-phosphate
  modified_base 20: mod_base = OTHER; note = 2'-O-methylcytidine-3'-phosphate
  modified_base 21: mod_base = OTHER; note = 2'-O-methyladenosine
tgcggccttggtgtttcacca

SEQ ID NO: 3698 - RNA, 21 nt, synthetic construct
  source 1..21: mol_type = other RNA
  modified_base 1: mod_base = OTHER; note = 2'-O-methylcytidine-3'-phosphate
  modified_base 2: mod_base = OTHER; note = 2'-O-methylguanosine-3'-phosphate
  modified_base 3: mod_base = OTHER; note = 2'-O-methylguanosine-3'-phosphate
  modified_base 4: mod_base = OTHER; note = 2'-O-methylcytidine-3'-phosphate
  modified_base 5: mod_base = OTHER; note = 2'-O-methylcytidine-3'-phosphate
  modified_base 6: mod_base = OTHER; note = 2'-O-methyluridine-3'-phosphate
  modified_base 7: mod_base = OTHER; note = 2'-deoxy-2'-fluorouridine-3'-phosphate
  modified_base 8: mod_base = OTHER; note = 2'-O-methylguanosine-3'-phosphate
  modified_base 9: mod_base = OTHER; note = 2'-deoxy-2'-fluoroguanosine-3'-phosphate
  modified_base 10: mod_base = OTHER; note = 2'-deoxy-2'-fluorouridine-3'-phosphate
  modified_base 11: mod_base = OTHER; note = 2'-deoxy-2'-fluoroguanosine-3'-phosphate
  modified_base 12: mod_base = OTHER; note = 2'-O-methyluridine-3'-phosphate
  modified_base 13: mod_base = OTHER; note = 2'-O-methyluridine-3'-phosphate
  modified_base 14: mod_base = OTHER; note = 2'-O-methyluridine-3'-phosphate
  modified_base 15: mod_base = OTHER; note = 2'-O-methylcytidine-3'-phosphate
  modified_base 16: mod_base = OTHER; note = 2'-O-methyladenosine-3'-phosphate
  modified_base 17: mod_base = OTHER; note = 2'-O-methylcytidine-3'-phosphate
  modified_base 18: mod_base = OTHER; note = 2'-O-methylcytidine-3'-phosphate
  modified_base 19: mod_base = OTHER; note = 2'-O-methyladenosine-3'-phosphate
  modified_base 20: mod_base = OTHER; note = 2'-O-methylcytidine-3'-phosphate
  modified_base 21: mod_base = OTHER; note = 2'-O-methyladenosine
cggccttggtgtttcaccaca

SEQ ID NO: 3699 - RNA, 21 nt, synthetic construct
  source 1..21: mol_type = other RNA
  modified_base 1: mod_base = OTHER; note = 2'-O-methylguanosine-3'-phosphate
  modified_base 2: mod_base = OTHER; note = 2'-O-methylguanosine-3'-phosphate
  modified_base 3: mod_base = OTHER; note = 2'-O-methylcytidine-3'-phosphate
  modified_base 4: mod_base = OTHER; note = 2'-O-methylcytidine-3'-phosphate
  modified_base 5: mod_base = OTHER; note = 2'-O-methyluridine-3'-phosphate
  modified_base 6: mod_base = OTHER; note = 2'-O-methyluridine-3'-phosphate
  modified_base 7: mod_base = OTHER; note = 2'-deoxy-2'-fluoroguanosine-3'-phosphate
  modified_base 8: mod_base = OTHER; note = 2'-O-methylguanosine-3'-phosphate
  modified_base 9: mod_base = OTHER; note = 2'-deoxy-2'-fluorouridine-3'-phosphate
  modified_base 10: mod_base = OTHER; note = 2'-deoxy-2'-fluoroguanosine-3'-phosphate
  modified_base 11: mod_base = OTHER; note = 2'-deoxy-2'-fluorouridine-3'-phosphate
  modified_base 12: mod_base = OTHER; note = 2'-O-methyluridine-3'-phosphate
  modified_base 13: mod_base = OTHER; note = 2'-O-methyluridine-3'-phosphate
  modified_base 14: mod_base = OTHER; note = 2'-O-methylcytidine-3'-phosphate
  modified_base 15: mod_base = OTHER; note = 2'-O-methyladenosine-3'-phosphate
  modified_base 16: mod_base = OTHER; note = 2'-O-methylcytidine-3'-phosphate
  modified_base 17: mod_base = OTHER; note = 2'-O-methylcytidine-3'-phosphate
  modified_base 18: mod_base = OTHER; note = 2'-O-methyladenosine-3'-phosphate
  modified_base 19: mod_base = OTHER; note = 2'-O-methylcytidine-3'-phosphate
  modified_base 20: mod_base = OTHER; note = 2'-O-methylcytidine-3'-phosphate
  modified_base 21: mod_base = OTHER; note = 2'-O-methyladenosine
ggccttggtgtttcaccacca

SEQ ID NO: 3700 - RNA, 21 nt, synthetic construct
  source 1..21: mol_type = other RNA
  modified_base 1: mod_base = OTHER; note = 2'-O-methylguanosine-3'-phosphate
  modified_base 2: mod_base = OTHER; note = 2'-O-methylcytidine-3'-phosphate
  modified_base 3: mod_base = OTHER; note = 2'-O-methylcytidine-3'-phosphate
  modified_base 4: mod_base = OTHER; note = 2'-O-methyluridine-3'-phosphate
  modified_base 5: mod_base = OTHER; note = 2'-O-methyluridine-3'-phosphate
  modified_base 6: mod_base = OTHER; note = 2'-O-methylguanosine-3'-phosphate
  modified_base 7: mod_base = OTHER; note = 2'-deoxy-2'-fluoroguanosine-3'-phosphate
  modified_base 8: mod_base = OTHER; note = 2'-O-methyluridine-3'-phosphate
  modified_base 9: mod_base = OTHER; note = 2'-deoxy-2'-fluoroguanosine-3'-phosphate
  modified_base 10: mod_base = OTHER; note = 2'-deoxy-2'-fluorouridine-3'-phosphate
  modified_base 11: mod_base = OTHER; note = 2'-deoxy-2'-fluorouridine-3'-phosphate
  modified_base 12: mod_base = OTHER; note = 2'-O-methyluridine-3'-phosphate
  modified_base 13: mod_base = OTHER; note = 2'-O-methylcytidine-3'-phosphate
  modified_base 14: mod_base = OTHER; note = 2'-O-methyladenosine-3'-phosphate
  modified_base 15: mod_base = OTHER; note = 2'-O-methylcytidine-3'-phosphate
  modified_base 16: mod_base = OTHER; note = 2'-O-methylcytidine-3'-phosphate
  modified_base 17: mod_base = OTHER; note = 2'-O-methyladenosine-3'-phosphate
  modified_base 18: mod_base = OTHER; note = 2'-O-methylcytidine-3'-phosphate
  modified_base 19: mod_base = OTHER; note = 2'-O-methylcytidine-3'-phosphate
  modified_base 20: mod_base = OTHER; note = 2'-O-methylguanosine-3'-phosphate
  modified_base 21: mod_base = OTHER; note = 2'-O-methyladenosine
gccttggtgtttcaccaccga

SEQ ID NO: 3701 - RNA, 21 nt, synthetic construct
  source 1..21: mol_type = other RNA
  modified_base 1: mod_base = OTHER; note = 2'-O-methylcytidine-3'-phosphate
  modified_base 2: mod_base = OTHER; note = 2'-O-methyladenosine-3'-phosphate
  modified_base 3: mod_base = OTHER; note = 2'-O-methyladenosine-3'-phosphate
  modified_base 4: mod_base = OTHER; note = 2'-O-methylcytidine-3'-phosphate
  modified_base 5: mod_base = OTHER; note = 2'-O-methyladenosine-3'-phosphate
  modified_base 6: mod_base = OTHER; note = 2'-O-methyladenosine-3'-phosphate
  modified_base 7: mod_base = OTHER; note = 2'-deoxy-2'-fluoroguanosine-3'-phosphate
  modified_base 8: mod_base = OTHER; note = 2'-O-methylcytidine-3'-phosphate
  modified_base 9: mod_base = OTHER; note = 2'-deoxy-2'-fluoroguanosine-3'-phosphate
  modified_base 10: mod_base = OTHER; note = 2'-deoxy-2'-fluorocytidine-3'-phosphate
  modified_base 11: mod_base = OTHER; note = 2'-deoxy-2'-fluorouridine-3'-phosphate
  modified_base 12: mod_base = OTHER; note = 2'-O-methylguanosine-3'-phosphate
  modified_base 13: mod_base = OTHER; note = 2'-O-methylguanosine-3'-phosphate
  modified_base 14: mod_base = OTHER; note = 2'-O-methylguanosine-3'-phosphate
  modified_base 15: mod_base = OTHER; note = 2'-O-methyladenosine-3'-phosphate
  modified_base 16: mod_base = OTHER; note = 2'-O-methyladenosine-3'-phosphate
  modified_base 17: mod_base = OTHER; note = 2'-O-methylcytidine-3'-phosphate
  modified_base 18: mod_base = OTHER; note = 2'-O-methyluridine-3'-phosphate
  modified_base 19: mod_base = OTHER; note = 2'-O-methyluridine-3'-phosphate
  modified_base 20: mod_base = OTHER; note = 2'-O-methyluridine-3'-phosphate
  modified_base 21: mod_base = OTHER; note = 2'-O-methyladenosine
caacaagcgctgggaacttta

SEQ ID NO: 3702 - RNA, 21 nt, synthetic construct
  source 1..21: mol_type = other RNA
  modified_base 1: mod_base = OTHER; note = 2'-O-methyladenosine-3'-phosphate
  modified_base 2: mod_base = OTHER; note = 2'-O-methyladenosine-3'-phosphate
  modified_base 3: mod_base = OTHER; note = 2'-O-methylcytidine-3'-phosphate
  modified_base 4: mod_base = OTHER; note = 2'-O-methyladenosine-3'-phosphate
  modified_base 5: mod_base = OTHER; note = 2'-O-methyladenosine-3'-phosphate
  modified_base 6: mod_base = OTHER; note = 2'-O-methylguanosine-3'-phosphate
  modified_base 7: mod_base = OTHER; note = 2'-deoxy-2'-fluorocytidine-3'-phosphate
  modified_base 8: mod_base = OTHER; note = 2'-O-methylguanosine-3'-phosphate
  modified_base 9: mod_base = OTHER; note = 2'-deoxy-2'-fluorocytidine-3'-phosphate
  modified_base 10: mod_base = OTHER; note = 2'-deoxy-2'-fluorouridine-3'-phosphate
  modified_base 11: mod_base = OTHER; note = 2'-deoxy-2'-fluoroguanosine-3'-phosphate
  modified_base 12: mod_base = OTHER; note = 2'-O-methylguanosine-3'-phosphate
  modified_base 13: mod_base = OTHER; note = 2'-O-methylguanosine-3'-phosphate
  modified_base 14: mod_base = OTHER; note = 2'-O-methyladenosine-3'-phosphate
  modified_base 15: mod_base = OTHER; note = 2'-O-methyladenosine-3'-phosphate
  modified_base 16: mod_base = OTHER; note = 2'-O-methylcytidine-3'-phosphate
  modified_base 17: mod_base = OTHER; note = 2'-O-methyluridine-3'-phosphate
  modified_base 18: mod_base = OTHER; note = 2'-O-methyluridine-3'-phosphate
  modified_base 19: mod_base = OTHER; note = 2'-O-methyluridine-3'-phosphate
  modified_base 20: mod_base = OTHER; note = 2'-O-methylguanosine-3'-phosphate
  modified_base 21: mod_base = OTHER; note = 2'-O-methyladenosine
aacaagcgctgggaactttga

SEQ ID NO: 3703 - RNA, 21 nt, synthetic construct
  source 1..21: mol_type = other RNA
  modified_base 1: mod_base = OTHER; note = 2'-O-methylguanosine-3'-phosphate
  modified_base 2: mod_base = OTHER; note = 2'-O-methylcytidine-3'-phosphate
  modified_base 3: mod_base = OTHER; note = 2'-O-methyluridine-3'-phosphate
  modified_base 4: mod_base = OTHER; note = 2'-O-methylguanosine-3'-phosphate
  modified_base 5: mod_base = OTHER; note = 2'-O-methylcytidine-3'-phosphate
  modified_base 6: mod_base = OTHER; note = 2'-O-methyladenosine-3'-phosphate
  modified_base 7: mod_base = OTHER; note = 2'-deoxy-2'-fluorocytidine-3'-phosphate
  modified_base 8: mod_base = OTHER; note = 2'-O-methyladenosine-3'-phosphate
  modified_base 9: mod_base = OTHER; note = 2'-deoxy-2'-fluoroadenosine-3'-phosphate
  modified_base 10: mod_base = OTHER; note = 2'-deoxy-2'-fluorocytidine-3'-phosphate
  modified_base 11: mod_base = OTHER; note = 2'-deoxy-2'-fluoroadenosine-3'-phosphate
  modified_base 12: mod_base = OTHER; note = 2'-O-methylcytidine-3'-phosphate
  modified_base 13: mod_base = OTHER; note = 2'-O-methylcytidine-3'-phosphate
  modified_base 14: mod_base = OTHER; note = 2'-O-methyluridine-3'-phosphate
  modified_base 15: mod_base = OTHER; note = 2'-O-methylcytidine-3'-phosphate
  modified_base 16: mod_base = OTHER; note = 2'-O-methylcytidine-3'-phosphate
  modified_base 17: mod_base = OTHER; note = 2'-O-methyladenosine-3'-phosphate
  modified_base 18: mod_base = OTHER; note = 2'-O-methylcytidine-3'-phosphate
  modified_base 19: mod_base = OTHER; note = 2'-O-methylcytidine-3'-phosphate
  modified_base 20: mod_base = OTHER; note = 2'-O-methyladenosine-3'-phosphate
  modified_base 21: mod_base = OTHER; note = 2'-O-methyladenosine
gctgcacaacacctccaccaa

SEQ ID NO: 3704 - RNA, 21 nt, synthetic construct
  source 1..21: mol_type = other RNA
  modified_base 1: mod_base = OTHER; note = 2'-O-methylcytidine-3'-phosphate
  modified_base 2: mod_base = OTHER; note = 2'-O-methyluridine-3'-phosphate
  modified_base 3: mod_base = OTHER; note = 2'-O-methylguanosine-3'-phosphate
  modified_base 4: mod_base = OTHER; note = 2'-O-methylcytidine-3'-phosphate
  modified_base 5: mod_base = OTHER; note = 2'-O-methyladenosine-3'-phosphate
  modified_base 6: mod_base = OTHER; note = 2'-O-methylcytidine-3'-phosphate
  modified_base 7: mod_base = OTHER; note = 2'-deoxy-2'-fluoroadenosine-3'-phosphate
  modified_base 8: mod_base = OTHER; note = 2'-O-methyladenosine-3'-phosphate
  modified_base 9: mod_base = OTHER; note = 2'-deoxy-2'-fluorocytidine-3'-phosphate
  modified_base 10: mod_base = OTHER; note = 2'-deoxy-2'-fluoroadenosine-3'-phosphate
  modified_base 11: mod_base = OTHER; note = 2'-deoxy-2'-fluorocytidine-3'-phosphate
  modified_base 12: mod_base = OTHER; note = 2'-O-methylcytidine-3'-phosphate
  modified_base 13: mod_base = OTHER; note = 2'-O-methyluridine-3'-phosphate
  modified_base 14: mod_base = OTHER; note = 2'-O-methylcytidine-3'-phosphate
  modified_base 15: mod_base = OTHER; note = 2'-O-methylcytidine-3'-phosphate
  modified_base 16: mod_base = OTHER; note = 2'-O-methyladenosine-3'-phosphate
  modified_base 17: mod_base = OTHER; note = 2'-O-methylcytidine-3'-phosphate
  modified_base 18: mod_base = OTHER; note = 2'-O-methylcytidine-3'-phosphate
  modified_base 19: mod_base = OTHER; note = 2'-O-methyladenosine-3'-phosphate
  modified_base 20: mod_base = OTHER; note = 2'-O-methyluridine-3'-phosphate
  modified_base 21: mod_base = OTHER; note = 2'-O-methyladenosine
ctgcacaacacctccaccata

SEQ ID NO: 3705 - RNA, 21 nt, synthetic construct
  source 1..21: mol_type = other RNA
  modified_base 1: mod_base = OTHER; note = 2'-O-methyluridine-3'-phosphate
  modified_base 2: mod_base = OTHER; note = 2'-O-methylguanosine-3'-phosphate
  modified_base 3: mod_base = OTHER; note = 2'-O-methylcytidine-3'-phosphate
  modified_base 4: mod_base = OTHER; note = 2'-O-methyladenosine-3'-phosphate
  modified_base 5: mod_base = OTHER; note = 2'-O-methylcytidine-3'-phosphate
  modified_base 6: mod_base = OTHER; note = 2'-O-methyladenosine-3'-phosphate
  modified_base 7: mod_base = OTHER; note = 2'-deoxy-2'-fluoroadenosine-3'-phosphate
  modified_base 8: mod_base = OTHER; note = 2'-O-methylcytidine-3'-phosphate
  modified_base 9: mod_base = OTHER; note = 2'-deoxy-2'-fluoroadenosine-3'-phosphate
  modified_base 10: mod_base = OTHER; note = 2'-deoxy-2'-fluorocytidine-3'-phosphate
  modified_base 11: mod_base = OTHER; note = 2'-deoxy-2'-fluorocytidine-3'-phosphate
  modified_base 12: mod_base = OTHER; note = 2'-O-methyluridine-3'-phosphate
  modified_base 13: mod_base = OTHER; note = 2'-O-methylcytidine-3'-phosphate
  modified_base 14: mod_base = OTHER; note = 2'-O-methylcytidine-3'-phosphate
  modified_base 15: mod_base = OTHER; note = 2'-O-methyladenosine-3'-phosphate
  modified_base 16: mod_base = OTHER; note = 2'-O-methylcytidine-3'-phosphate
  modified_base 17: mod_base = OTHER; note = 2'-O-methylcytidine-3'-phosphate
  modified_base 18: mod_base = OTHER; note = 2'-O-methyladenosine-3'-phosphate
  modified_base 19: mod_base = OTHER; note = 2'-O-methyluridine-3'-phosphate
  modified_base 20: mod_base = OTHER; note = 2'-O-methylcytidine-3'-phosphate
  modified_base 21: mod_base = OTHER; note = 2'-O-methyladenosine
tgcacaacacctccaccatca

SEQ ID NO: 3706 - RNA, 21 nt, synthetic construct
  source 1..21: mol_type = other RNA
  modified_base 1: mod_base = OTHER; note = 2'-O-methylguanosine-3'-phosphate
  modified_base 2: mod_base = OTHER; note = 2'-O-methylcytidine-3'-phosphate
  modified_base 3: mod_base = OTHER; note = 2'-O-methyladenosine-3'-phosphate
  modified_base 4: mod_base = OTHER; note = 2'-O-methylcytidine-3'-phosphate
  modified_base 5: mod_base = OTHER; note = 2'-O-methyladenosine-3'-phosphate
  modified_base 6: mod_base = OTHER; note = 2'-O-methyladenosine-3'-phosphate
  modified_base 7: mod_base = OTHER; note = 2'-deoxy-2'-fluorocytidine-3'-phosphate
  modified_base 8: mod_base = OTHER; note = 2'-O-methyladenosine-3'-phosphate
  modified_base 9: mod_base = OTHER; note = 2'-deoxy-2'-fluorocytidine-3'-phosphate
  modified_base 10: mod_base = OTHER; note = 2'-deoxy-2'-fluorocytidine-3'-phosphate
  modified_base 11: mod_base = OTHER; note = 2'-deoxy-2'-fluorouridine-3'-phosphate
  modified_base 12: mod_base = OTHER; note = 2'-O-methylcytidine-3'-phosphate
  modified_base 13: mod_base = OTHER; note = 2'-O-methylcytidine-3'-phosphate
  modified_base 14: mod_base = OTHER; note = 2'-O-methyladenosine-3'-phosphate
  modified_base 15: mod_base = OTHER; note = 2'-O-methylcytidine-3'-phosphate
  modified_base 16: mod_base = OTHER; note = 2'-O-methylcytidine-3'-phosphate
  modified_base 17: mod_base = OTHER; note = 2'-O-methyladenosine-3'-phosphate
  modified_base 18: mod_base = OTHER; note = 2'-O-methyluridine-3'-phosphate
  modified_base 19: mod_base = OTHER; note = 2'-O-methylcytidine-3'-phosphate
  modified_base 20: mod_base = OTHER; note = 2'-O-methyluridine-3'-phosphate
  modified_base 21: mod_base = OTHER; note = 2'-O-methyladenosine
gcacaacacctccaccatcta

SEQ ID NO: 3707 - RNA, 21 nt, synthetic construct
  source 1..21: mol_type = other RNA
  modified_base 1: mod_base = OTHER; note = 2'-O-methylcytidine-3'-phosphate
  modified_base 2: mod_base = OTHER; note = 2'-O-methyladenosine-3'-phosphate
  modified_base 3: mod_base = OTHER; note = 2'-O-methylcytidine-3'-phosphate
  modified_base 4: mod_base = OTHER; note = 2'-O-methyladenosine-3'-phosphate
  modified_base 5: mod_base = OTHER; note = 2'-O-methyladenosine-3'-phosphate
  modified_base 6: mod_base = OTHER; note = 2'-O-methylcytidine-3'-phosphate
  modified_base 7: mod_base = OTHER; note = 2'-deoxy-2'-fluoroadenosine-3'-phosphate
  modified_base 8: mod_base = OTHER; note = 2'-O-methylcytidine-3'-phosphate
  modified_base 9: mod_base = OTHER; note = 2'-deoxy-2'-fluorocytidine-3'-phosphate
  modified_base 10: mod_base = OTHER; note = 2'-deoxy-2'-fluorouridine-3'-phosphate
  modified_base 11: mod_base = OTHER; note = 2'-deoxy-2'-fluorocytidine-3'-phosphate
  modified_base 12: mod_base = OTHER; note = 2'-O-methylcytidine-3'-phosphate
  modified_base 13: mod_base = OTHER; note = 2'-O-methyladenosine-3'-phosphate
  modified_base 14: mod_base = OTHER; note = 2'-O-methylcytidine-3'-phosphate
  modified_base 15: mod_base = OTHER; note = 2'-O-methylcytidine-3'-phosphate
  modified_base 16: mod_base = OTHER; note = 2'-O-methyladenosine-3'-phosphate
  modified_base 17: mod_base = OTHER; note = 2'-O-methyluridine-3'-phosphate
  modified_base 18: mod_base = OTHER; note = 2'-O-methylcytidine-3'-phosphate
  modified_base 19: mod_base = OTHER; note = 2'-O-methyluridine-3'-phosphate
  modified_base 20: mod_base = OTHER; note = 2'-O-methyluridine-3'-phosphate
  modified_base 21: mod_base = OTHER; note = 2'-O-methyladenosine
cacaacacctccaccatctta

SEQ ID NO: 3708 - RNA, 21 nt, synthetic construct
  source 1..21: mol_type = other RNA
  modified_base 1: mod_base = OTHER; note = 2'-O-methyladenosine-3'-phosphate
  modified_base 2: mod_base = OTHER; note = 2'-O-methylcytidine-3'-phosphate
  modified_base 3: mod_base = OTHER; note = 2'-O-methyladenosine-3'-phosphate
  modified_base 4: mod_base = OTHER; note = 2'-O-methyladenosine-3'-phosphate
  modified_base 5: mod_base = OTHER; note = 2'-O-methylcytidine-3'-phosphate
  modified_base 6: mod_base = OTHER; note = 2'-O-methyladenosine-3'-phosphate
  modified_base 7: mod_base = OTHER; note = 2'-deoxy-2'-fluorocytidine-3'-phosphate
  modified_base 8: mod_base = OTHER; note = 2'-O-methylcytidine-3'-phosphate
  modified_base 9: mod_base = OTHER; note = 2'-deoxy-2'-fluorouridine-3'-phosphate
  modified_base 10: mod_base = OTHER; note = 2'-deoxy-2'-fluorocytidine-3'-phosphate
  modified_base 11: mod_base = OTHER; note = 2'-deoxy-2'-fluorocytidine-3'-phosphate
  modified_base 12: mod_base = OTHER; note = 2'-O-methyladenosine-3'-phosphate
  modified_base 13: mod_base = OTHER; note = 2'-O-methylcytidine-3'-phosphate
  modified_base 14: mod_base = OTHER; note = 2'-O-methylcytidine-3'-phosphate
  modified_base 15: mod_base = OTHER; note = 2'-O-methyladenosine-3'-phosphate
  modified_base 16: mod_base = OTHER; note = 2'-O-methyluridine-3'-phosphate
  modified_base 17: mod_base = OTHER; note = 2'-O-methylcytidine-3'-phosphate
  modified_base 18: mod_base = OTHER; note = 2'-O-methyluridine-3'-phosphate
  modified_base 19: mod_base = OTHER; note = 2'-O-methyluridine-3'-phosphate
  modified_base 20: mod_base = OTHER; note = 2'-O-methylcytidine-3'-phosphate
  modified_base 21: mod_base = OTHER; note = 2'-O-methyladenosine
acaacacctccaccatcttca

SEQ ID NO: 3709 - RNA, 21 nt, synthetic construct
  source 1..21: mol_type = other RNA
  modified_base 1: mod_base = OTHER; note = 2'-O-methylcytidine-3'-phosphate
  modified_base 2: mod_base = OTHER; note = 2'-O-methyladenosine-3'-phosphate
  modified_base 3: mod_base = OTHER; note = 2'-O-methyladenosine-3'-phosphate
  modified_base 4: mod_base = OTHER; note = 2'-O-methylcytidine-3'-phosphate
  modified_base 5: mod_base = OTHER; note = 2'-O-methyladenosine-3'-phosphate
  modified_base 6: mod_base = OTHER; note = 2'-O-methylcytidine-3'-phosphate
  modified_base 7: mod_base = OTHER; note = 2'-deoxy-2'-fluorocytidine-3'-phosphate
  modified_base 8: mod_base = OTHER; note = 2'-O-methyluridine-3'-phosphate
  modified_base 9: mod_base = OTHER; note = 2'-deoxy-2'-fluorocytidine-3'-phosphate
  modified_base 10: mod_base = OTHER; note = 2'-deoxy-2'-fluorocytidine-3'-phosphate
  modified_base 11: mod_base = OTHER; note = 2'-deoxy-2'-fluoroadenosine-3'-phosphate
  modified_base 12: mod_base = OTHER; note = 2'-O-methylcytidine-3'-phosphate
  modified_base 13: mod_base = OTHER; note = 2'-O-methylcytidine-3'-phosphate
  modified_base 14: mod_base = OTHER; note = 2'-O-methyladenosine-3'-phosphate
  modified_base 15: mod_base = OTHER; note = 2'-O-methyluridine-3'-phosphate
  modified_base 16: mod_base = OTHER; note = 2'-O-methylcytidine-3'-phosphate
  modified_base 17: mod_base = OTHER; note = 2'-O-methyluridine-3'-phosphate
  modified_base 18: mod_base = OTHER; note = 2'-O-methyluridine-3'-phosphate
  modified_base 19: mod_base = OTHER; note = 2'-O-methylcytidine-3'-phosphate
  modified_base 20: mod_base = OTHER; note = 2'-O-methyluridine-3'-phosphate
  modified_base 21: mod_base = OTHER; note = 2'-O-methyladenosine
caacacctccaccatcttcta

SEQ ID NO: 3710 - RNA, 21 nt, synthetic construct
  source 1..21: mol_type = other RNA
  modified_base 1: mod_base = OTHER; note = 2'-O-methylcytidine-3'-phosphate
  modified_base 2: mod_base = OTHER; note = 2'-O-methyladenosine-3'-phosphate
  modified_base 3: mod_base = OTHER; note = 2'-O-methylcytidine-3'-phosphate
  modified_base 4: mod_base = OTHER; note = 2'-O-methylcytidine-3'-phosphate
  modified_base 5: mod_base = OTHER; note = 2'-O-methyluridine-3'-phosphate
  modified_base 6: mod_base = OTHER; note = 2'-O-methylcytidine-3'-phosphate
  modified_base 7: mod_base = OTHER; note = 2'-deoxy-2'-fluorocytidine-3'-phosphate
  modified_base 8: mod_base = OTHER; note = 2'-O-methyladenosine-3'-phosphate
  modified_base 9: mod_base = OTHER; note = 2'-deoxy-2'-fluorocytidine-3'-phosphate
  modified_base 10: mod_base = OTHER; note = 2'-deoxy-2'-fluorocytidine-3'-phosphate
  modified_base 11: mod_base = OTHER; note = 2'-deoxy-2'-fluoroadenosine-3'-phosphate
  modified_base 12: mod_base = OTHER; note = 2'-O-methyluridine-3'-phosphate
  modified_base 13: mod_base = OTHER; note = 2'-O-methylcytidine-3'-phosphate
  modified_base 14: mod_base = OTHER; note = 2'-O-methyluridine-3'-phosphate
  modified_base 15: mod_base = OTHER; note = 2'-O-methyluridine-3'-phosphate
  modified_base 16: mod_base = OTHER; note = 2'-O-methylcytidine-3'-phosphate
  modified_base 17: mod_base = OTHER; note = 2'-O-methyluridine-3'-phosphate
  modified_base 18: mod_base = OTHER; note = 2'-O-methylguanosine-3'-phosphate
  modified_base 19: mod_base = OTHER; note = 2'-O-methylguanosine-3'-phosphate
  modified_base 20: mod_base = OTHER; note = 2'-O-methyluridine-3'-phosphate
  modified_base 21: mod_base = OTHER; note = 2'-O-methyladenosine
cacctccaccatcttctggta

SEQ ID NO: 3711 - RNA, 21 nt, synthetic construct
  source 1..21: mol_type = other RNA
  modified_base 1: mod_base = OTHER; note = 2'-O-methyladenosine-3'-phosphate
  modified_base 2: mod_base = OTHER; note = 2'-O-methylcytidine-3'-phosphate
  modified_base 3: mod_base = OTHER; note = 2'-O-methylcytidine-3'-phosphate
  modified_base 4: mod_base = OTHER; note = 2'-O-methyluridine-3'-phosphate
  modified_base 5: mod_base = OTHER; note = 2'-O-methylcytidine-3'-phosphate
  modified_base 6: mod_base = OTHER; note = 2'-O-methylcytidine-3'-phosphate
  modified_base 7: mod_base = OTHER; note = 2'-deoxy-2'-fluoroadenosine-3'-phosphate
  modified_base 8: mod_base = OTHER; note = 2'-O-methylcytidine-3'-phosphate
  modified_base 9: mod_base = OTHER; note = 2'-deoxy-2'-fluorocytidine-3'-phosphate
  modified_base 10: mod_base = OTHER; note = 2'-deoxy-2'-fluoroadenosine-3'-phosphate
  modified_base 11: mod_base = OTHER; note = 2'-deoxy-2'-fluorouridine-3'-phosphate
  modified_base 12: mod_base = OTHER; note = 2'-O-methylcytidine-3'-phosphate
  modified_base 13: mod_base = OTHER; note = 2'-O-methyluridine-3'-phosphate
  modified_base 14: mod_base = OTHER; note = 2'-O-methyluridine-3'-phosphate
  modified_base 15: mod_base = OTHER; note = 2'-O-methylcytidine-3'-phosphate
  modified_base 16: mod_base = OTHER; note = 2'-O-methyluridine-3'-phosphate
  modified_base 17: mod_base = OTHER; note = 2'-O-methylguanosine-3'-phosphate
  modified_base 18: mod_base = OTHER; note = 2'-O-methylguanosine-3'-phosphate
  modified_base 19: mod_base = OTHER; note = 2'-O-methyluridine-3'-phosphate
  modified_base 20: mod_base = OTHER; note = 2'-O-methylcytidine-3'-phosphate
  modified_base 21: mod_base = OTHER; note = 2'-O-methyladenosine
acctccaccatcttctggtca

SEQ ID NO: 3712 - RNA, 21 nt, synthetic construct
  source 1..21: mol_type = other RNA
  modified_base 1: mod_base = OTHER; note = 2'-O-methylcytidine-3'-phosphate
  modified_base 2: mod_base = OTHER; note = 2'-O-methylcytidine-3'-phosphate
  modified_base 3: mod_base = OTHER; note = 2'-O-methyluridine-3'-phosphate
  modified_base 4: mod_base = OTHER; note = 2'-O-methylcytidine-3'-phosphate
  modified_base 5: mod_base = OTHER; note = 2'-O-methylcytidine-3'-phosphate
  modified_base 6: mod_base = OTHER; note = 2'-O-methyladenosine-3'-phosphate
  modified_base 7: mod_base = OTHER; note = 2'-deoxy-2'-fluorocytidine-3'-phosphate
  modified_base 8: mod_base = OTHER; note = 2'-O-methylcytidine-3'-phosphate
  modified_base 9: mod_base = OTHER; note = 2'-deoxy-2'-fluoroadenosine-3'-phosphate
  modified_base 10: mod_base = OTHER; note = 2'-deoxy-2'-fluorouridine-3'-phosphate
  modified_base 11: mod_base = OTHER; note = 2'-deoxy-2'-fluorocytidine-3'-phosphate
  modified_base 12: mod_base = OTHER; note = 2'-O-methyluridine-3'-phosphate
  modified_base 13: mod_base = OTHER; note = 2'-O-methyluridine-3'-phosphate
  modified_base 14: mod_base = OTHER; note = 2'-O-methylcytidine-3'-phosphate
  modified_base 15: mod_base = OTHER; note = 2'-O-methyluridine-3'-phosphate
  modified_base 16: mod_base = OTHER; note = 2'-O-methylguanosine-3'-phosphate
  modified_base 17: mod_base = OTHER; note = 2'-O-methylguanosine-3'-phosphate
  modified_base 18: mod_base = OTHER; note = 2'-O-methyluridine-3'-phosphate
  modified_base 19: mod_base = OTHER; note = 2'-O-methylcytidine-3'-phosphate
  modified_base 20: mod_base = OTHER; note = 2'-O-methylcytidine-3'-phosphate
  modified_base 21: mod_base = OTHER; note = 2'-O-methyladenosine
cctccaccatcttctggtcca

SEQ ID NO: 3713 - RNA, 21 nt, synthetic construct
  source 1..21: mol_type = other RNA
  modified_base 1: mod_base = OTHER; note = 2'-O-methylcytidine-3'-phosphate
  modified_base 2: mod_base = OTHER; note = 2'-O-methyluridine-3'-phosphate
  modified_base 3: mod_base = OTHER; note = 2'-O-methylcytidine-3'-phosphate
  modified_base 4: mod_base = OTHER; note = 2'-O-methylcytidine-3'-phosphate
  modified_base 5: mod_base = OTHER; note = 2'-O-methyladenosine-3'-phosphate
  modified_base 6: mod_base = OTHER; note = 2'-O-methylcytidine-3'-phosphate
  modified_base 7: mod_base = OTHER; note = 2'-deoxy-2'-fluorocytidine-3'-phosphate
  modified_base 8: mod_base = OTHER; note = 2'-O-methyladenosine-3'-phosphate
  modified_base 9: mod_base = OTHER; note = 2'-deoxy-2'-fluorouridine-3'-phosphate
  modified_base 10: mod_base = OTHER; note = 2'-deoxy-2'-fluorocytidine-3'-phosphate
  modified_base 11: mod_base = OTHER; note = 2'-deoxy-2'-fluorouridine-3'-phosphate
  modified_base 12: mod_base = OTHER; note = 2'-O-methyluridine-3'-phosphate
  modified_base 13: mod_base = OTHER; note = 2'-O-methylcytidine-3'-phosphate
  modified_base 14: mod_base = OTHER; note = 2'-O-methyluridine-3'-phosphate
  modified_base 15: mod_base = OTHER; note = 2'-O-methylguanosine-3'-phosphate
  modified_base 16: mod_base = OTHER; note = 2'-O-methylguanosine-3'-phosphate
  modified_base 17: mod_base = OTHER; note = 2'-O-methyluridine-3'-phosphate
  modified_base 18: mod_base = OTHER; note = 2'-O-methylcytidine-3'-phosphate
  modified_base 19: mod_base = OTHER; note = 2'-O-methylcytidine-3'-phosphate
  modified_base 20: mod_base = OTHER; note = 2'-O-methylcytidine-3'-phosphate
  modified_base 21: mod_base = OTHER; note = 2'-O-methyladenosine
ctccaccatcttctggtccca

SEQ ID NO: 3714 - RNA, 21 nt, synthetic construct
  source 1..21: mol_type = other RNA
  modified_base 1: mod_base = OTHER; note = 2'-O-methyluridine-3'-phosphate
  modified_base 2: mod_base = OTHER; note = 2'-O-methylcytidine-3'-phosphate
  modified_base 3: mod_base = OTHER; note = 2'-O-methylcytidine-3'-phosphate
  modified_base 4: mod_base = OTHER; note = 2'-O-methyladenosine-3'-phosphate
  modified_base 5: mod_base = OTHER; note = 2'-O-methylcytidine-3'-phosphate
  modified_base 6: mod_base = OTHER; note = 2'-O-methylcytidine-3'-phosphate
  modified_base 7: mod_base = OTHER; note = 2'-deoxy-2'-fluoroadenosine-3'-phosphate
  modified_base 8: mod_base = OTHER; note = 2'-O-methyluridine-3'-phosphate
  modified_base 9: mod_base = OTHER; note = 2'-deoxy-2'-fluorocytidine-3'-phosphate
  modified_base 10: mod_base = OTHER; note = 2'-deoxy-2'-fluorouridine-3'-phosphate
  modified_base 11: mod_base = OTHER; note = 2'-deoxy-2'-fluorouridine-3'-phosphate
  modified_base 12: mod_base = OTHER; note = 2'-O-methylcytidine-3'-phosphate
  modified_base 13: mod_base = OTHER; note = 2'-O-methyluridine-3'-phosphate
  modified_base 14: mod_base = OTHER; note = 2'-O-methylguanosine-3'-phosphate
  modified_base 15: mod_base = OTHER; note = 2'-O-methylguanosine-3'-phosphate
  modified_base 16: mod_base = OTHER; note = 2'-O-methyluridine-3'-phosphate
  modified_base 17: mod_base = OTHER; note = 2'-O-methylcytidine-3'-phosphate
  modified_base 18: mod_base = OTHER; note = 2'-O-methylcytidine-3'-phosphate
  modified_base 19: mod_base = OTHER; note = 2'-O-methylcytidine-3'-phosphate
  modified_base 20: mod_base = OTHER; note = 2'-O-methyladenosine-3'-phosphate
  modified_base 21: mod_base = OTHER; note = 2'-O-methyladenosine
tccaccatcttctggtcccaa

SEQ ID NO: 3715 - RNA, 21 nt, synthetic construct
  source 1..21: mol_type = other RNA
  modified_base 1: mod_base = OTHER; note = 2'-O-methylcytidine-3'-phosphate
  modified_base 2: mod_base = OTHER; note = 2'-O-methylcytidine-3'-phosphate
  modified_base 3: mod_base = OTHER; note = 2'-O-methyladenosine-3'-phosphate
  modified_base 4: mod_base = OTHER; note = 2'-O-methylcytidine-3'-phosphate
  modified_base 5: mod_base = OTHER; note = 2'-O-methylcytidine-3'-phosphate
  modified_base 6: mod_base = OTHER; note = 2'-O-methyladenosine-3'-phosphate
  modified_base 7: mod_base = OTHER; note = 2'-deoxy-2'-fluorouridine-3'-phosphate
  modified_base 8: mod_base = OTHER; note = 2'-O-methylcytidine-3'-phosphate
  modified_base 9: mod_base = OTHER; note = 2'-deoxy-2'-fluorouridine-3'-phosphate
  modified_base 10: mod_base = OTHER; note = 2'-deoxy-2'-fluorouridine-3'-phosphate
  modified_base 11: mod_base = OTHER; note = 2'-deoxy-2'-fluorocytidine-3'-phosphate
  modified_base 12: mod_base = OTHER; note = 2'-O-methyluridine-3'-phosphate
  modified_base 13: mod_base = OTHER; note = 2'-O-methylguanosine-3'-phosphate
  modified_base 14: mod_base = OTHER; note = 2'-O-methylguanosine-3'-phosphate
  modified_base 15: mod_base = OTHER; note = 2'-O-methyluridine-3'-phosphate
  modified_base 16: mod_base = OTHER; note = 2'-O-methylcytidine-3'-phosphate
  modified_base 17: mod_base = OTHER; note = 2'-O-methylcytidine-3'-phosphate
  modified_base 18: mod_base = OTHER; note = 2'-O-methylcytidine-3'-phosphate
  modified_base 19: mod_base = OTHER; note = 2'-O-methyladenosine-3'-phosphate
  modified_base 20: mod_base = OTHER; note = 2'-O-methylcytidine-3'-phosphate
  modified_base 21: mod_base = OTHER; note = 2'-O-methyladenosine
ccaccatcttctggtcccaca

SEQ ID NO: 3716 - RNA, 21 nt, synthetic construct
  source 1..21: mol_type = other RNA
  modified_base 1: mod_base = OTHER; note = 2'-O-methylcytidine-3'-phosphate
  modified_base 2: mod_base = OTHER; note = 2'-O-methyladenosine-3'-phosphate
  modified_base 3: mod_base = OTHER; note = 2'-O-methylcytidine-3'-phosphate
  modified_base 4: mod_base = OTHER; note = 2'-O-methylcytidine-3'-phosphate
  modified_base 5: mod_base = OTHER; note = 2'-O-methyladenosine-3'-phosphate
  modified_base 6: mod_base = OTHER; note = 2'-O-methyluridine-3'-phosphate
  modified_base 7: mod_base = OTHER; note = 2'-deoxy-2'-fluorocytidine-3'-phosphate
  modified_base 8: mod_base = OTHER; note = 2'-O-methyluridine-3'-phosphate
  modified_base 9: mod_base = OTHER; note = 2'-deoxy-2'-fluorouridine-3'-phosphate
  modified_base 10: mod_base = OTHER; note = 2'-deoxy-2'-fluorocytidine-3'-phosphate
  modified_base 11: mod_base = OTHER; note = 2'-deoxy-2'-fluorouridine-3'-phosphate
  modified_base 12: mod_base = OTHER; note = 2'-O-methylguanosine-3'-phosphate
  modified_base 13: mod_base = OTHER; note = 2'-O-methylguanosine-3'-phosphate
  modified_base 14: mod_base = OTHER; note = 2'-O-methyluridine-3'-phosphate
  modified_base 15: mod_base = OTHER; note = 2'-O-methylcytidine-3'-phosphate
  modified_base 16: mod_base = OTHER; note = 2'-O-methylcytidine-3'-phosphate
  modified_base 17: mod_base = OTHER; note = 2'-O-methylcytidine-3'-phosphate
  modified_base 18: mod_base = OTHER; note = 2'-O-methyladenosine-3'-phosphate
  modified_base 19: mod_base = OTHER; note = 2'-O-methylcytidine-3'-phosphate
  modified_base 20: mod_base = OTHER; note = 2'-O-methylcytidine-3'-phosphate
  modified_base 21: mod_base = OTHER; note = 2'-O-methyladenosine
caccatcttctggtcccacca

SEQ ID NO: 3717 - RNA, 21 nt, synthetic construct
  source 1..21: mol_type = other RNA
  modified_base 1: mod_base = OTHER; note = 2'-O-methylcytidine-3'-phosphate
  modified_base 2: mod_base = OTHER; note = 2'-O-methyladenosine-3'-phosphate
  modified_base 3: mod_base = OTHER; note = 2'-O-methyluridine-3'-phosphate
  modified_base 4: mod_base = OTHER; note = 2'-O-methylcytidine-3'-phosphate
  modified_base 5: mod_base = OTHER; note = 2'-O-methyluridine-3'-phosphate
  modified_base 6: mod_base = OTHER; note = 2'-O-methyluridine-3'-phosphate
  modified_base 7: mod_base = OTHER; note = 2'-deoxy-2'-fluorocytidine-3'-phosphate
  modified_base 8: mod_base = OTHER; note = 2'-O-methyluridine-3'-phosphate
  modified_base 9: mod_base = OTHER; note = 2'-deoxy-2'-fluoroguanosine-3'-phosphate
  modified_base 10: mod_base = OTHER; note = 2'-deoxy-2'-fluoroguanosine-3'-phosphate
  modified_base 11: mod_base = OTHER; note = 2'-deoxy-2'-fluorouridine-3'-phosphate
  modified_base 12: mod_base = OTHER; note = 2'-O-methylcytidine-3'-phosphate
  modified_base 13: mod_base = OTHER; note = 2'-O-methylcytidine-3'-phosphate
  modified_base 14: mod_base = OTHER; note = 2'-O-methylcytidine-3'-phosphate
  modified_base 15: mod_base = OTHER; note = 2'-O-methyladenosine-3'-phosphate
  modified_base 16: mod_base = OTHER; note = 2'-O-methylcytidine-3'-phosphate
  modified_base 17: mod_base = OTHER; note = 2'-O-methylcytidine-3'-phosphate
  modified_base 18: mod_base = OTHER; note = 2'-O-methyluridine-3'-phosphate
  modified_base 19: mod_base = OTHER; note = 2'-O-methyladenosine-3'-phosphate
  modified_base 20: mod_base = OTHER; note = 2'-O-methylcytidine-3'-phosphate
  modified_base 21: mod_base = OTHER; note = 2'-O-methyladenosine
catcttctggtcccacctaca

SEQ ID NO: 3718 - RNA, 21 nt, synthetic construct
  source 1..21: mol_type = other RNA
  modified_base 1: mod_base = OTHER; note = 2'-O-methyluridine-3'-phosphate
  modified_base 2: mod_base = OTHER; note = 2'-O-methyluridine-3'-phosphate
  modified_base 3: mod_base = OTHER; note = 2'-O-methylcytidine-3'-phosphate
  modified_base 4: mod_base = OTHER; note = 2'-O-methyluridine-3'-phosphate
  modified_base 5: mod_base = OTHER; note = 2'-O-methylguanosine-3'-phosphate
  modified_base 6: mod_base = OTHER; note = 2'-O-methylguanosine-3'-phosphate
  modified_base 7: mod_base = OTHER; note = 2'-deoxy-2'-fluorouridine-3'-phosphate
  modified_base 8: mod_base = OTHER; note = 2'-O-methylcytidine-3'-phosphate
  modified_base 9: mod_base = OTHER; note = 2'-deoxy-2'-fluorocytidine-3'-phosphate
  modified_base 10: mod_base = OTHER; note = 2'-deoxy-2'-fluorocytidine-3'-phosphate
  modified_base 11: mod_base = OTHER; note = 2'-deoxy-2'-fluoroadenosine-3'-phosphate
  modified_base 12: mod_base = OTHER; note = 2'-O-methylcytidine-3'-phosphate
  modified_base 13: mod_base = OTHER; note = 2'-O-methylcytidine-3'-phosphate
  modified_base 14: mod_base = OTHER; note = 2'-O-methyluridine-3'-phosphate
  modified_base 15: mod_base = OTHER; note = 2'-O-methyladenosine-3'-phosphate
  modified_base 16: mod_base = OTHER; note = 2'-O-methylcytidine-3'-phosphate
  modified_base 17: mod_base = OTHER; note = 2'-O-methylcytidine-3'-phosphate
  modified_base 18: mod_base = OTHER; note = 2'-O-methyladenosine-3'-phosphate
  modified_base 19: mod_base = OTHER; note = 2'-O-methylguanosine-3'-phosphate
  modified_base 20: mod_base = OTHER; note = 2'-O-methyluridine-3'-phosphate
  modified_base 21: mod_base = OTHER; note = 2'-O-methyladenosine
ttctggtcccacctaccagta

SEQ ID NO: 3719 - RNA, 21 nt, synthetic construct
  source 1..21: mol_type = other RNA
  modified_base 1: mod_base = OTHER; note = 2'-O-methyluridine-3'-phosphate
  modified_base 2: mod_base = OTHER; note = 2'-O-methylcytidine-3'-phosphate
  modified_base 3: mod_base = OTHER; note = 2'-O-methyluridine-3'-phosphate
  modified_base 4: mod_base = OTHER; note = 2'-O-methylguanosine-3'-phosphate
  modified_base 5: mod_base = OTHER; note = 2'-O-methylguanosine-3'-phosphate
  modified_base 6: mod_base = OTHER; note = 2'-O-methyluridine-3'-phosphate
  modified_base 7: mod_base = OTHER; note = 2'-deoxy-2'-fluorocytidine-3'-phosphate
  modified_base 8: mod_base = OTHER; note = 2'-O-methylcytidine-3'-phosphate
  modified_base 9: mod_base = OTHER; note = 2'-deoxy-2'-fluorocytidine-3'-phosphate
  modified_base 10: mod_base = OTHER; note = 2'-deoxy-2'-fluoroadenosine-3'-phosphate
  modified_base 11: mod_base = OTHER; note = 2'-deoxy-2'-fluorocytidine-3'-phosphate
  modified_base 12: mod_base = OTHER; note = 2'-O-methylcytidine-3'-phosphate
  modified_base 13: mod_base = OTHER; note = 2'-O-methyluridine-3'-phosphate
  modified_base 14: mod_base = OTHER; note = 2'-O-methyladenosine-3'-phosphate
  modified_base 15: mod_base = OTHER; note = 2'-O-methylcytidine-3'-phosphate
  modified_base 16: mod_base = OTHER; note = 2'-O-methylcytidine-3'-phosphate
  modified_base 17: mod_base = OTHER; note = 2'-O-methyladenosine-3'-phosphate
  modified_base 18: mod_base = OTHER; note = 2'-O-methylguanosine-3'-phosphate
  modified_base 19: mod_base = OTHER; note = 2'-O-methyluridine-3'-phosphate
  modified_base 20: mod_base = OTHER; note = 2'-O-methylguanosine-3'-phosphate
  modified_base 21: mod_base = OTHER; note = 2'-O-methyladenosine
tctggtcccacctaccagtga

SEQ ID NO: 3720 - RNA, 21 nt, synthetic construct
  source 1..21: mol_type = other RNA
  modified_base 1: mod_base = OTHER; note = 2'-O-methylcytidine-3'-phosphate
  modified_base 2: mod_base = OTHER; note = 2'-O-methyluridine-3'-phosphate
  modified_base 3: mod_base = OTHER; note = 2'-O-methylguanosine-3'-phosphate
  modified_base 4: mod_base = OTHER; note = 2'-O-methylguanosine-3'-phosphate
  modified_base 5: mod_base = OTHER; note = 2'-O-methyluridine-3'-phosphate
  modified_base 6: mod_base = OTHER; note = 2'-O-methylcytidine-3'-phosphate
  modified_base 7: mod_base = OTHER; note = 2'-deoxy-2'-fluorocytidine-3'-phosphate
  modified_base 8: mod_base = OTHER; note = 2'-O-methylcytidine-3'-phosphate
  modified_base 9: mod_base = OTHER; note = 2'-deoxy-2'-fluoroadenosine-3'-phosphate
  modified_base 10: mod_base = OTHER; note = 2'-deoxy-2'-fluorocytidine-3'-phosphate
  modified_base 11: mod_base = OTHER; note = 2'-deoxy-2'-fluorocytidine-3'-phosphate
  modified_base 12: mod_base = OTHER; note = 2'-O-methyluridine-3'-phosphate
  modified_base 13: mod_base = OTHER; note = 2'-O-methyladenosine-3'-phosphate
  modified_base 14: mod_base = OTHER; note = 2'-O-methylcytidine-3'-phosphate
  modified_base 15: mod_base = OTHER; note = 2'-O-methylcytidine-3'-phosphate
  modified_base 16: mod_base = OTHER; note = 2'-O-methyladenosine-3'-phosphate
  modified_base 17: mod_base = OTHER; note = 2'-O-methylguanosine-3'-phosphate
  modified_base 18: mod_base = OTHER; note = 2'-O-methyluridine-3'-phosphate
  modified_base 19: mod_base = OTHER; note = 2'-O-methylguanosine-3'-phosphate
  modified_base 20: mod_base = OTHER; note = 2'-O-methyluridine-3'-phosphate
  modified_base 21: mod_base = OTHER; note = 2'-O-methyladenosine
ctggtcccacctaccagtgta

SEQ ID NO: 3721 - RNA, 21 nt, synthetic construct
  source 1..21: mol_type = other RNA
  modified_base 1: mod_base = OTHER; note = 2'-O-methyluridine-3'-phosphate
  modified_base 2: mod_base = OTHER; note = 2'-O-methylguanosine-3'-phosphate
  modified_base 3: mod_base = OTHER; note = 2'-O-methylguanosine-3'-phosphate
  modified_base 4: mod_base = OTHER; note = 2'-O-methyluridine-3'-phosphate
  modified_base 5: mod_base = OTHER; note = 2'-O-methylcytidine-3'-phosphate
  modified_base 6: mod_base = OTHER; note = 2'-O-methylcytidine-3'-phosphate
  modified_base 7: mod_base = OTHER; note = 2'-deoxy-2'-fluorocytidine-3'-phosphate
  modified_base 8: mod_base = OTHER; note = 2'-O-methyladenosine-3'-phosphate
  modified_base 9: mod_base = OTHER; note = 2'-deoxy-2'-fluorocytidine-3'-phosphate
  modified_base 10: mod_base = OTHER; note = 2'-deoxy-2'-fluorocytidine-3'-phosphate
  modified_base 11: mod_base = OTHER; note = 2'-deoxy-2'-fluorouridine-3'-phosphate
  modified_base 12: mod_base = OTHER; note = 2'-O-methyladenosine-3'-phosphate
  modified_base 13: mod_base = OTHER; note = 2'-O-methylcytidine-3'-phosphate
  modified_base 14: mod_base = OTHER; note = 2'-O-methylcytidine-3'-phosphate
  modified_base 15: mod_base = OTHER; note = 2'-O-methyladenosine-3'-phosphate
  modified_base 16: mod_base = OTHER; note = 2'-O-methylguanosine-3'-phosphate
  modified_base 17: mod_base = OTHER; note = 2'-O-methyluridine-3'-phosphate
  modified_base 18: mod_base = OTHER; note = 2'-O-methylguanosine-3'-phosphate
  modified_base 19: mod_base = OTHER; note = 2'-O-methyluridine-3'-phosphate
  modified_base 20: mod_base = OTHER; note = 2'-O-methylcytidine-3'-phosphate
  modified_base 21: mod_base = OTHER; note = 2'-O-methyladenosine
tggtcccacctaccagtgtca

SEQ ID NO: 3722 - RNA, 21 nt, synthetic construct
  source 1..21: mol_type = other RNA
  modified_base 1: mod_base = OTHER; note = 2'-O-methylcytidine-3'-phosphate
  modified_base 2: mod_base = OTHER; note = 2'-O-methylcytidine-3'-phosphate
  modified_base 3: mod_base = OTHER; note = 2'-O-methylcytidine-3'-phosphate
  modified_base 4: mod_base = OTHER; note = 2'-O-methyladenosine-3'-phosphate
  modified_base 5: mod_base = OTHER; note = 2'-O-methylcytidine-3'-phosphate
  modified_base 6: mod_base = OTHER; note = 2'-O-methylcytidine-3'-phosphate
  modified_base 7: mod_base = OTHER; note = 2'-deoxy-2'-fluorouridine-3'-phosphate
  modified_base 8: mod_base = OTHER; note = 2'-O-methyladenosine-3'-phosphate
  modified_base 9: mod_base = OTHER; note = 2'-deoxy-2'-fluorocytidine-3'-phosphate
  modified_base 10: mod_base = OTHER; note = 2'-deoxy-2'-fluorocytidine-3'-phosphate
  modified_base 11: mod_base = OTHER; note = 2'-deoxy-2'-fluoroadenosine-3'-phosphate
  modified_base 12: mod_base = OTHER; note = 2'-O-methylguanosine-3'-phosphate
  modified_base 13: mod_base = OTHER; note = 2'-O-methyluridine-3'-phosphate
  modified_base 14: mod_base = OTHER; note = 2'-O-methylguanosine-3'-phosphate
  modified_base 15: mod_base = OTHER; note = 2'-O-methyluridine-3'-phosphate
  modified_base 16: mod_base = OTHER; note = 2'-O-methylcytidine-3'-phosphate
  modified_base 17: mod_base = OTHER; note = 2'-O-methyluridine-3'-phosphate
  modified_base 18: mod_base = OTHER; note = 2'-O-methylguanosine-3'-phosphate
  modified_base 19: mod_base = OTHER; note = 2'-O-methyladenosine-3'-phosphate
  modified_base 20: mod_base = OTHER; note = 2'-O-methyladenosine-3'-phosphate
  modified_base 21: mod_base = OTHER; note = 2'-O-methyladenosine
cccacctaccagtgtctgaaa

SEQ ID NO: 3723 - RNA, 21 nt, synthetic construct
  source 1..21: mol_type = other RNA
  modified_base 1: mod_base = OTHER; note = 2'-O-methylcytidine-3'-phosphate
  modified_base 2: mod_base = OTHER; note = 2'-O-methylcytidine-3'-phosphate
  modified_base 3: mod_base = OTHER; note = 2'-O-methyladenosine-3'-phosphate
  modified_base 4: mod_base = OTHER; note = 2'-O-methylcytidine-3'-phosphate
  modified_base 5: mod_base = OTHER; note = 2'-O-methylcytidine-3'-phosphate
  modified_base 6: mod_base = OTHER; note = 2'-O-methyluridine-3'-phosphate
  modified_base 7: mod_base = OTHER; note = 2'-deoxy-2'-fluoroadenosine-3'-phosphate
  modified_base 8: mod_base = OTHER; note = 2'-O-methylcytidine-3'-phosphate
  modified_base 9: mod_base = OTHER; note = 2'-deoxy-2'-fluorocytidine-3'-phosphate
  modified_base 10: mod_base = OTHER; note = 2'-deoxy-2'-fluoroadenosine-3'-phosphate
  modified_base 11: mod_base = OTHER; note = 2'-deoxy-2'-fluoroguanosine-3'-phosphate
  modified_base 12: mod_base = OTHER; note = 2'-O-methyluridine-3'-phosphate
  modified_base 13: mod_base = OTHER; note = 2'-O-methylguanosine-3'-phosphate
  modified_base 14: mod_base = OTHER; note = 2'-O-methyluridine-3'-phosphate
  modified_base 15: mod_base = OTHER; note = 2'-O-methylcytidine-3'-phosphate
  modified_base 16: mod_base = OTHER; note = 2'-O-methyluridine-3'-phosphate
  modified_base 17: mod_base = OTHER; note = 2'-O-methylguanosine-3'-phosphate
  modified_base 18: mod_base = OTHER; note = 2'-O-methyladenosine-3'-phosphate
  modified_base 19: mod_base = OTHER; note = 2'-O-methyladenosine-3'-phosphate
  modified_base 20: mod_base = OTHER; note = 2'-O-methylguanosine-3'-phosphate
  modified_base 21: mod_base = OTHER; note = 2'-O-methyladenosine
ccacctaccagtgtctgaaga

SEQ ID NO: 3724 - RNA, 21 nt, synthetic construct
  source 1..21: mol_type = other RNA
  modified_base 1: mod_base = OTHER; note = 2'-O-methyladenosine-3'-phosphate
  modified_base 2: mod_base = OTHER; note = 2'-O-methylcytidine-3'-phosphate
  modified_base 3: mod_base = OTHER; note = 2'-O-methylcytidine-3'-phosphate
  modified_base 4: mod_base = OTHER; note = 2'-O-methyluridine-3'-phosphate
  modified_base 5: mod_base = OTHER; note = 2'-O-methyladenosine-3'-phosphate
  modified_base 6: mod_base = OTHER; note = 2'-O-methylcytidine-3'-phosphate
  modified_base 7: mod_base = OTHER; note = 2'-deoxy-2'-fluorocytidine-3'-phosphate
  modified_base 8: mod_base = OTHER; note = 2'-O-methyladenosine-3'-phosphate
  modified_base 9: mod_base = OTHER; note = 2'-deoxy-2'-fluoroguanosine-3'-phosphate
  modified_base 10: mod_base = OTHER; note = 2'-deoxy-2'-fluorouridine-3'-phosphate
  modified_base 11: mod_base = OTHER; note = 2'-deoxy-2'-fluoroguanosine-3'-phosphate
  modified_base 12: mod_base = OTHER; note = 2'-O-methyluridine-3'-phosphate
  modified_base 13: mod_base = OTHER; note = 2'-O-methylcytidine-3'-phosphate
  modified_base 14: mod_base = OTHER; note = 2'-O-methyluridine-3'-phosphate
  modified_base 15: mod_base = OTHER; note = 2'-O-methylguanosine-3'-phosphate
  modified_base 16: mod_base = OTHER; note = 2'-O-methyladenosine-3'-phosphate
  modified_base 17: mod_base = OTHER; note = 2'-O-methyladenosine-3'-phosphate
  modified_base 18: mod_base = OTHER; note = 2'-O-methylguanosine-3'-phosphate
  modified_base 19: mod_base = OTHER; note = 2'-O-methylguanosine-3'-phosphate
  modified_base 20: mod_base = OTHER; note = 2'-O-methylguanosine-3'-phosphate
  modified_base 21: mod_base = OTHER; note = 2'-O-methyladenosine
acctaccagtgtctgaaggga

SEQ ID NO: 3725 - RNA, 21 nt, synthetic construct
  source 1..21: mol_type = other RNA
  modified_base 1: mod_base = OTHER; note = 2'-O-methylcytidine-3'-phosphate
  modified_base 2: mod_base = OTHER; note = 2'-O-methylcytidine-3'-phosphate
  modified_base 3: mod_base = OTHER; note = 2'-O-methyluridine-3'-phosphate
  modified_base 4: mod_base = OTHER; note = 2'-O-methyladenosine-3'-phosphate
  modified_base 5: mod_base = OTHER; note = 2'-O-methylcytidine-3'-phosphate
  modified_base 6: mod_base = OTHER; note = 2'-O-methylcytidine-3'-phosphate
  modified_base 7: mod_base = OTHER; note = 2'-deoxy-2'-fluoroadenosine-3'-phosphate
  modified_base 8: mod_base = OTHER; note = 2'-O-methylguanosine-3'-phosphate
  modified_base 9: mod_base = OTHER; note = 2'-deoxy-2'-fluorouridine-3'-phosphate
  modified_base 10: mod_base = OTHER; note = 2'-deoxy-2'-fluoroguanosine-3'-phosphate
  modified_base 11: mod_base = OTHER; note = 2'-deoxy-2'-fluorouridine-3'-phosphate
  modified_base 12: mod_base = OTHER; note = 2'-O-methylcytidine-3'-phosphate
  modified_base 13: mod_base = OTHER; note = 2'-O-methyluridine-3'-phosphate
  modified_base 14: mod_base = OTHER; note = 2'-O-methylguanosine-3'-phosphate
  modified_base 15: mod_base = OTHER; note = 2'-O-methyladenosine-3'-phosphate
  modified_base 16: mod_base = OTHER; note = 2'-O-methyladenosine-3'-phosphate
  modified_base 17: mod_base = OTHER; note = 2'-O-methylguanosine-3'-phosphate
  modified_base 18: mod_base = OTHER; note = 2'-O-methylguanosine-3'-phosphate
  modified_base 19: mod_base = OTHER; note = 2'-O-methylguanosine-3'-phosphate
  modified_base 20: mod_base = OTHER; note = 2'-O-methyladenosine-3'-phosphate
  modified_base 21: mod_base = OTHER; note = 2'-O-methyladenosine
cctaccagtgtctgaagggaa

SEQ ID NO: 3726 - RNA, 21 nt, synthetic construct
  source 1..21: mol_type = other RNA
  modified_base 1: mod_base = OTHER; note = 2'-O-methylcytidine-3'-phosphate
  modified_base 2: mod_base = OTHER; note = 2'-O-methyluridine-3'-phosphate
  modified_base 3: mod_base = OTHER; note = 2'-O-methyladenosine-3'-phosphate
  modified_base 4: mod_base = OTHER; note = 2'-O-methylcytidine-3'-phosphate
  modified_base 5: mod_base = OTHER; note = 2'-O-methylcytidine-3'-phosphate
  modified_base 6: mod_base = OTHER; note = 2'-O-methyladenosine-3'-phosphate
  modified_base 7: mod_base = OTHER; note = 2'-deoxy-2'-fluoroguanosine-3'-phosphate
  modified_base 8: mod_base = OTHER; note = 2'-O-methyluridine-3'-phosphate
  modified_base 9: mod_base = OTHER; note = 2'-deoxy-2'-fluoroguanosine-3'-phosphate
  modified_base 10: mod_base = OTHER; note = 2'-deoxy-2'-fluorouridine-3'-phosphate
  modified_base 11: mod_base = OTHER; note = 2'-deoxy-2'-fluorocytidine-3'-phosphate
  modified_base 12: mod_base = OTHER; note = 2'-O-methyluridine-3'-phosphate
  modified_base 13: mod_base = OTHER; note = 2'-O-methylguanosine-3'-phosphate
  modified_base 14: mod_base = OTHER; note = 2'-O-methyladenosine-3'-phosphate
  modified_base 15: mod_base = OTHER; note = 2'-O-methyladenosine-3'-phosphate
  modified_base 16: mod_base = OTHER; note = 2'-O-methylguanosine-3'-phosphate
  modified_base 17: mod_base = OTHER; note = 2'-O-methylguanosine-3'-phosphate
  modified_base 18: mod_base = OTHER; note = 2'-O-methylguanosine-3'-phosphate
  modified_base 19: mod_base = OTHER; note = 2'-O-methyladenosine-3'-phosphate
  modified_base 20: mod_base = OTHER; note = 2'-O-methyladenosine-3'-phosphate
  modified_base 21: mod_base = OTHER; note = 2'-O-methyladenosine
ctaccagtgtctgaagggaaa

SEQ ID NO: 3727 - RNA, 21 nt, synthetic construct
  source 1..21: mol_type = other RNA
  modified_base 1: mod_base = OTHER; note = 2'-O-methyluridine-3'-phosphate
  modified_base 2: mod_base = OTHER; note = 2'-O-methyladenosine-3'-phosphate
  modified_base 3: mod_base = OTHER; note = 2'-O-methylcytidine-3'-phosphate
  modified_base 4: mod_base = OTHER; note = 2'-O-methylcytidine-3'-phosphate
  modified_base 5: mod_base = OTHER; note = 2'-O-methyladenosine-3'-phosphate
  modified_base 6: mod_base = OTHER; note = 2'-O-methylguanosine-3'-phosphate
  modified_base 7: mod_base = OTHER; note = 2'-deoxy-2'-fluorouridine-3'-phosphate
  modified_base 8: mod_base = OTHER; note = 2'-O-methylguanosine-3'-phosphate
  modified_base 9: mod_base = OTHER; note = 2'-deoxy-2'-fluorouridine-3'-phosphate
  modified_base 10: mod_base = OTHER; note = 2'-deoxy-2'-fluorocytidine-3'-phosphate
  modified_base 11: mod_base = OTHER; note = 2'-deoxy-2'-fluorouridine-3'-phosphate
  modified_base 12: mod_base = OTHER; note = 2'-O-methylguanosine-3'-phosphate
  modified_base 13: mod_base = OTHER; note = 2'-O-methyladenosine-3'-phosphate
  modified_base 14: mod_base = OTHER; note = 2'-O-methyladenosine-3'-phosphate
  modified_base 15: mod_base = OTHER; note = 2'-O-methylguanosine-3'-phosphate
  modified_base 16: mod_base = OTHER; note = 2'-O-methylguanosine-3'-phosphate
  modified_base 17: mod_base = OTHER; note = 2'-O-methylguanosine-3'-phosphate
  modified_base 18: mod_base = OTHER; note = 2'-O-methyladenosine-3'-phosphate
  modified_base 19: mod_base = OTHER; note = 2'-O-methyladenosine-3'-phosphate
  modified_base 20: mod_base = OTHER; note = 2'-O-methylcytidine-3'-phosphate
  modified_base 21: mod_base = OTHER; note = 2'-O-methyladenosine
taccagtgtctgaagggaaca

SEQ ID NO: 3728 - RNA, 21 nt, synthetic construct
  source 1..21: mol_type = other RNA
  modified_base 1: mod_base = OTHER; note = 2'-O-methylguanosine-3'-phosphate
  modified_base 2: mod_base = OTHER; note = 2'-O-methyluridine-3'-phosphate
  modified_base 3: mod_base = OTHER; note = 2'-O-methylguanosine-3'-phosphate
  modified_base 4: mod_base = OTHER; note = 2'-O-methyluridine-3'-phosphate
  modified_base 5: mod_base = OTHER; note = 2'-O-methylcytidine-3'-phosphate
  modified_base 6: mod_base = OTHER; note = 2'-O-methyluridine-3'-phosphate
  modified_base 7: mod_base = OTHER; note = 2'-deoxy-2'-fluoroguanosine-3'-phosphate
  modified_base 8: mod_base = OTHER; note = 2'-O-methyladenosine-3'-phosphate
  modified_base 9: mod_base = OTHER; note = 2'-deoxy-2'-fluoroadenosine-3'-phosphate
  modified_base 10: mod_base = OTHER; note = 2'-deoxy-2'-fluoroguanosine-3'-phosphate
  modified_base 11: mod_base = OTHER; note = 2'-deoxy-2'-fluoroguanosine-3'-phosphate
  modified_base 12: mod_base = OTHER; note = 2'-O-methylguanosine-3'-phosphate
  modified_base 13: mod_base = OTHER; note = 2'-O-methyladenosine-3'-phosphate
  modified_base 14: mod_base = OTHER; note = 2'-O-methyladenosine-3'-phosphate
  modified_base 15: mod_base = OTHER; note = 2'-O-methylcytidine-3'-phosphate
  modified_base 16: mod_base = OTHER; note = 2'-O-methyladenosine-3'-phosphate
  modified_base 17: mod_base = OTHER; note = 2'-O-methylguanosine-3'-phosphate
  modified_base 18: mod_base = OTHER; note = 2'-O-methylguanosine-3'-phosphate
  modified_base 19: mod_base = OTHER; note = 2'-O-methyluridine-3'-phosphate
  modified_base 20: mod_base = OTHER; note = 2'-O-methylguanosine-3'-phosphate
  modified_base 21: mod_base = OTHER; note = 2'-O-methyladenosine
gtgtctgaagggaacaggtga

SEQ ID NO: 3729 - RNA, 21 nt, synthetic construct
  source 1..21: mol_type = other RNA
  modified_base 1: mod_base = OTHER; note = 2'-O-methylguanosine-3'-phosphate
  modified_base 2: mod_base = OTHER; note = 2'-O-methyluridine-3'-phosphate
  modified_base 3: mod_base = OTHER; note = 2'-O-methylcytidine-3'-phosphate
  modified_base 4: mod_base = OTHER; note = 2'-O-methyluridine-3'-phosphate
  modified_base 5: mod_base = OTHER; note = 2'-O-methylguanosine-3'-phosphate
  modified_base 6: mod_base = OTHER; note = 2'-O-methyladenosine-3'-phosphate
  modified_base 7: mod_base = OTHER; note = 2'-deoxy-2'-fluoroadenosine-3'-phosphate
  modified_base 8: mod_base = OTHER; note = 2'-O-methylguanosine-3'-phosphate
  modified_base 9: mod_base = OTHER; note = 2'-deoxy-2'-fluoroguanosine-3'-phosphate
  modified_base 10: mod_base = OTHER; note = 2'-deoxy-2'-fluoroguanosine-3'-phosphate
  modified_base 11: mod_base = OTHER; note = 2'-deoxy-2'-fluoroadenosine-3'-phosphate
  modified_base 12: mod_base = OTHER; note = 2'-O-methyladenosine-3'-phosphate
  modified_base 13: mod_base = OTHER; note = 2'-O-methylcytidine-3'-phosphate
  modified_base 14: mod_base = OTHER; note = 2'-O-methyladenosine-3'-phosphate
  modified_base 15: mod_base = OTHER; note = 2'-O-methylguanosine-3'-phosphate
  modified_base 16: mod_base = OTHER; note = 2'-O-methylguanosine-3'-phosphate
  modified_base 17: mod_base = OTHER; note = 2'-O-methyluridine-3'-phosphate
  modified_base 18: mod_base = OTHER; note = 2'-O-methylguanosine-3'-phosphate
  modified_base 19: mod_base = OTHER; note = 2'-O-methyladenosine-3'-phosphate
  modified_base 20: mod_base = OTHER; note = 2'-O-methyladenosine-3'-phosphate
  modified_base 21: mod_base = OTHER; note = 2'-O-methyladenosine
gtctgaagggaacaggtgaaa

SEQ ID NO: 3730 - RNA, 21 nt, synthetic construct
  source 1..21: mol_type = other RNA
  modified_base 1: mod_base = OTHER; note = 2'-O-methyluridine-3'-phosphate
  modified_base 2: mod_base = OTHER; note = 2'-O-methylcytidine-3'-phosphate
  modified_base 3: mod_base = OTHER; note = 2'-O-methyluridine-3'-phosphate
  modified_base 4: mod_base = OTHER; note = 2'-O-methylguanosine-3'-phosphate
  modified_base 5: mod_base = OTHER; note = 2'-O-methyladenosine-3'-phosphate
  modified_base 6: mod_base = OTHER; note = 2'-O-methyladenosine-3'-phosphate
  modified_base 7: mod_base = OTHER; note = 2'-deoxy-2'-fluoroguanosine-3'-phosphate
  modified_base 8: mod_base = OTHER; note = 2'-O-methylguanosine-3'-phosphate
  modified_base 9: mod_base = OTHER; note = 2'-deoxy-2'-fluoroguanosine-3'-phosphate
  modified_base 10: mod_base = OTHER; note = 2'-deoxy-2'-fluoroadenosine-3'-phosphate
  modified_base 11: mod_base = OTHER; note = 2'-deoxy-2'-fluoroadenosine-3'-phosphate
  modified_base 12: mod_base = OTHER; note = 2'-O-methylcytidine-3'-phosphate
  modified_base 13: mod_base = OTHER; note = 2'-O-methyladenosine-3'-phosphate
  modified_base 14: mod_base = OTHER; note = 2'-O-methylguanosine-3'-phosphate
  modified_base 15: mod_base = OTHER; note = 2'-O-methylguanosine-3'-phosphate
  modified_base 16: mod_base = OTHER; note = 2'-O-methyluridine-3'-phosphate
  modified_base 17: mod_base = OTHER; note = 2'-O-methylguanosine-3'-phosphate
  modified_base 18: mod_base = OTHER; note = 2'-O-methyladenosine-3'-phosphate
  modified_base 19: mod_base = OTHER; note = 2'-O-methyladenosine-3'-phosphate
  modified_base 20: mod_base = OTHER; note = 2'-O-methyladenosine-3'-phosphate
  modified_base 21: mod_base = OTHER; note = 2'-O-methyladenosine
tctgaagggaacaggtgaaaa

SEQ ID NO: 3731 - RNA, 21 nt, synthetic construct
  source 1..21: mol_type = other RNA
  modified_base 1: mod_base = OTHER; note = 2'-O-methylcytidine-3'-phosphate
  modified_base 2: mod_base = OTHER; note = 2'-O-methyluridine-3'-phosphate
  modified_base 3: mod_base = OTHER; note = 2'-O-methylguanosine-3'-phosphate
  modified_base 4: mod_base = OTHER; note = 2'-O-methyladenosine-3'-phosphate
  modified_base 5: mod_base = OTHER; note = 2'-O-methyladenosine-3'-phosphate
  modified_base 6: mod_base = OTHER; note = 2'-O-methylguanosine-3'-phosphate
  modified_base 7: mod_base = OTHER; note = 2'-deoxy-2'-fluoroguanosine-3'-phosphate
  modified_base 8: mod_base = OTHER; note = 2'-O-methylguanosine-3'-phosphate
  modified_base 9: mod_base = OTHER; note = 2'-deoxy-2'-fluoroadenosine-3'-phosphate
  modified_base 10: mod_base = OTHER; note = 2'-deoxy-2'-fluoroadenosine-3'-phosphate
  modified_base 11: mod_base = OTHER; note = 2'-deoxy-2'-fluorocytidine-3'-phosphate
  modified_base 12: mod_base = OTHER; note = 2'-O-methyladenosine-3'-phosphate
  modified_base 13: mod_base = OTHER; note = 2'-O-methylguanosine-3'-phosphate
  modified_base 14: mod_base = OTHER; note = 2'-O-methylguanosine-3'-phosphate
  modified_base 15: mod_base = OTHER; note = 2'-O-methyluridine-3'-phosphate
  modified_base 16: mod_base = OTHER; note = 2'-O-methylguanosine-3'-phosphate
  modified_base 17: mod_base = OTHER; note = 2'-O-methyladenosine-3'-phosphate
  modified_base 18: mod_base = OTHER; note = 2'-O-methyladenosine-3'-phosphate
  modified_base 19: mod_base = OTHER; note = 2'-O-methyladenosine-3'-phosphate
  modified_base 20: mod_base = OTHER; note = 2'-O-methyladenosine-3'-phosphate
  modified_base 21: mod_base = OTHER; note = 2'-O-methyladenosine
ctgaagggaacaggtgaaaaa

SEQ ID NO: 3732 - RNA, 21 nt, synthetic construct
  source 1..21: mol_type = other RNA
  modified_base 1: mod_base = OTHER; note = 2'-O-methyluridine-3'-phosphate
  modified_base 2: mod_base = OTHER; note = 2'-O-methylguanosine-3'-phosphate
  modified_base 3: mod_base = OTHER; note = 2'-O-methyladenosine-3'-phosphate
  modified_base 4: mod_base = OTHER; note = 2'-O-methyladenosine-3'-phosphate
  modified_base 5: mod_base = OTHER; note = 2'-O-methylguanosine-3'-phosphate
  modified_base 6: mod_base = OTHER; note = 2'-O-methylguanosine-3'-phosphate
  modified_base 7: mod_base = OTHER; note = 2'-deoxy-2'-fluoroguanosine-3'-phosphate
  modified_base 8: mod_base = OTHER; note = 2'-O-methyladenosine-3'-phosphate
  modified_base 9: mod_base = OTHER; note = 2'-deoxy-2'-fluoroadenosine-3'-phosphate
  modified_base 10: mod_base = OTHER; note = 2'-deoxy-2'-fluorocytidine-3'-phosphate
  modified_base 11: mod_base = OTHER; note = 2'-deoxy-2'-fluoroadenosine-3'-phosphate
  modified_base 12: mod_base = OTHER; note = 2'-O-methylguanosine-3'-phosphate
  modified_base 13: mod_base = OTHER; note = 2'-O-methylguanosine-3'-phosphate
  modified_base 14: mod_base = OTHER; note = 2'-O-methyluridine-3'-phosphate
  modified_base 15: mod_base = OTHER; note = 2'-O-methylguanosine-3'-phosphate
  modified_base 16: mod_base = OTHER; note = 2'-O-methyladenosine-3'-phosphate
  modified_base 17: mod_base = OTHER; note = 2'-O-methyladenosine-3'-phosphate
  modified_base 18: mod_base = OTHER; note = 2'-O-methyladenosine-3'-phosphate
  modified_base 19: mod_base = OTHER; note = 2'-O-methyladenosine-3'-phosphate
  modified_base 20: mod_base = OTHER; note = 2'-O-methylcytidine-3'-phosphate
  modified_base 21: mod_base = OTHER; note = 2'-O-methyladenosine
tgaagggaacaggtgaaaaca

SEQ ID NO: 3733 - RNA, 21 nt, synthetic construct
  source 1..21: mol_type = other RNA
  modified_base 1: mod_base = OTHER; note = 2'-O-methylguanosine-3'-phosphate
  modified_base 2: mod_base = OTHER; note = 2'-O-methyladenosine-3'-phosphate
  modified_base 3: mod_base = OTHER; note = 2'-O-methyladenosine-3'-phosphate
  modified_base 4: mod_base = OTHER; note = 2'-O-methylguanosine-3'-phosphate
  modified_base 5: mod_base = OTHER; note = 2'-O-methylguanosine-3'-phosphate
  modified_base 6: mod_base = OTHER; note = 2'-O-methylguanosine-3'-phosphate
  modified_base 7: mod_base = OTHER; note = 2'-deoxy-2'-fluoroadenosine-3'-phosphate
  modified_base 8: mod_base = OTHER; note = 2'-O-methyladenosine-3'-phosphate
  modified_base 9: mod_base = OTHER; note = 2'-deoxy-2'-fluorocytidine-3'-phosphate
  modified_base 10: mod_base = OTHER; note = 2'-deoxy-2'-fluoroadenosine-3'-phosphate
  modified_base 11: mod_base = OTHER; note = 2'-deoxy-2'-fluoroguanosine-3'-phosphate
  modified_base 12: mod_base = OTHER; note = 2'-O-methylguanosine-3'-phosphate
  modified_base 13: mod_base = OTHER; note = 2'-O-methyluridine-3'-phosphate
  modified_base 14: mod_base = OTHER; note = 2'-O-methylguanosine-3'-phosphate
  modified_base 15: mod_base = OTHER; note = 2'-O-methyladenosine-3'-phosphate
  modified_base 16: mod_base = OTHER; note = 2'-O-methyladenosine-3'-phosphate
  modified_base 17: mod_base = OTHER; note = 2'-O-methyladenosine-3'-phosphate
  modified_base 18: mod_base = OTHER; note = 2'-O-methyladenosine-3'-phosphate
  modified_base 19: mod_base = OTHER; note = 2'-O-methylcytidine-3'-phosphate
  modified_base 20: mod_base = OTHER; note = 2'-O-methyluridine-3'-phosphate
  modified_base 21: mod_base = OTHER; note = 2'-O-methyladenosine
gaagggaacaggtgaaaacta

SEQ ID NO: 3734 - RNA, 21 nt, synthetic construct
  source 1..21: mol_type = other RNA
  modified_base 1: mod_base = OTHER; note = 2'-O-methyladenosine-3'-phosphate
  modified_base 2: mod_base = OTHER; note = 2'-O-methyladenosine-3'-phosphate
  modified_base 3: mod_base = OTHER; note = 2'-O-methylguanosine-3'-phosphate
  modified_base 4: mod_base = OTHER; note = 2'-O-methylguanosine-3'-phosphate
  modified_base 5: mod_base = OTHER; note = 2'-O-methylguanosine-3'-phosphate
  modified_base 6: mod_base = OTHER; note = 2'-O-methyladenosine-3'-phosphate
  modified_base 7: mod_base = OTHER; note = 2'-deoxy-2'-fluoroadenosine-3'-phosphate
  modified_base 8: mod_base = OTHER; note = 2'-O-methylcytidine-3'-phosphate
  modified_base 9: mod_base = OTHER; note = 2'-deoxy-2'-fluoroadenosine-3'-phosphate
  modified_base 10: mod_base = OTHER; note = 2'-deoxy-2'-fluoroguanosine-3'-phosphate
  modified_base 11: mod_base = OTHER; note = 2'-deoxy-2'-fluoroguanosine-3'-phosphate
  modified_base 12: mod_base = OTHER; note = 2'-O-methyluridine-3'-phosphate
  modified_base 13: mod_base = OTHER; note = 2'-O-methylguanosine-3'-phosphate
  modified_base 14: mod_base = OTHER; note = 2'-O-methyladenosine-3'-phosphate
  modified_base 15: mod_base = OTHER; note = 2'-O-methyladenosine-3'-phosphate
  modified_base 16: mod_base = OTHER; note = 2'-O-methyladenosine-3'-phosphate
  modified_base 17: mod_base = OTHER; note = 2'-O-methyladenosine-3'-phosphate
  modified_base 18: mod_base = OTHER; note = 2'-O-methylcytidine-3'-phosphate
  modified_base 19: mod_base = OTHER; note = 2'-O-methyluridine-3'-phosphate
  modified_base 20: mod_base = OTHER; note = 2'-O-methyladenosine-3'-phosphate
  modified_base 21: mod_base = OTHER; note = 2'-O-methyladenosine
aagggaacaggtgaaaactaa

SEQ ID NO: 3735 - RNA, 21 nt, synthetic construct
  source 1..21: mol_type = other RNA
  modified_base 1: mod_base = OTHER; note = 2'-O-methyladenosine-3'-phosphate
  modified_base 2: mod_base = OTHER; note = 2'-O-methylguanosine-3'-phosphate
  modified_base 3: mod_base = OTHER; note = 2'-O-methylguanosine-3'-phosphate
  modified_base 4: mod_base = OTHER; note = 2'-O-methylguanosine-3'-phosphate
  modified_base 5: mod_base = OTHER; note = 2'-O-methyladenosine-3'-phosphate
  modified_base 6: mod_base = OTHER; note = 2'-O-methyladenosine-3'-phosphate
  modified_base 7: mod_base = OTHER; note = 2'-deoxy-2'-fluorocytidine-3'-phosphate
  modified_base 8: mod_base = OTHER; note = 2'-O-methyladenosine-3'-phosphate
  modified_base 9: mod_base = OTHER; note = 2'-deoxy-2'-fluoroguanosine-3'-phosphate
  modified_base 10: mod_base = OTHER; note = 2'-deoxy-2'-fluoroguanosine-3'-phosphate
  modified_base 11: mod_base = OTHER; note = 2'-deoxy-2'-fluorouridine-3'-phosphate
  modified_base 12: mod_base = OTHER; note = 2'-O-methylguanosine-3'-phosphate
  modified_base 13: mod_base = OTHER; note = 2'-O-methyladenosine-3'-phosphate
  modified_base 14: mod_base = OTHER; note = 2'-O-methyladenosine-3'-phosphate
  modified_base 15: mod_base = OTHER; note = 2'-O-methyladenosine-3'-phosphate
  modified_base 16: mod_base = OTHER; note = 2'-O-methyladenosine-3'-phosphate
  modified_base 17: mod_base = OTHER; note = 2'-O-methylcytidine-3'-phosphate
  modified_base 18: mod_base = OTHER; note = 2'-O-methyluridine-3'-phosphate
  modified_base 19: mod_base = OTHER; note = 2'-O-methyladenosine-3'-phosphate
  modified_base 20: mod_base = OTHER; note = 2'-O-methyluridine-3'-phosphate
  modified_base 21: mod_base = OTHER; note = 2'-O-methyladenosine
agggaacaggtgaaaactata

SEQ ID NO: 3736 - RNA, 21 nt, synthetic construct
  source 1..21: mol_type = other RNA
  modified_base 1: mod_base = OTHER; note = 2'-O-methylguanosine-3'-phosphate
  modified_base 2: mod_base = OTHER; note = 2'-O-methylguanosine-3'-phosphate
  modified_base 3: mod_base = OTHER; note = 2'-O-methylguanosine-3'-phosphate
  modified_base 4: mod_base = OTHER; note = 2'-O-methyladenosine-3'-phosphate
  modified_base 5: mod_base = OTHER; note = 2'-O-methyladenosine-3'-phosphate
  modified_base 6: mod_base = OTHER; note = 2'-O-methylcytidine-3'-phosphate
  modified_base 7: mod_base = OTHER; note = 2'-deoxy-2'-fluoroadenosine-3'-phosphate
  modified_base 8: mod_base = OTHER; note = 2'-O-methylguanosine-3'-phosphate
  modified_base 9: mod_base = OTHER; note = 2'-deoxy-2'-fluoroguanosine-3'-phosphate
  modified_base 10: mod_base = OTHER; note = 2'-deoxy-2'-fluorouridine-3'-phosphate
  modified_base 11: mod_base = OTHER; note = 2'-deoxy-2'-fluoroguanosine-3'-phosphate
  modified_base 12: mod_base = OTHER; note = 2'-O-methyladenosine-3'-phosphate
  modified_base 13: mod_base = OTHER; note = 2'-O-methyladenosine-3'-phosphate
  modified_base 14: mod_base = OTHER; note = 2'-O-methyladenosine-3'-phosphate
  modified_base 15: mod_base = OTHER; note = 2'-O-methyladenosine-3'-phosphate
  modified_base 16: mod_base = OTHER; note = 2'-O-methylcytidine-3'-phosphate
  modified_base 17: mod_base = OTHER; note = 2'-O-methyluridine-3'-phosphate
  modified_base 18: mod_base = OTHER; note = 2'-O-methyladenosine-3'-phosphate
  modified_base 19: mod_base = OTHER; note = 2'-O-methyluridine-3'-phosphate
  modified_base 20: mod_base = OTHER; note = 2'-O-methylcytidine-3'-phosphate
  modified_base 21: mod_base = OTHER; note = 2'-O-methyladenosine
gggaacaggtgaaaactatca

SEQ ID NO: 3737 - RNA, 21 nt, synthetic construct
  source 1..21: mol_type = other RNA
  modified_base 1: mod_base = OTHER; note = 2'-O-methylguanosine-3'-phosphate
  modified_base 2: mod_base = OTHER; note = 2'-O-methylguanosine-3'-phosphate
  modified_base 3: mod_base = OTHER; note = 2'-O-methyladenosine-3'-phosphate
  modified_base 4: mod_base = OTHER; note = 2'-O-methyladenosine-3'-phosphate
  modified_base 5: mod_base = OTHER; note = 2'-O-methylcytidine-3'-phosphate
  modified_base 6: mod_base = OTHER; note = 2'-O-methyladenosine-3'-phosphate
  modified_base 7: mod_base = OTHER; note = 2'-deoxy-2'-fluoroguanosine-3'-phosphate
  modified_base 8: mod_base = OTHER; note = 2'-O-methylguanosine-3'-phosphate
  modified_base 9: mod_base = OTHER; note = 2'-deoxy-2'-fluorouridine-3'-phosphate
  modified_base 10: mod_base = OTHER; note = 2'-deoxy-2'-fluoroguanosine-3'-phosphate
  modified_base 11: mod_base = OTHER; note = 2'-deoxy-2'-fluoroadenosine-3'-phosphate
  modified_base 12: mod_base = OTHER; note = 2'-O-methyladenosine-3'-phosphate
  modified_base 13: mod_base = OTHER; note = 2'-O-methyladenosine-3'-phosphate
  modified_base 14: mod_base = OTHER; note = 2'-O-methyladenosine-3'-phosphate
  modified_base 15: mod_base = OTHER; note = 2'-O-methylcytidine-3'-phosphate
  modified_base 16: mod_base = OTHER; note = 2'-O-methyluridine-3'-phosphate
  modified_base 17: mod_base = OTHER; note = 2'-O-methyladenosine-3'-phosphate
  modified_base 18: mod_base = OTHER; note = 2'-O-methyluridine-3'-phosphate
  modified_base 19: mod_base = OTHER; note = 2'-O-methylcytidine-3'-phosphate
  modified_base 20: mod_base = OTHER; note = 2'-O-methylguanosine-3'-phosphate
  modified_base 21: mod_base = OTHER; note = 2'-O-methyladenosine
ggaacaggtgaaaactatcga

SEQ ID NO: 3738 - RNA, 21 nt, synthetic construct
  source 1..21: mol_type = other RNA
  modified_base 1: mod_base = OTHER; note = 2'-O-methylguanosine-3'-phosphate
  modified_base 2: mod_base = OTHER; note = 2'-O-methyladenosine-3'-phosphate
  modified_base 3: mod_base = OTHER; note = 2'-O-methyladenosine-3'-phosphate
  modified_base 4: mod_base = OTHER; note = 2'-O-methylcytidine-3'-phosphate
  modified_base 5: mod_base = OTHER; note = 2'-O-methyladenosine-3'-phosphate
  modified_base 6: mod_base = OTHER; note = 2'-O-methylguanosine-3'-phosphate
  modified_base 7: mod_base = OTHER; note = 2'-deoxy-2'-fluoroguanosine-3'-phosphate
  modified_base 8: mod_base = OTHER; note = 2'-O-methyluridine-3'-phosphate
  modified_base 9: mod_base = OTHER; note = 2'-deoxy-2'-fluoroguanosine-3'-phosphate
  modified_base 10: mod_base = OTHER; note = 2'-deoxy-2'-fluoroadenosine-3'-phosphate
  modified_base 11: mod_base = OTHER; note = 2'-deoxy-2'-fluoroadenosine-3'-phosphate
  modified_base 12: mod_base = OTHER; note = 2'-O-methyladenosine-3'-phosphate
  modified_base 13: mod_base = OTHER; note = 2'-O-methyladenosine-3'-phosphate
  modified_base 14: mod_base = OTHER; note = 2'-O-methylcytidine-3'-phosphate
  modified_base 15: mod_base = OTHER; note = 2'-O-methyluridine-3'-phosphate
  modified_base 16: mod_base = OTHER; note = 2'-O-methyladenosine-3'-phosphate
  modified_base 17: mod_base = OTHER; note = 2'-O-methyluridine-3'-phosphate
  modified_base 18: mod_base = OTHER; note = 2'-O-methylcytidine-3'-phosphate
  modified_base 19: mod_base = OTHER; note = 2'-O-methylguanosine-3'-phosphate
  modified_base 20: mod_base = OTHER; note = 2'-O-methylcytidine-3'-phosphate
  modified_base 21: mod_base = OTHER; note = 2'-O-methyladenosine
gaacaggtgaaaactatcgca

SEQ ID NO: 3739 - RNA, 21 nt, synthetic construct
  source 1..21: mol_type = other RNA
  modified_base 1: mod_base = OTHER; note = 2'-O-methylguanosine-3'-phosphate
  modified_base 2: mod_base = OTHER; note = 2'-O-methyluridine-3'-phosphate
  modified_base 3: mod_base = OTHER; note = 2'-O-methylguanosine-3'-phosphate
  modified_base 4: mod_base = OTHER; note = 2'-O-methyladenosine-3'-phosphate
  modified_base 5: mod_base = OTHER; note = 2'-O-methyladenosine-3'-phosphate
  modified_base 6: mod_base = OTHER; note = 2'-O-methyladenosine-3'-phosphate
  modified_base 7: mod_base = OTHER; note = 2'-deoxy-2'-fluoroadenosine-3'-phosphate
  modified_base 8: mod_base = OTHER; note = 2'-O-methylcytidine-3'-phosphate
  modified_base 9: mod_base = OTHER; note = 2'-deoxy-2'-fluorouridine-3'-phosphate
  modified_base 10: mod_base = OTHER; note = 2'-deoxy-2'-fluoroadenosine-3'-phosphate
  modified_base 11: mod_base = OTHER; note = 2'-deoxy-2'-fluorouridine-3'-phosphate
  modified_base 12: mod_base = OTHER; note = 2'-O-methylcytidine-3'-phosphate
  modified_base 13: mod_base = OTHER; note = 2'-O-methylguanosine-3'-phosphate
  modified_base 14: mod_base = OTHER; note = 2'-O-methylcytidine-3'-phosphate
  modified_base 15: mod_base = OTHER; note = 2'-O-methylguanosine-3'-phosphate
  modified_base 16: mod_base = OTHER; note = 2'-O-methylguanosine-3'-phosphate
  modified_base 17: mod_base = OTHER; note = 2'-O-methylguanosine-3'-phosphate
  modified_base 18: mod_base = OTHER; note = 2'-O-methyladenosine-3'-phosphate
  modified_base 19: mod_base = OTHER; note = 2'-O-methyladenosine-3'-phosphate
  modified_base 20: mod_base = OTHER; note = 2'-O-methyluridine-3'-phosphate
  modified_base 21: mod_base = OTHER; note = 2'-O-methyladenosine
gtgaaaactatcgcgggaata

SEQ ID NO: 3740 - RNA, 21 nt, synthetic construct
  source 1..21: mol_type = other RNA
  modified_base 1: mod_base = OTHER; note = 2'-O-methylguanosine-3'-phosphate
  modified_base 2: mod_base = OTHER; note = 2'-O-methyladenosine-3'-phosphate
  modified_base 3: mod_base = OTHER; note = 2'-O-methyladenosine-3'-phosphate
  modified_base 4: mod_base = OTHER; note = 2'-O-methyladenosine-3'-phosphate
  modified_base 5: mod_base = OTHER; note = 2'-O-methyladenosine-3'-phosphate
  modified_base 6: mod_base = OTHER; note = 2'-O-methylcytidine-3'-phosphate
  modified_base 7: mod_base = OTHER; note = 2'-deoxy-2'-fluorouridine-3'-phosphate
  modified_base 8: mod_base = OTHER; note = 2'-O-methyladenosine-3'-phosphate
  modified_base 9: mod_base = OTHER; note = 2'-deoxy-2'-fluorouridine-3'-phosphate
  modified_base 10: mod_base = OTHER; note = 2'-deoxy-2'-fluorocytidine-3'-phosphate
  modified_base 11: mod_base = OTHER; note = 2'-deoxy-2'-fluoroguanosine-3'-phosphate
  modified_base 12: mod_base = OTHER; note = 2'-O-methylcytidine-3'-phosphate
  modified_base 13: mod_base = OTHER; note = 2'-O-methylguanosine-3'-phosphate
  modified_base 14: mod_base = OTHER; note = 2'-O-methylguanosine-3'-phosphate
  modified_base 15: mod_base = OTHER; note = 2'-O-methylguanosine-3'-phosphate
  modified_base 16: mod_base = OTHER; note = 2'-O-methyladenosine-3'-phosphate
  modified_base 17: mod_base = OTHER; note = 2'-O-methyladenosine-3'-phosphate
  modified_base 18: mod_base = OTHER; note = 2'-O-methyluridine-3'-phosphate
  modified_base 19: mod_base = OTHER; note = 2'-O-methylguanosine-3'-phosphate
  modified_base 20: mod_base = OTHER; note = 2'-O-methyluridine-3'-phosphate
  modified_base 21: mod_base = OTHER; note = 2'-O-methyladenosine
gaaaactatcgcgggaatgta

SEQ ID NO: 3741 - RNA, 21 nt, synthetic construct
  source 1..21: mol_type = other RNA
  modified_base 1: mod_base = OTHER; note = 2'-O-methyladenosine-3'-phosphate
  modified_base 2: mod_base = OTHER; note = 2'-O-methyladenosine-3'-phosphate
  modified_base 3: mod_base = OTHER; note = 2'-O-methyladenosine-3'-phosphate
  modified_base 4: mod_base = OTHER; note = 2'-O-methyladenosine-3'-phosphate
  modified_base 5: mod_base = OTHER; note = 2'-O-methylcytidine-3'-phosphate
  modified_base 6: mod_base = OTHER; note = 2'-O-methyluridine-3'-phosphate
  modified_base 7: mod_base = OTHER; note = 2'-deoxy-2'-fluoroadenosine-3'-phosphate
  modified_base 8: mod_base = OTHER; note = 2'-O-methyluridine-3'-phosphate
  modified_base 9: mod_base = OTHER; note = 2'-deoxy-2'-fluorocytidine-3'-phosphate
  modified_base 10: mod_base = OTHER; note = 2'-deoxy-2'-fluoroguanosine-3'-phosphate
  modified_base 11: mod_base = OTHER; note = 2'-deoxy-2'-fluorocytidine-3'-phosphate
  modified_base 12: mod_base = OTHER; note = 2'-O-methylguanosine-3'-phosphate
  modified_base 13: mod_base = OTHER; note = 2'-O-methylguanosine-3'-phosphate
  modified_base 14: mod_base = OTHER; note = 2'-O-methylguanosine-3'-phosphate
  modified_base 15: mod_base = OTHER; note = 2'-O-methyladenosine-3'-phosphate
  modified_base 16: mod_base = OTHER; note = 2'-O-methyladenosine-3'-phosphate
  modified_base 17: mod_base = OTHER; note = 2'-O-methyluridine-3'-phosphate
  modified_base 18: mod_base = OTHER; note = 2'-O-methylguanosine-3'-phosphate
  modified_base 19: mod_base = OTHER; note = 2'-O-methyluridine-3'-phosphate
  modified_base 20: mod_base = OTHER; note = 2'-O-methylguanosine-3'-phosphate
  modified_base 21: mod_base = OTHER; note = 2'-O-methyladenosine
aaaactatcgcgggaatgtga

SEQ ID NO: 3742 - RNA, 21 nt, synthetic construct
  source 1..21: mol_type = other RNA
  modified_base 1: mod_base = OTHER; note = 2'-O-methyluridine-3'-phosphate
  modified_base 2: mod_base = OTHER; note = 2'-O-methyladenosine-3'-phosphate
  modified_base 3: mod_base = OTHER; note = 2'-O-methyluridine-3'-phosphate
  modified_base 4: mod_base = OTHER; note = 2'-O-methylcytidine-3'-phosphate
  modified_base 5: mod_base = OTHER; note = 2'-O-methylguanosine-3'-phosphate
  modified_base 6: mod_base = OTHER; note = 2'-O-methylcytidine-3'-phosphate
  modified_base 7: mod_base = OTHER; note = 2'-deoxy-2'-fluoroguanosine-3'-phosphate
  modified_base 8: mod_base = OTHER; note = 2'-O-methylguanosine-3'-phosphate
  modified_base 9: mod_base = OTHER; note = 2'-deoxy-2'-fluoroguanosine-3'-phosphate
  modified_base 10: mod_base = OTHER; note = 2'-deoxy-2'-fluoroadenosine-3'-phosphate
  modified_base 11: mod_base = OTHER; note = 2'-deoxy-2'-fluoroadenosine-3'-phosphate
  modified_base 12: mod_base = OTHER; note = 2'-O-methyluridine-3'-phosphate
  modified_base 13: mod_base = OTHER; note = 2'-O-methylguanosine-3'-phosphate
  modified_base 14: mod_base = OTHER; note = 2'-O-methyluridine-3'-phosphate
  modified_base 15: mod_base = OTHER; note = 2'-O-methylguanosine-3'-phosphate
  modified_base 16: mod_base = OTHER; note = 2'-O-methylguanosine-3'-phosphate
  modified_base 17: mod_base = OTHER; note = 2'-O-methylcytidine-3'-phosphate
  modified_base 18: mod_base = OTHER; note = 2'-O-methyluridine-3'-phosphate
  modified_base 19: mod_base = OTHER; note = 2'-O-methylguanosine-3'-phosphate
  modified_base 20: mod_base = OTHER; note = 2'-O-methyluridine-3'-phosphate
  modified_base 21: mod_base = OTHER; note = 2'-O-methyladenosine
tatcgcgggaatgtggctgta

SEQ ID NO: 3743 - RNA, 21 nt, synthetic construct
  source 1..21: mol_type = other RNA
  modified_base 1: mod_base = OTHER; note = 2'-O-methyladenosine-3'-phosphate
  modified_base 2: mod_base = OTHER; note = 2'-O-methyluridine-3'-phosphate
  modified_base 3: mod_base = OTHER; note = 2'-O-methylcytidine-3'-phosphate
  modified_base 4: mod_base = OTHER; note = 2'-O-methylguanosine-3'-phosphate
  modified_base 5: mod_base = OTHER; note = 2'-O-methylcytidine-3'-phosphate
  modified_base 6: mod_base = OTHER; note = 2'-O-methylguanosine-3'-phosphate
  modified_base 7: mod_base = OTHER; note = 2'-deoxy-2'-fluoroguanosine-3'-phosphate
  modified_base 8: mod_base = OTHER; note = 2'-O-methylguanosine-3'-phosphate
  modified_base 9: mod_base = OTHER; note = 2'-deoxy-2'-fluoroadenosine-3'-phosphate
  modified_base 10: mod_base = OTHER; note = 2'-deoxy-2'-fluoroadenosine-3'-phosphate
  modified_base 11: mod_base = OTHER; note = 2'-deoxy-2'-fluorouridine-3'-phosphate
  modified_base 12: mod_base = OTHER; note = 2'-O-methylguanosine-3'-phosphate
  modified_base 13: mod_base = OTHER; note = 2'-O-methyluridine-3'-phosphate
  modified_base 14: mod_base = OTHER; note = 2'-O-methylguanosine-3'-phosphate
  modified_base 15: mod_base = OTHER; note = 2'-O-methylguanosine-3'-phosphate
  modified_base 16: mod_base = OTHER; note = 2'-O-methylcytidine-3'-phosphate
  modified_base 17: mod_base = OTHER; note = 2'-O-methyluridine-3'-phosphate
  modified_base 18: mod_base = OTHER; note = 2'-O-methylguanosine-3'-phosphate
  modified_base 19: mod_base = OTHER; note = 2'-O-methyluridine-3'-phosphate
  modified_base 20: mod_base = OTHER; note = 2'-O-methyluridine-3'-phosphate
  modified_base 21: mod_base = OTHER; note = 2'-O-methyladenosine
atcgcgggaatgtggctgtta

SEQ ID NO: 3744 - RNA, 21 nt, synthetic construct
  source 1..21: mol_type = other RNA
  modified_base 1: mod_base = OTHER; note = 2'-O-methyluridine-3'-phosphate
  modified_base 2: mod_base = OTHER; note = 2'-O-methylcytidine-3'-phosphate
  modified_base 3: mod_base = OTHER; note = 2'-O-methylguanosine-3'-phosphate
  modified_base 4: mod_base = OTHER; note = 2'-O-methylcytidine-3'-phosphate
  modified_base 5: mod_base = OTHER; note = 2'-O-methylguanosine-3'-phosphate
  modified_base 6: mod_base = OTHER; note = 2'-O-methylguanosine-3'-phosphate
  modified_base 7: mod_base = OTHER; note = 2'-deoxy-2'-fluoroguanosine-3'-phosphate
  modified_base 8: mod_base = OTHER; note = 2'-O-methyladenosine-3'-phosphate
  modified_base 9: mod_base = OTHER; note = 2'-deoxy-2'-fluoroadenosine-3'-phosphate
  modified_base 10: mod_base = OTHER; note = 2'-deoxy-2'-fluorouridine-3'-phosphate
  modified_base 11: mod_base = OTHER; note = 2'-deoxy-2'-fluoroguanosine-3'-phosphate
  modified_base 12: mod_base = OTHER; note = 2'-O-methyluridine-3'-phosphate
  modified_base 13: mod_base = OTHER; note = 2'-O-methylguanosine-3'-phosphate
  modified_base 14: mod_base = OTHER; note = 2'-O-methylguanosine-3'-phosphate
  modified_base 15: mod_base = OTHER; note = 2'-O-methylcytidine-3'-phosphate
  modified_base 16: mod_base = OTHER; note = 2'-O-methyluridine-3'-phosphate
  modified_base 17: mod_base = OTHER; note = 2'-O-methylguanosine-3'-phosphate
  modified_base 18: mod_base = OTHER; note = 2'-O-methyluridine-3'-phosphate
  modified_base 19: mod_base = OTHER; note = 2'-O-methyluridine-3'-phosphate
  modified_base 20: mod_base = OTHER; note = 2'-O-methyladenosine-3'-phosphate
  modified_base 21: mod_base = OTHER; note = 2'-O-methyladenosine
tcgcgggaatgtggctgttaa

SEQ ID NO: 3745 - RNA, 21 nt, synthetic construct
  source 1..21: mol_type = other RNA
  modified_base 1: mod_base = OTHER; note = 2'-O-methylcytidine-3'-phosphate
  modified_base 2: mod_base = OTHER; note = 2'-O-methylguanosine-3'-phosphate
  modified_base 3: mod_base = OTHER; note = 2'-O-methylcytidine-3'-phosphate
  modified_base 4: mod_base = OTHER; note = 2'-O-methylguanosine-3'-phosphate
  modified_base 5: mod_base = OTHER; note = 2'-O-methylguanosine-3'-phosphate
  modified_base 6: mod_base = OTHER; note = 2'-O-methylguanosine-3'-phosphate
  modified_base 7: mod_base = OTHER; note = 2'-deoxy-2'-fluoroadenosine-3'-phosphate
  modified_base 8: mod_base = OTHER; note = 2'-O-methyladenosine-3'-phosphate
  modified_base 9: mod_base = OTHER; note = 2'-deoxy-2'-fluorouridine-3'-phosphate
  modified_base 10: mod_base = OTHER; note = 2'-deoxy-2'-fluoroguanosine-3'-phosphate
  modified_base 11: mod_base = OTHER; note = 2'-deoxy-2'-fluorouridine-3'-phosphate
  modified_base 12: mod_base = OTHER; note = 2'-O-methylguanosine-3'-phosphate
  modified_base 13: mod_base = OTHER; note = 2'-O-methylguanosine-3'-phosphate
  modified_base 14: mod_base = OTHER; note = 2'-O-methylcytidine-3'-phosphate
  modified_base 15: mod_base = OTHER; note = 2'-O-methyluridine-3'-phosphate
  modified_base 16: mod_base = OTHER; note = 2'-O-methylguanosine-3'-phosphate
  modified_base 17: mod_base = OTHER; note = 2'-O-methyluridine-3'-phosphate
  modified_base 18: mod_base = OTHER; note = 2'-O-methyluridine-3'-phosphate
  modified_base 19: mod_base = OTHER; note = 2'-O-methyladenosine-3'-phosphate
  modified_base 20: mod_base = OTHER; note = 2'-O-methylcytidine-3'-phosphate
  modified_base 21: mod_base = OTHER; note = 2'-O-methyladenosine
cgcgggaatgtggctgttaca

SEQ ID NO: 3746 - RNA, 21 nt, synthetic construct
  source 1..21: mol_type = other RNA
  modified_base 1: mod_base = OTHER; note = 2'-O-methylguanosine-3'-phosphate
  modified_base 2: mod_base = OTHER; note = 2'-O-methylguanosine-3'-phosphate
  modified_base 3: mod_base = OTHER; note = 2'-O-methylguanosine-3'-phosphate
  modified_base 4: mod_base = OTHER; note = 2'-O-methyladenosine-3'-phosphate
  modified_base 5: mod_base = OTHER; note = 2'-O-methyladenosine-3'-phosphate
  modified_base 6: mod_base = OTHER; note = 2'-O-methyluridine-3'-phosphate
  modified_base 7: mod_base = OTHER; note = 2'-deoxy-2'-fluoroguanosine-3'-phosphate
  modified_base 8: mod_base = OTHER; note = 2'-O-methyluridine-3'-phosphate
  modified_base 9: mod_base = OTHER; note = 2'-deoxy-2'-fluoroguanosine-3'-phosphate
  modified_base 10: mod_base = OTHER; note = 2'-deoxy-2'-fluoroguanosine-3'-phosphate
  modified_base 11: mod_base = OTHER; note = 2'-deoxy-2'-fluorocytidine-3'-phosphate
  modified_base 12: mod_base = OTHER; note = 2'-O-methyluridine-3'-phosphate
  modified_base 13: mod_base = OTHER; note = 2'-O-methylguanosine-3'-phosphate
  modified_base 14: mod_base = OTHER; note = 2'-O-methyluridine-3'-phosphate
  modified_base 15: mod_base = OTHER; note = 2'-O-methyluridine-3'-phosphate
  modified_base 16: mod_base = OTHER; note = 2'-O-methyladenosine-3'-phosphate
  modified_base 17: mod_base = OTHER; note = 2'-O-methylcytidine-3'-phosphate
  modified_base 18: mod_base = OTHER; note = 2'-O-methylcytidine-3'-phosphate
  modified_base 19: mod_base = OTHER; note = 2'-O-methylguanosine-3'-phosphate
  modified_base 20: mod_base = OTHER; note = 2'-O-methyluridine-3'-phosphate
  modified_base 21: mod_base = OTHER; note = 2'-O-methyladenosine
gggaatgtggctgttaccgta

SEQ ID NO: 3747 - RNA, 21 nt, synthetic construct
  source 1..21: mol_type = other RNA
  modified_base 1: mod_base = OTHER; note = 2'-O-methylguanosine-3'-phosphate
  modified_base 2: mod_base = OTHER; note = 2'-O-methyladenosine-3'-phosphate
  modified_base 3: mod_base = OTHER; note = 2'-O-methyladenosine-3'-phosphate
  modified_base 4: mod_base = OTHER; note = 2'-O-methyluridine-3'-phosphate
  modified_base 5: mod_base = OTHER; note = 2'-O-methylguanosine-3'-phosphate
  modified_base 6: mod_base = OTHER; note = 2'-O-methyluridine-3'-phosphate
  modified_base 7: mod_base = OTHER; note = 2'-deoxy-2'-fluoroguanosine-3'-phosphate
  modified_base 8: mod_base = OTHER; note = 2'-O-methylguanosine-3'-phosphate
  modified_base 9: mod_base = OTHER; note = 2'-deoxy-2'-fluorocytidine-3'-phosphate
  modified_base 10: mod_base = OTHER; note = 2'-deoxy-2'-fluorouridine-3'-phosphate
  modified_base 11: mod_base = OTHER; note = 2'-deoxy-2'-fluoroguanosine-3'-phosphate
  modified_base 12: mod_base = OTHER; note = 2'-O-methyluridine-3'-phosphate
  modified_base 13: mod_base = OTHER; note = 2'-O-methyluridine-3'-phosphate
  modified_base 14: mod_base = OTHER; note = 2'-O-methyladenosine-3'-phosphate
  modified_base 15: mod_base = OTHER; note = 2'-O-methylcytidine-3'-phosphate
  modified_base 16: mod_base = OTHER; note = 2'-O-methylcytidine-3'-phosphate
  modified_base 17: mod_base = OTHER; note = 2'-O-methylguanosine-3'-phosphate
  modified_base 18: mod_base = OTHER; note = 2'-O-methyluridine-3'-phosphate
  modified_base 19: mod_base = OTHER; note = 2'-O-methylguanosine-3'-phosphate
  modified_base 20: mod_base = OTHER; note = 2'-O-methyluridine-3'-phosphate
  modified_base 21: mod_base = OTHER; note = 2'-O-methyladenosine
gaatgtggctgttaccgtgta

SEQ ID NO: 3748 - RNA, 21 nt, synthetic construct
  source 1..21: mol_type = other RNA
  modified_base 1: mod_base = OTHER; note = 2'-O-methyladenosine-3'-phosphate
  modified_base 2: mod_base = OTHER; note = 2'-O-methyladenosine-3'-phosphate
  modified_base 3: mod_base = OTHER; note = 2'-O-methyluridine-3'-phosphate
  modified_base 4: mod_base = OTHER; note = 2'-O-methylguanosine-3'-phosphate
  modified_base 5: mod_base = OTHER; note = 2'-O-methyluridine-3'-phosphate
  modified_base 6: mod_base = OTHER; note = 2'-O-methylguanosine-3'-phosphate
  modified_base 7: mod_base = OTHER; note = 2'-deoxy-2'-fluoroguanosine-3'-phosphate
  modified_base 8: mod_base = OTHER; note = 2'-O-methylcytidine-3'-phosphate
  modified_base 9: mod_base = OTHER; note = 2'-deoxy-2'-fluorouridine-3'-phosphate
  modified_base 10: mod_base = OTHER; note = 2'-deoxy-2'-fluoroguanosine-3'-phosphate
  modified_base 11: mod_base = OTHER; note = 2'-deoxy-2'-fluorouridine-3'-phosphate
  modified_base 12: mod_base = OTHER; note = 2'-O-methyluridine-3'-phosphate
  modified_base 13: mod_base = OTHER; note = 2'-O-methyladenosine-3'-phosphate
  modified_base 14: mod_base = OTHER; note = 2'-O-methylcytidine-3'-phosphate
  modified_base 15: mod_base = OTHER; note = 2'-O-methylcytidine-3'-phosphate
  modified_base 16: mod_base = OTHER; note = 2'-O-methylguanosine-3'-phosphate
  modified_base 17: mod_base = OTHER; note = 2'-O-methyluridine-3'-phosphate
  modified_base 18: mod_base = OTHER; note = 2'-O-methylguanosine-3'-phosphate
  modified_base 19: mod_base = OTHER; note = 2'-O-methyluridine-3'-phosphate
  modified_base 20: mod_base = OTHER; note = 2'-O-methylcytidine-3'-phosphate
  modified_base 21: mod_base = OTHER; note = 2'-O-methyladenosine
aatgtggctgttaccgtgtca

SEQ ID NO: 3749 - RNA, 21 nt, synthetic construct
  source 1..21: mol_type = other RNA
  modified_base 1: mod_base = OTHER; note = 2'-O-methylcytidine-3'-phosphate
  modified_base 2: mod_base = OTHER; note = 2'-O-methylcytidine-3'-phosphate
  modified_base 3: mod_base = OTHER; note = 2'-O-methylguanosine-3'-phosphate
  modified_base 4: mod_base = OTHER; note = 2'-O-methyluridine-3'-phosphate
  modified_base 5: mod_base = OTHER; note = 2'-O-methylguanosine-3'-phosphate
  modified_base 6: mod_base = OTHER; note = 2'-O-methyluridine-3'-phosphate
  modified_base 7: mod_base = OTHER; note = 2'-deoxy-2'-fluorocytidine-3'-phosphate
  modified_base 8: mod_base = OTHER; note = 2'-O-methylcytidine-3'-phosphate
  modified_base 9: mod_base = OTHER; note = 2'-deoxy-2'-fluoroguanosine-3'-phosphate
  modified_base 10: mod_base = OTHER; note = 2'-deoxy-2'-fluoroguanosine-3'-phosphate
  modified_base 11: mod_base = OTHER; note = 2'-deoxy-2'-fluoroguanosine-3'-phosphate
  modified_base 12: mod_base = OTHER; note = 2'-O-methylcytidine-3'-phosphate
  modified_base 13: mod_base = OTHER; note = 2'-O-methyladenosine-3'-phosphate
  modified_base 14: mod_base = OTHER; note = 2'-O-methylcytidine-3'-phosphate
  modified_base 15: mod_base = OTHER; note = 2'-O-methyladenosine-3'-phosphate
  modified_base 16: mod_base = OTHER; note = 2'-O-methylcytidine-3'-phosphate
  modified_base 17: mod_base = OTHER; note = 2'-O-methylcytidine-3'-phosphate
  modified_base 18: mod_base = OTHER; note = 2'-O-methyluridine-3'-phosphate
  modified_base 19: mod_base = OTHER; note = 2'-O-methylguanosine-3'-phosphate
  modified_base 20: mod_base = OTHER; note = 2'-O-methyluridine-3'-phosphate
  modified_base 21: mod_base = OTHER; note = 2'-O-methyladenosine
ccgtgtccgggcacacctgta

SEQ ID NO: 3750 - RNA, 21 nt, synthetic construct
  source 1..21: mol_type = other RNA
  modified_base 1: mod_base = OTHER; note = 2'-O-methyluridine-3'-phosphate
  modified_base 2: mod_base = OTHER; note = 2'-O-methylcytidine-3'-phosphate
  modified_base 3: mod_base = OTHER; note = 2'-O-methylcytidine-3'-phosphate
  modified_base 4: mod_base = OTHER; note = 2'-O-methylguanosine-3'-phosphate
  modified_base 5: mod_base = OTHER; note = 2'-O-methylguanosine-3'-phosphate
  modified_base 6: mod_base = OTHER; note = 2'-O-methylguanosine-3'-phosphate
  modified_base 7: mod_base = OTHER; note = 2'-deoxy-2'-fluorocytidine-3'-phosphate
  modified_base 8: mod_base = OTHER; note = 2'-O-methyladenosine-3'-phosphate
  modified_base 9: mod_base = OTHER; note = 2'-deoxy-2'-fluorocytidine-3'-phosphate
  modified_base 10: mod_base = OTHER; note = 2'-deoxy-2'-fluoroadenosine-3'-phosphate
  modified_base 11: mod_base = OTHER; note = 2'-deoxy-2'-fluorocytidine-3'-phosphate
  modified_base 12: mod_base = OTHER; note = 2'-O-methylcytidine-3'-phosphate
  modified_base 13: mod_base = OTHER; note = 2'-O-methyluridine-3'-phosphate
  modified_base 14: mod_base = OTHER; note = 2'-O-methylguanosine-3'-phosphate
  modified_base 15: mod_base = OTHER; note = 2'-O-methyluridine-3'-phosphate
  modified_base 16: mod_base = OTHER; note = 2'-O-methylcytidine-3'-phosphate
  modified_base 17: mod_base = OTHER; note = 2'-O-methyladenosine-3'-phosphate
  modified_base 18: mod_base = OTHER; note = 2'-O-methylguanosine-3'-phosphate
  modified_base 19: mod_base = OTHER; note = 2'-O-methylcytidine-3'-phosphate
  modified_base 20: mod_base = OTHER; note = 2'-O-methyladenosine-3'-phosphate
  modified_base 21: mod_base = OTHER; note = 2'-O-methyladenosine
tccgggcacacctgtcagcaa

SEQ ID NO: 3751 - RNA, 21 nt, synthetic construct
  source 1..21: mol_type = other RNA
  modified_base 1: mod_base = OTHER; note = 2'-O-methylcytidine-3'-phosphate
  modified_base 2: mod_base = OTHER; note = 2'-O-methylguanosine-3'-phosphate
  modified_base 3: mod_base = OTHER; note = 2'-O-methylguanosine-3'-phosphate
  modified_base 4: mod_base = OTHER; note = 2'-O-methylguanosine-3'-phosphate
  modified_base 5: mod_base = OTHER; note = 2'-O-methylcytidine-3'-phosphate
  modified_base 6: mod_base = OTHER; note = 2'-O-methyladenosine-3'-phosphate
  modified_base 7: mod_base = OTHER; note = 2'-deoxy-2'-fluorocytidine-3'-phosphate
  modified_base 8: mod_base = OTHER; note = 2'-O-methyladenosine-3'-phosphate
  modified_base 9: mod_base = OTHER; note = 2'-deoxy-2'-fluorocytidine-3'-phosphate
  modified_base 10: mod_base = OTHER; note = 2'-deoxy-2'-fluorocytidine-3'-phosphate
  modified_base 11: mod_base = OTHER; note = 2'-deoxy-2'-fluorouridine-3'-phosphate
  modified_base 12: mod_base = OTHER; note = 2'-O-methylguanosine-3'-phosphate
  modified_base 13: mod_base = OTHER; note = 2'-O-methyluridine-3'-phosphate
  modified_base 14: mod_base = OTHER; note = 2'-O-methylcytidine-3'-phosphate
  modified_base 15: mod_base = OTHER; note = 2'-O-methyladenosine-3'-phosphate
  modified_base 16: mod_base = OTHER; note = 2'-O-methylguanosine-3'-phosphate
  modified_base 17: mod_base = OTHER; note = 2'-O-methylcytidine-3'-phosphate
  modified_base 18: mod_base = OTHER; note = 2'-O-methyladenosine-3'-phosphate
  modified_base 19: mod_base = OTHER; note = 2'-O-methylcytidine-3'-phosphate
  modified_base 20: mod_base = OTHER; note = 2'-O-methyluridine-3'-phosphate
  modified_base 21: mod_base = OTHER; note = 2'-O-methyladenosine
cgggcacacctgtcagcacta

SEQ ID NO: 3752 - RNA, 21 nt, synthetic construct
  source 1..21: mol_type = other RNA
  modified_base 1: mod_base = OTHER; note = 2'-O-methylguanosine-3'-phosphate
  modified_base 2: mod_base = OTHER; note = 2'-O-methylcytidine-3'-phosphate
  modified_base 3: mod_base = OTHER; note = 2'-O-methyladenosine-3'-phosphate
  modified_base 4: mod_base = OTHER; note = 2'-O-methylcytidine-3'-phosphate
  modified_base 5: mod_base = OTHER; note = 2'-O-methyladenosine-3'-phosphate
  modified_base 6: mod_base = OTHER; note = 2'-O-methylcytidine-3'-phosphate
  modified_base 7: mod_base = OTHER; note = 2'-deoxy-2'-fluorocytidine-3'-phosphate
  modified_base 8: mod_base = OTHER; note = 2'-O-methyluridine-3'-phosphate
  modified_base 9: mod_base = OTHER; note = 2'-deoxy-2'-fluoroguanosine-3'-phosphate
  modified_base 10: mod_base = OTHER; note = 2'-deoxy-2'-fluorouridine-3'-phosphate
  modified_base 11: mod_base = OTHER; note = 2'-deoxy-2'-fluorocytidine-3'-phosphate
  modified_base 12: mod_base = OTHER; note = 2'-O-methyladenosine-3'-phosphate
  modified_base 13: mod_base = OTHER; note = 2'-O-methylguanosine-3'-phosphate
  modified_base 14: mod_base = OTHER; note = 2'-O-methylcytidine-3'-phosphate
  modified_base 15: mod_base = OTHER; note = 2'-O-methyladenosine-3'-phosphate
  modified_base 16: mod_base = OTHER; note = 2'-O-methylcytidine-3'-phosphate
  modified_base 17: mod_base = OTHER; note = 2'-O-methyluridine-3'-phosphate
  modified_base 18: mod_base = OTHER; note = 2'-O-methylguanosine-3'-phosphate
  modified_base 19: mod_base = OTHER; note = 2'-O-methylguanosine-3'-phosphate
  modified_base 20: mod_base = OTHER; note = 2'-O-methyladenosine-3'-phosphate
  modified_base 21: mod_base = OTHER; note = 2'-O-methyladenosine
gcacacctgtcagcactggaa

SEQ ID NO: 3753 - RNA, 21 nt, synthetic construct
  source 1..21: mol_type = other RNA
  modified_base 1: mod_base = OTHER; note = 2'-O-methylcytidine-3'-phosphate
  modified_base 2: mod_base = OTHER; note = 2'-O-methyladenosine-3'-phosphate
  modified_base 3: mod_base = OTHER; note = 2'-O-methylcytidine-3'-phosphate
  modified_base 4: mod_base = OTHER; note = 2'-O-methyladenosine-3'-phosphate
  modified_base 5: mod_base = OTHER; note = 2'-O-methylcytidine-3'-phosphate
  modified_base 6: mod_base = OTHER; note = 2'-O-methylcytidine-3'-phosphate
  modified_base 7: mod_base = OTHER; note = 2'-deoxy-2'-fluorouridine-3'-phosphate
  modified_base 8: mod_base = OTHER; note = 2'-O-methylguanosine-3'-phosphate
  modified_base 9: mod_base = OTHER; note = 2'-deoxy-2'-fluorouridine-3'-phosphate
  modified_base 10: mod_base = OTHER; note = 2'-deoxy-2'-fluorocytidine-3'-phosphate
  modified_base 11: mod_base = OTHER; note = 2'-deoxy-2'-fluoroadenosine-3'-phosphate
  modified_base 12: mod_base = OTHER; note = 2'-O-methylguanosine-3'-phosphate
  modified_base 13: mod_base = OTHER; note = 2'-O-methylcytidine-3'-phosphate
  modified_base 14: mod_base = OTHER; note = 2'-O-methyladenosine-3'-phosphate
  modified_base 15: mod_base = OTHER; note = 2'-O-methylcytidine-3'-phosphate
  modified_base 16: mod_base = OTHER; note = 2'-O-methyluridine-3'-phosphate
  modified_base 17: mod_base = OTHER; note = 2'-O-methylguanosine-3'-phosphate
  modified_base 18: mod_base = OTHER; note = 2'-O-methylguanosine-3'-phosphate
  modified_base 19: mod_base = OTHER; note = 2'-O-methyladenosine-3'-phosphate
  modified_base 20: mod_base = OTHER; note = 2'-O-methylguanosine-3'-phosphate
  modified_base 21: mod_base = OTHER; note = 2'-O-methyladenosine
cacacctgtcagcactggaga

SEQ ID NO: 3754 - RNA, 21 nt, synthetic construct
  source 1..21: mol_type = other RNA
  modified_base 1: mod_base = OTHER; note = 2'-O-methyladenosine-3'-phosphate
  modified_base 2: mod_base = OTHER; note = 2'-O-methylcytidine-3'-phosphate
  modified_base 3: mod_base = OTHER; note = 2'-O-methyladenosine-3'-phosphate
  modified_base 4: mod_base = OTHER; note = 2'-O-methylcytidine-3'-phosphate
  modified_base 5: mod_base = OTHER; note = 2'-O-methylcytidine-3'-phosphate
  modified_base 6: mod_base = OTHER; note = 2'-O-methyluridine-3'-phosphate
  modified_base 7: mod_base = OTHER; note = 2'-deoxy-2'-fluoroguanosine-3'-phosphate
  modified_base 8: mod_base = OTHER; note = 2'-O-methyluridine-3'-phosphate
  modified_base 9: mod_base = OTHER; note = 2'-deoxy-2'-fluorocytidine-3'-phosphate
  modified_base 10: mod_base = OTHER; note = 2'-deoxy-2'-fluoroadenosine-3'-phosphate
  modified_base 11: mod_base = OTHER; note = 2'-deoxy-2'-fluoroguanosine-3'-phosphate
  modified_base 12: mod_base = OTHER; note = 2'-O-methylcytidine-3'-phosphate
  modified_base 13: mod_base = OTHER; note = 2'-O-methyladenosine-3'-phosphate
  modified_base 14: mod_base = OTHER; note = 2'-O-methylcytidine-3'-phosphate
  modified_base 15: mod_base = OTHER; note = 2'-O-methyluridine-3'-phosphate
  modified_base 16: mod_base = OTHER; note = 2'-O-methylguanosine-3'-phosphate
  modified_base 17: mod_base = OTHER; note = 2'-O-methylguanosine-3'-phosphate
  modified_base 18: mod_base = OTHER; note = 2'-O-methyladenosine-3'-phosphate
  modified_base 19: mod_base = OTHER; note = 2'-O-methylguanosine-3'-phosphate
  modified_base 20: mod_base = OTHER; note = 2'-O-methyluridine-3'-phosphate
  modified_base 21: mod_base = OTHER; note = 2'-O-methyladenosine
acacctgtcagcactggagta

SEQ ID NO: 3755 - RNA, 21 nt, synthetic construct
  source 1..21: mol_type = other RNA
  modified_base 1: mod_base = OTHER; note = 2'-O-methylcytidine-3'-phosphate
  modified_base 2: mod_base = OTHER; note = 2'-O-methylcytidine-3'-phosphate
  modified_base 3: mod_base = OTHER; note = 2'-O-methyluridine-3'-phosphate
  modified_base 4: mod_base = OTHER; note = 2'-O-methylguanosine-3'-phosphate
  modified_base 5: mod_base = OTHER; note = 2'-O-methyluridine-3'-phosphate
  modified_base 6: mod_base = OTHER; note = 2'-O-methylcytidine-3'-phosphate
  modified_base 7: mod_base = OTHER; note = 2'-deoxy-2'-fluoroadenosine-3'-phosphate
  modified_base 8: mod_base = OTHER; note = 2'-O-methylguanosine-3'-phosphate
  modified_base 9: mod_base = OTHER; note = 2'-deoxy-2'-fluorocytidine-3'-phosphate
  modified_base 10: mod_base = OTHER; note = 2'-deoxy-2'-fluoroadenosine-3'-phosphate
  modified_base 11: mod_base = OTHER; note = 2'-deoxy-2'-fluorocytidine-3'-phosphate
  modified_base 12: mod_base = OTHER; note = 2'-O-methyluridine-3'-phosphate
  modified_base 13: mod_base = OTHER; note = 2'-O-methylguanosine-3'-phosphate
  modified_base 14: mod_base = OTHER; note = 2'-O-methylguanosine-3'-phosphate
  modified_base 15: mod_base = OTHER; note = 2'-O-methyladenosine-3'-phosphate
  modified_base 16: mod_base = OTHER; note = 2'-O-methylguanosine-3'-phosphate
  modified_base 17: mod_base = OTHER; note = 2'-O-methyluridine-3'-phosphate
  modified_base 18: mod_base = OTHER; note = 2'-O-methylguanosine-3'-phosphate
  modified_base 19: mod_base = OTHER; note = 2'-O-methylcytidine-3'-phosphate
  modified_base 20: mod_base = OTHER; note = 2'-O-methyladenosine-3'-phosphate
  modified_base 21: mod_base = OTHER; note = 2'-O-methyladenosine
cctgtcagcactggagtgcaa

SEQ ID NO: 3756 - RNA, 21 nt, synthetic construct
  source 1..21: mol_type = other RNA
  modified_base 1: mod_base = OTHER; note = 2'-O-methyluridine-3'-phosphate
  modified_base 2: mod_base = OTHER; note = 2'-O-methylguanosine-3'-phosphate
  modified_base 3: mod_base = OTHER; note = 2'-O-methyluridine-3'-phosphate
  modified_base 4: mod_base = OTHER; note = 2'-O-methylcytidine-3'-phosphate
  modified_base 5: mod_base = OTHER; note = 2'-O-methyladenosine-3'-phosphate
  modified_base 6: mod_base = OTHER; note = 2'-O-methylguanosine-3'-phosphate
  modified_base 7: mod_base = OTHER; note = 2'-deoxy-2'-fluorocytidine-3'-phosphate
  modified_base 8: mod_base = OTHER; note = 2'-O-methyladenosine-3'-phosphate
  modified_base 9: mod_base = OTHER; note = 2'-deoxy-2'-fluorocytidine-3'-phosphate
  modified_base 10: mod_base = OTHER; note = 2'-deoxy-2'-fluorouridine-3'-phosphate
  modified_base 11: mod_base = OTHER; note = 2'-deoxy-2'-fluoroguanosine-3'-phosphate
  modified_base 12: mod_base = OTHER; note = 2'-O-methylguanosine-3'-phosphate
  modified_base 13: mod_base = OTHER; note = 2'-O-methyladenosine-3'-phosphate
  modified_base 14: mod_base = OTHER; note = 2'-O-methylguanosine-3'-phosphate
  modified_base 15: mod_base = OTHER; note = 2'-O-methyluridine-3'-phosphate
  modified_base 16: mod_base = OTHER; note = 2'-O-methylguanosine-3'-phosphate
  modified_base 17: mod_base = OTHER; note = 2'-O-methylcytidine-3'-phosphate
  modified_base 18: mod_base = OTHER; note = 2'-O-methyladenosine-3'-phosphate
  modified_base 19: mod_base = OTHER; note = 2'-O-methylcytidine-3'-phosphate
  modified_base 20: mod_base = OTHER; note = 2'-O-methyladenosine-3'-phosphate
  modified_base 21: mod_base = OTHER; note = 2'-O-methyladenosine
tgtcagcactggagtgcacaa

SEQ ID NO: 3757 - RNA, 21 nt, synthetic construct
  source 1..21: mol_type = other RNA
  modified_base 1: mod_base = OTHER; note = 2'-O-methyluridine-3'-phosphate
  modified_base 2: mod_base = OTHER; note = 2'-O-methylcytidine-3'-phosphate
  modified_base 3: mod_base = OTHER; note = 2'-O-methyladenosine-3'-phosphate
  modified_base 4: mod_base = OTHER; note = 2'-O-methylguanosine-3'-phosphate
  modified_base 5: mod_base = OTHER; note = 2'-O-methylcytidine-3'-phosphate
  modified_base 6: mod_base = OTHER; note = 2'-O-methyladenosine-3'-phosphate
  modified_base 7: mod_base = OTHER; note = 2'-deoxy-2'-fluorocytidine-3'-phosphate
  modified_base 8: mod_base = OTHER; note = 2'-O-methyluridine-3'-phosphate
  modified_base 9: mod_base = OTHER; note = 2'-deoxy-2'-fluoroguanosine-3'-phosphate
  modified_base 10: mod_base = OTHER; note = 2'-deoxy-2'-fluoroguanosine-3'-phosphate
  modified_base 11: mod_base = OTHER; note = 2'-deoxy-2'-fluoroadenosine-3'-phosphate
  modified_base 12: mod_base = OTHER; note = 2'-O-methylguanosine-3'-phosphate
  modified_base 13: mod_base = OTHER; note = 2'-O-methyluridine-3'-phosphate
  modified_base 14: mod_base = OTHER; note = 2'-O-methylguanosine-3'-phosphate
  modified_base 15: mod_base = OTHER; note = 2'-O-methylcytidine-3'-phosphate
  modified_base 16: mod_base = OTHER; note = 2'-O-methyladenosine-3'-phosphate
  modified_base 17: mod_base = OTHER; note = 2'-O-methylcytidine-3'-phosphate
  modified_base 18: mod_base = OTHER; note = 2'-O-methyladenosine-3'-phosphate
  modified_base 19: mod_base = OTHER; note = 2'-O-methylguanosine-3'-phosphate
  modified_base 20: mod_base = OTHER; note = 2'-O-methyladenosine-3'-phosphate
  modified_base 21: mod_base = OTHER; note = 2'-O-methyladenosine
tcagcactggagtgcacagaa

SEQ ID NO: 3758 - RNA, 21 nt, synthetic construct
  source 1..21: mol_type = other RNA
  modified_base 1: mod_base = OTHER; note = 2'-O-methylcytidine-3'-phosphate
  modified_base 2: mod_base = OTHER; note = 2'-O-methyladenosine-3'-phosphate
  modified_base 3: mod_base = OTHER; note = 2'-O-methylguanosine-3'-phosphate
  modified_base 4: mod_base = OTHER; note = 2'-O-methylcytidine-3'-phosphate
  modified_base 5: mod_base = OTHER; note = 2'-O-methyladenosine-3'-phosphate
  modified_base 6: mod_base = OTHER; note = 2'-O-methylcytidine-3'-phosphate
  modified_base 7: mod_base = OTHER; note = 2'-deoxy-2'-fluorouridine-3'-phosphate
  modified_base 8: mod_base = OTHER; note = 2'-O-methylguanosine-3'-phosphate
  modified_base 9: mod_base = OTHER; note = 2'-deoxy-2'-fluoroguanosine-3'-phosphate
  modified_base 10: mod_base = OTHER; note = 2'-deoxy-2'-fluoroadenosine-3'-phosphate
  modified_base 11: mod_base = OTHER; note = 2'-deoxy-2'-fluoroguanosine-3'-phosphate
  modified_base 12: mod_base = OTHER; note = 2'-O-methyluridine-3'-phosphate
  modified_base 13: mod_base = OTHER; note = 2'-O-methylguanosine-3'-phosphate
  modified_base 14: mod_base = OTHER; note = 2'-O-methylcytidine-3'-phosphate
  modified_base 15: mod_base = OTHER; note = 2'-O-methyladenosine-3'-phosphate
  modified_base 16: mod_base = OTHER; note = 2'-O-methylcytidine-3'-phosphate
  modified_base 17: mod_base = OTHER; note = 2'-O-methyladenosine-3'-phosphate
  modified_base 18: mod_base = OTHER; note = 2'-O-methylguanosine-3'-phosphate
  modified_base 19: mod_base = OTHER; note = 2'-O-methyladenosine-3'-phosphate
  modified_base 20: mod_base = OTHER; note = 2'-O-methylcytidine-3'-phosphate
  modified_base 21: mod_base = OTHER; note = 2'-O-methyladenosine
cagcactggagtgcacagaca

SEQ ID NO: 3759 - RNA, 21 nt, synthetic construct
  source 1..21: mol_type = other RNA
  modified_base 1: mod_base = OTHER; note = 2'-O-methyladenosine-3'-phosphate
  modified_base 2: mod_base = OTHER; note = 2'-O-methylguanosine-3'-phosphate
  modified_base 3: mod_base = OTHER; note = 2'-O-methylcytidine-3'-phosphate
  modified_base 4: mod_base = OTHER; note = 2'-O-methyladenosine-3'-phosphate
  modified_base 5: mod_base = OTHER; note = 2'-O-methylcytidine-3'-phosphate
  modified_base 6: mod_base = OTHER; note = 2'-O-methyluridine-3'-phosphate
  modified_base 7: mod_base = OTHER; note = 2'-deoxy-2'-fluoroguanosine-3'-phosphate
  modified_base 8: mod_base = OTHER; note = 2'-O-methylguanosine-3'-phosphate
  modified_base 9: mod_base = OTHER; note = 2'-deoxy-2'-fluoroadenosine-3'-phosphate
  modified_base 10: mod_base = OTHER; note = 2'-deoxy-2'-fluoroguanosine-3'-phosphate
  modified_base 11: mod_base = OTHER; note = 2'-deoxy-2'-fluorouridine-3'-phosphate
  modified_base 12: mod_base = OTHER; note = 2'-O-methylguanosine-3'-phosphate
  modified_base 13: mod_base = OTHER; note = 2'-O-methylcytidine-3'-phosphate
  modified_base 14: mod_base = OTHER; note = 2'-O-methyladenosine-3'-phosphate
  modified_base 15: mod_base = OTHER; note = 2'-O-methylcytidine-3'-phosphate
  modified_base 16: mod_base = OTHER; note = 2'-O-methyladenosine-3'-phosphate
  modified_base 17: mod_base = OTHER; note = 2'-O-methylguanosine-3'-phosphate
  modified_base 18: mod_base = OTHER; note = 2'-O-methyladenosine-3'-phosphate
  modified_base 19: mod_base = OTHER; note = 2'-O-methylcytidine-3'-phosphate
  modified_base 20: mod_base = OTHER; note = 2'-O-methylcytidine-3'-phosphate
  modified_base 21: mod_base = OTHER; note = 2'-O-methyladenosine
agcactggagtgcacagacca

SEQ ID NO: 3760 - RNA, 21 nt, synthetic construct
  source 1..21: mol_type = other RNA
  modified_base 1: mod_base = OTHER; note = 2'-O-methylcytidine-3'-phosphate
  modified_base 2: mod_base = OTHER; note = 2'-O-methyluridine-3'-phosphate
  modified_base 3: mod_base = OTHER; note = 2'-O-methylcytidine-3'-phosphate
  modified_base 4: mod_base = OTHER; note = 2'-O-methyladenosine-3'-phosphate
  modified_base 5: mod_base = OTHER; note = 2'-O-methylcytidine-3'-phosphate
  modified_base 6: mod_base = OTHER; note = 2'-O-methyladenosine-3'-phosphate
  modified_base 7: mod_base = OTHER; note = 2'-deoxy-2'-fluorocytidine-3'-phosphate
  modified_base 8: mod_base = OTHER; note = 2'-O-methyladenosine-3'-phosphate
  modified_base 9: mod_base = OTHER; note = 2'-deoxy-2'-fluorocytidine-3'-phosphate
  modified_base 10: mod_base = OTHER; note = 2'-deoxy-2'-fluoroadenosine-3'-phosphate
  modified_base 11: mod_base = OTHER; note = 2'-deoxy-2'-fluorouridine-3'-phosphate
  modified_base 12: mod_base = OTHER; note = 2'-O-methyladenosine-3'-phosphate
  modified_base 13: mod_base = OTHER; note = 2'-O-methyladenosine-3'-phosphate
  modified_base 14: mod_base = OTHER; note = 2'-O-methylcytidine-3'-phosphate
  modified_base 15: mod_base = OTHER; note = 2'-O-methyladenosine-3'-phosphate
  modified_base 16: mod_base = OTHER; note = 2'-O-methylguanosine-3'-phosphate
  modified_base 17: mod_base = OTHER; note = 2'-O-methylguanosine-3'-phosphate
  modified_base 18: mod_base = OTHER; note = 2'-O-methyladenosine-3'-phosphate
  modified_base 19: mod_base = OTHER; note = 2'-O-methylcytidine-3'-phosphate
  modified_base 20: mod_base = OTHER; note = 2'-O-methyladenosine-3'-phosphate
  modified_base 21: mod_base = OTHER; note = 2'-O-methyladenosine
ctcacacacataacaggacaa

SEQ ID NO: 3761 - RNA, 21 nt, synthetic construct
  source 1..21: mol_type = other RNA
  modified_base 1: mod_base = OTHER; note = 2'-O-methylcytidine-3'-phosphate
  modified_base 2: mod_base = OTHER; note = 2'-O-methyladenosine-3'-phosphate
  modified_base 3: mod_base = OTHER; note = 2'-O-methylcytidine-3'-phosphate
  modified_base 4: mod_base = OTHER; note = 2'-O-methyladenosine-3'-phosphate
  modified_base 5: mod_base = OTHER; note = 2'-O-methylcytidine-3'-phosphate
  modified_base 6: mod_base = OTHER; note = 2'-O-methyladenosine-3'-phosphate
  modified_base 7: mod_base = OTHER; note = 2'-deoxy-2'-fluorocytidine-3'-phosphate
  modified_base 8: mod_base = OTHER; note = 2'-O-methyladenosine-3'-phosphate
  modified_base 9: mod_base = OTHER; note = 2'-deoxy-2'-fluorouridine-3'-phosphate
  modified_base 10: mod_base = OTHER; note = 2'-deoxy-2'-fluoroadenosine-3'-phosphate
  modified_base 11: mod_base = OTHER; note = 2'-deoxy-2'-fluoroadenosine-3'-phosphate
  modified_base 12: mod_base = OTHER; note = 2'-O-methylcytidine-3'-phosphate
  modified_base 13: mod_base = OTHER; note = 2'-O-methyladenosine-3'-phosphate
  modified_base 14: mod_base = OTHER; note = 2'-O-methylguanosine-3'-phosphate
  modified_base 15: mod_base = OTHER; note = 2'-O-methylguanosine-3'-phosphate
  modified_base 16: mod_base = OTHER; note = 2'-O-methyladenosine-3'-phosphate
  modified_base 17: mod_base = OTHER; note = 2'-O-methylcytidine-3'-phosphate
  modified_base 18: mod_base = OTHER; note = 2'-O-methyladenosine-3'-phosphate
  modified_base 19: mod_base = OTHER; note = 2'-O-methylcytidine-3'-phosphate
  modified_base 20: mod_base = OTHER; note = 2'-O-methylcytidine-3'-phosphate
  modified_base 21: mod_base = OTHER; note = 2'-O-methyladenosine
cacacacataacaggacacca

SEQ ID NO: 3762 - RNA, 21 nt, synthetic construct
  source 1..21: mol_type = other RNA
  modified_base 1: mod_base = OTHER; note = 2'-O-methyladenosine-3'-phosphate
  modified_base 2: mod_base = OTHER; note = 2'-O-methylcytidine-3'-phosphate
  modified_base 3: mod_base = OTHER; note = 2'-O-methyladenosine-3'-phosphate
  modified_base 4: mod_base = OTHER; note = 2'-O-methylcytidine-3'-phosphate
  modified_base 5: mod_base = OTHER; note = 2'-O-methyladenosine-3'-phosphate
  modified_base 6: mod_base = OTHER; note = 2'-O-methylcytidine-3'-phosphate
  modified_base 7: mod_base = OTHER; note = 2'-deoxy-2'-fluoroadenosine-3'-phosphate
  modified_base 8: mod_base = OTHER; note = 2'-O-methyluridine-3'-phosphate
  modified_base 9: mod_base = OTHER; note = 2'-deoxy-2'-fluoroadenosine-3'-phosphate
  modified_base 10: mod_base = OTHER; note = 2'-deoxy-2'-fluoroadenosine-3'-phosphate
  modified_base 11: mod_base = OTHER; note = 2'-deoxy-2'-fluorocytidine-3'-phosphate
  modified_base 12: mod_base = OTHER; note = 2'-O-methyladenosine-3'-phosphate
  modified_base 13: mod_base = OTHER; note = 2'-O-methylguanosine-3'-phosphate
  modified_base 14: mod_base = OTHER; note = 2'-O-methylguanosine-3'-phosphate
  modified_base 15: mod_base = OTHER; note = 2'-O-methyladenosine-3'-phosphate
  modified_base 16: mod_base = OTHER; note = 2'-O-methylcytidine-3'-phosphate
  modified_base 17: mod_base = OTHER; note = 2'-O-methyladenosine-3'-phosphate
  modified_base 18: mod_base = OTHER; note = 2'-O-methylcytidine-3'-phosphate
  modified_base 19: mod_base = OTHER; note = 2'-O-methylcytidine-3'-phosphate
  modified_base 20: mod_base = OTHER; note = 2'-O-methyladenosine-3'-phosphate
  modified_base 21: mod_base = OTHER; note = 2'-O-methyladenosine
acacacataacaggacaccaa

SEQ ID NO: 3763 - RNA, 21 nt, synthetic construct
  source 1..21: mol_type = other RNA
  modified_base 1: mod_base = OTHER; note = 2'-O-methylcytidine-3'-phosphate
  modified_base 2: mod_base = OTHER; note = 2'-O-methyladenosine-3'-phosphate
  modified_base 3: mod_base = OTHER; note = 2'-O-methylcytidine-3'-phosphate
  modified_base 4: mod_base = OTHER; note = 2'-O-methyladenosine-3'-phosphate
  modified_base 5: mod_base = OTHER; note = 2'-O-methylcytidine-3'-phosphate
  modified_base 6: mod_base = OTHER; note = 2'-O-methyladenosine-3'-phosphate
  modified_base 7: mod_base = OTHER; note = 2'-deoxy-2'-fluorouridine-3'-phosphate
  modified_base 8: mod_base = OTHER; note = 2'-O-methyladenosine-3'-phosphate
  modified_base 9: mod_base = OTHER; note = 2'-deoxy-2'-fluoroadenosine-3'-phosphate
  modified_base 10: mod_base = OTHER; note = 2'-deoxy-2'-fluorocytidine-3'-phosphate
  modified_base 11: mod_base = OTHER; note = 2'-deoxy-2'-fluoroadenosine-3'-phosphate
  modified_base 12: mod_base = OTHER; note = 2'-O-methylguanosine-3'-phosphate
  modified_base 13: mod_base = OTHER; note = 2'-O-methylguanosine-3'-phosphate
  modified_base 14: mod_base = OTHER; note = 2'-O-methyladenosine-3'-phosphate
  modified_base 15: mod_base = OTHER; note = 2'-O-methylcytidine-3'-phosphate
  modified_base 16: mod_base = OTHER; note = 2'-O-methyladenosine-3'-phosphate
  modified_base 17: mod_base = OTHER; note = 2'-O-methylcytidine-3'-phosphate
  modified_base 18: mod_base = OTHER; note = 2'-O-methylcytidine-3'-phosphate
  modified_base 19: mod_base = OTHER; note = 2'-O-methyladenosine-3'-phosphate
  modified_base 20: mod_base = OTHER; note = 2'-O-methylguanosine-3'-phosphate
  modified_base 21: mod_base = OTHER; note = 2'-O-methyladenosine
cacacataacaggacaccaga

SEQ ID NO: 3764 - RNA, 21 nt, synthetic construct
  source 1..21: mol_type = other RNA
  modified_base 1: mod_base = OTHER; note = 2'-O-methyladenosine-3'-phosphate
  modified_base 2: mod_base = OTHER; note = 2'-O-methylcytidine-3'-phosphate
  modified_base 3: mod_base = OTHER; note = 2'-O-methyladenosine-3'-phosphate
  modified_base 4: mod_base = OTHER; note = 2'-O-methylcytidine-3'-phosphate
  modified_base 5: mod_base = OTHER; note = 2'-O-methyladenosine-3'-phosphate
  modified_base 6: mod_base = OTHER; note = 2'-O-methyluridine-3'-phosphate
  modified_base 7: mod_base = OTHER; note = 2'-deoxy-2'-fluoroadenosine-3'-phosphate
  modified_base 8: mod_base = OTHER; note = 2'-O-methyladenosine-3'-phosphate
  modified_base 9: mod_base = OTHER; note = 2'-deoxy-2'-fluorocytidine-3'-phosphate
  modified_base 10: mod_base = OTHER; note = 2'-deoxy-2'-fluoroadenosine-3'-phosphate
  modified_base 11: mod_base = OTHER; note = 2'-deoxy-2'-fluoroguanosine-3'-phosphate
  modified_base 12: mod_base = OTHER; note = 2'-O-methylguanosine-3'-phosphate
  modified_base 13: mod_base = OTHER; note = 2'-O-methyladenosine-3'-phosphate
  modified_base 14: mod_base = OTHER; note = 2'-O-methylcytidine-3'-phosphate
  modified_base 15: mod_base = OTHER; note = 2'-O-methyladenosine-3'-phosphate
  modified_base 16: mod_base = OTHER; note = 2'-O-methylcytidine-3'-phosphate
  modified_base 17: mod_base = OTHER; note = 2'-O-methylcytidine-3'-phosphate
  modified_base 18: mod_base = OTHER; note = 2'-O-methyladenosine-3'-phosphate
  modified_base 19: mod_base = OTHER; note = 2'-O-methylguanosine-3'-phosphate
  modified_base 20: mod_base = OTHER; note = 2'-O-methyladenosine-3'-phosphate
  modified_base 21: mod_base = OTHER; note = 2'-O-methyladenosine
acacataacaggacaccagaa

SEQ ID NO: 3765 - RNA, 21 nt, synthetic construct
  source 1..21: mol_type = other RNA
  modified_base 1: mod_base = OTHER; note = 2'-O-methylcytidine-3'-phosphate
  modified_base 2: mod_base = OTHER; note = 2'-O-methyladenosine-3'-phosphate
  modified_base 3: mod_base = OTHER; note = 2'-O-methylcytidine-3'-phosphate
  modified_base 4: mod_base = OTHER; note = 2'-O-methyladenosine-3'-phosphate
  modified_base 5: mod_base = OTHER; note = 2'-O-methyluridine-3'-phosphate
  modified_base 6: mod_base = OTHER; note = 2'-O-methyladenosine-3'-phosphate
  modified_base 7: mod_base = OTHER; note = 2'-deoxy-2'-fluoroadenosine-3'-phosphate
  modified_base 8: mod_base = OTHER; note = 2'-O-methylcytidine-3'-phosphate
  modified_base 9: mod_base = OTHER; note = 2'-deoxy-2'-fluoroadenosine-3'-phosphate
  modified_base 10: mod_base = OTHER; note = 2'-deoxy-2'-fluoroguanosine-3'-phosphate
  modified_base 11: mod_base = OTHER; note = 2'-deoxy-2'-fluoroguanosine-3'-phosphate
  modified_base 12: mod_base = OTHER; note = 2'-O-methyladenosine-3'-phosphate
  modified_base 13: mod_base = OTHER; note = 2'-O-methylcytidine-3'-phosphate
  modified_base 14: mod_base = OTHER; note = 2'-O-methyladenosine-3'-phosphate
  modified_base 15: mod_base = OTHER; note = 2'-O-methylcytidine-3'-phosphate
  modified_base 16: mod_base = OTHER; note = 2'-O-methylcytidine-3'-phosphate
  modified_base 17: mod_base = OTHER; note = 2'-O-methyladenosine-3'-phosphate
  modified_base 18: mod_base = OTHER; note = 2'-O-methylguanosine-3'-phosphate
  modified_base 19: mod_base = OTHER; note = 2'-O-methyladenosine-3'-phosphate
  modified_base 20: mod_base = OTHER; note = 2'-O-methyladenosine-3'-phosphate
  modified_base 21: mod_base = OTHER; note = 2'-O-methyladenosine
cacataacaggacaccagaaa

SEQ ID NO: 3766 - RNA, 21 nt, synthetic construct
  source 1..21: mol_type = other RNA
  modified_base 1: mod_base = OTHER; note = 2'-O-methyladenosine-3'-phosphate
  modified_base 2: mod_base = OTHER; note = 2'-O-methylcytidine-3'-phosphate
  modified_base 3: mod_base = OTHER; note = 2'-O-methyladenosine-3'-phosphate
  modified_base 4: mod_base = OTHER; note = 2'-O-methyluridine-3'-phosphate
  modified_base 5: mod_base = OTHER; note = 2'-O-methyladenosine-3'-phosphate
  modified_base 6: mod_base = OTHER; note = 2'-O-methyladenosine-3'-phosphate
  modified_base 7: mod_base = OTHER; note = 2'-deoxy-2'-fluorocytidine-3'-phosphate
  modified_base 8: mod_base = OTHER; note = 2'-O-methyladenosine-3'-phosphate
  modified_base 9: mod_base = OTHER; note = 2'-deoxy-2'-fluoroguanosine-3'-phosphate
  modified_base 10: mod_base = OTHER; note = 2'-deoxy-2'-fluoroguanosine-3'-phosphate
  modified_base 11: mod_base = OTHER; note = 2'-deoxy-2'-fluoroadenosine-3'-phosphate
  modified_base 12: mod_base = OTHER; note = 2'-O-methylcytidine-3'-phosphate
  modified_base 13: mod_base = OTHER; note = 2'-O-methyladenosine-3'-phosphate
  modified_base 14: mod_base = OTHER; note = 2'-O-methylcytidine-3'-phosphate
  modified_base 15: mod_base = OTHER; note = 2'-O-methylcytidine-3'-phosphate
  modified_base 16: mod_base = OTHER; note = 2'-O-methyladenosine-3'-phosphate
  modified_base 17: mod_base = OTHER; note = 2'-O-methylguanosine-3'-phosphate
  modified_base 18: mod_base = OTHER; note = 2'-O-methyladenosine-3'-phosphate
  modified_base 19: mod_base = OTHER; note = 2'-O-methyladenosine-3'-phosphate
  modified_base 20: mod_base = OTHER; note = 2'-O-methyladenosine-3'-phosphate
  modified_base 21: mod_base = OTHER; note = 2'-O-methyladenosine
acataacaggacaccagaaaa

SEQ ID NO: 3767 - RNA, 21 nt, synthetic construct
  source 1..21: mol_type = other RNA
  modified_base 1: mod_base = OTHER; note = 2'-O-methylcytidine-3'-phosphate
  modified_base 2: mod_base = OTHER; note = 2'-O-methyladenosine-3'-phosphate
  modified_base 3: mod_base = OTHER; note = 2'-O-methyluridine-3'-phosphate
  modified_base 4: mod_base = OTHER; note = 2'-O-methyladenosine-3'-phosphate
  modified_base 5: mod_base = OTHER; note = 2'-O-methyladenosine-3'-phosphate
  modified_base 6: mod_base = OTHER; note = 2'-O-methylcytidine-3'-phosphate
  modified_base 7: mod_base = OTHER; note = 2'-deoxy-2'-fluoroadenosine-3'-phosphate
  modified_base 8: mod_base = OTHER; note = 2'-O-methylguanosine-3'-phosphate
  modified_base 9: mod_base = OTHER; note = 2'-deoxy-2'-fluoroguanosine-3'-phosphate
  modified_base 10: mod_base = OTHER; note = 2'-deoxy-2'-fluoroadenosine-3'-phosphate
  modified_base 11: mod_base = OTHER; note = 2'-deoxy-2'-fluorocytidine-3'-phosphate
  modified_base 12: mod_base = OTHER; note = 2'-O-methyladenosine-3'-phosphate
  modified_base 13: mod_base = OTHER; note = 2'-O-methylcytidine-3'-phosphate
  modified_base 14: mod_base = OTHER; note = 2'-O-methylcytidine-3'-phosphate
  modified_base 15: mod_base = OTHER; note = 2'-O-methyladenosine-3'-phosphate
  modified_base 16: mod_base = OTHER; note = 2'-O-methylguanosine-3'-phosphate
  modified_base 17: mod_base = OTHER; note = 2'-O-methyladenosine-3'-phosphate
  modified_base 18: mod_base = OTHER; note = 2'-O-methyladenosine-3'-phosphate
  modified_base 19: mod_base = OTHER; note = 2'-O-methyladenosine-3'-phosphate
  modified_base 20: mod_base = OTHER; note = 2'-O-methyladenosine-3'-phosphate
  modified_base 21: mod_base = OTHER; note = 2'-O-methyladenosine
cataacaggacaccagaaaaa

SEQ ID NO: 3768 - RNA, 21 nt, synthetic construct
  source 1..21: mol_type = other RNA
  modified_base 1: mod_base = OTHER; note = 2'-O-methyladenosine-3'-phosphate
  modified_base 2: mod_base = OTHER; note = 2'-O-methyluridine-3'-phosphate
  modified_base 3: mod_base = OTHER; note = 2'-O-methyladenosine-3'-phosphate
  modified_base 4: mod_base = OTHER; note = 2'-O-methyladenosine-3'-phosphate
  modified_base 5: mod_base = OTHER; note = 2'-O-methylcytidine-3'-phosphate
  modified_base 6: mod_base = OTHER; note = 2'-O-methyladenosine-3'-phosphate
  modified_base 7: mod_base = OTHER; note = 2'-deoxy-2'-fluoroguanosine-3'-phosphate
  modified_base 8: mod_base = OTHER; note = 2'-O-methylguanosine-3'-phosphate
  modified_base 9: mod_base = OTHER; note = 2'-deoxy-2'-fluoroadenosine-3'-phosphate
  modified_base 10: mod_base = OTHER; note = 2'-deoxy-2'-fluorocytidine-3'-phosphate
  modified_base 11: mod_base = OTHER; note = 2'-deoxy-2'-fluoroadenosine-3'-phosphate
  modified_base 12: mod_base = OTHER; note = 2'-O-methylcytidine-3'-phosphate
  modified_base 13: mod_base = OTHER; note = 2'-O-methylcytidine-3'-phosphate
  modified_base 14: mod_base = OTHER; note = 2'-O-methyladenosine-3'-phosphate
  modified_base 15: mod_base = OTHER; note = 2'-O-methylguanosine-3'-phosphate
  modified_base 16: mod_base = OTHER; note = 2'-O-methyladenosine-3'-phosphate
  modified_base 17: mod_base = OTHER; note = 2'-O-methyladenosine-3'-phosphate
  modified_base 18: mod_base = OTHER; note = 2'-O-methyladenosine-3'-phosphate
  modified_base 19: mod_base = OTHER; note = 2'-O-methyladenosine-3'-phosphate
  modified_base 20: mod_base = OTHER; note = 2'-O-methylcytidine-3'-phosphate
  modified_base 21: mod_base = OTHER; note = 2'-O-methyladenosine
ataacaggacaccagaaaaca

SEQ ID NO: 3769 - RNA, 21 nt, synthetic construct
  source 1..21: mol_type = other RNA
  modified_base 1: mod_base = OTHER; note = 2'-O-methyluridine-3'-phosphate
  modified_base 2: mod_base = OTHER; note = 2'-O-methyladenosine-3'-phosphate
  modified_base 3: mod_base = OTHER; note = 2'-O-methyladenosine-3'-phosphate
  modified_base 4: mod_base = OTHER; note = 2'-O-methylcytidine-3'-phosphate
  modified_base 5: mod_base = OTHER; note = 2'-O-methyladenosine-3'-phosphate
  modified_base 6: mod_base = OTHER; note = 2'-O-methylguanosine-3'-phosphate
  modified_base 7: mod_base = OTHER; note = 2'-deoxy-2'-fluoroguanosine-3'-phosphate
  modified_base 8: mod_base = OTHER; note = 2'-O-methyladenosine-3'-phosphate
  modified_base 9: mod_base = OTHER; note = 2'-deoxy-2'-fluorocytidine-3'-phosphate
  modified_base 10: mod_base = OTHER; note = 2'-deoxy-2'-fluoroadenosine-3'-phosphate
  modified_base 11: mod_base = OTHER; note = 2'-deoxy-2'-fluorocytidine-3'-phosphate
  modified_base 12: mod_base = OTHER; note = 2'-O-methylcytidine-3'-phosphate
  modified_base 13: mod_base = OTHER; note = 2'-O-methyladenosine-3'-phosphate
  modified_base 14: mod_base = OTHER; note = 2'-O-methylguanosine-3'-phosphate
  modified_base 15: mod_base = OTHER; note = 2'-O-methyladenosine-3'-phosphate
  modified_base 16: mod_base = OTHER; note = 2'-O-methyladenosine-3'-phosphate
  modified_base 17: mod_base = OTHER; note = 2'-O-methyladenosine-3'-phosphate
  modified_base 18: mod_base = OTHER; note = 2'-O-methyladenosine-3'-phosphate
  modified_base 19: mod_base = OTHER; note = 2'-O-methylcytidine-3'-phosphate
  modified_base 20: mod_base = OTHER; note = 2'-O-methyluridine-3'-phosphate
  modified_base 21: mod_base = OTHER; note = 2'-O-methyladenosine
taacaggacaccagaaaacta

SEQ ID NO: 3770 - RNA, 21 nt, synthetic construct
  source 1..21: mol_type = other RNA
  modified_base 1: mod_base = OTHER; note = 2'-O-methyladenosine-3'-phosphate
  modified_base 2: mod_base = OTHER; note = 2'-O-methyladenosine-3'-phosphate
  modified_base 3: mod_base = OTHER; note = 2'-O-methylcytidine-3'-phosphate
  modified_base 4: mod_base = OTHER; note = 2'-O-methyladenosine-3'-phosphate
  modified_base 5: mod_base = OTHER; note = 2'-O-methylguanosine-3'-phosphate
  modified_base 6: mod_base = OTHER; note = 2'-O-methylguanosine-3'-phosphate
  modified_base 7: mod_base = OTHER; note = 2'-deoxy-2'-fluoroadenosine-3'-phosphate
  modified_base 8: mod_base = OTHER; note = 2'-O-methylcytidine-3'-phosphate
  modified_base 9: mod_base = OTHER; note = 2'-deoxy-2'-fluoroadenosine-3'-phosphate
  modified_base 10: mod_base = OTHER; note = 2'-deoxy-2'-fluorocytidine-3'-phosphate
  modified_base 11: mod_base = OTHER; note = 2'-deoxy-2'-fluorocytidine-3'-phosphate
  modified_base 12: mod_base = OTHER; note = 2'-O-methyladenosine-3'-phosphate
  modified_base 13: mod_base = OTHER; note = 2'-O-methylguanosine-3'-phosphate
  modified_base 14: mod_base = OTHER; note = 2'-O-methyladenosine-3'-phosphate
  modified_base 15: mod_base = OTHER; note = 2'-O-methyladenosine-3'-phosphate
  modified_base 16: mod_base = OTHER; note = 2'-O-methyladenosine-3'-phosphate
  modified_base 17: mod_base = OTHER; note = 2'-O-methyladenosine-3'-phosphate
  modified_base 18: mod_base = OTHER; note = 2'-O-methylcytidine-3'-phosphate
  modified_base 19: mod_base = OTHER; note = 2'-O-methyluridine-3'-phosphate
  modified_base 20: mod_base = OTHER; note = 2'-O-methyluridine-3'-phosphate
  modified_base 21: mod_base = OTHER; note = 2'-O-methyladenosine
aacaggacaccagaaaactta

SEQ ID NO: 3771 - RNA, 21 nt, synthetic construct
  source 1..21: mol_type = other RNA
  modified_base 1: mod_base = OTHER; note = 2'-O-methylcytidine-3'-phosphate
  modified_base 2: mod_base = OTHER; note = 2'-O-methylcytidine-3'-phosphate
  modified_base 3: mod_base = OTHER; note = 2'-O-methyluridine-3'-phosphate
  modified_base 4: mod_base = OTHER; note = 2'-O-methylguanosine-3'-phosphate
  modified_base 5: mod_base = OTHER; note = 2'-O-methylcytidine-3'-phosphate
  modified_base 6: mod_base = OTHER; note = 2'-O-methyladenosine-3'-phosphate
  modified_base 7: mod_base = OTHER; note = 2'-deoxy-2'-fluoroadenosine-3'-phosphate
  modified_base 8: mod_base = OTHER; note = 2'-O-methyladenosine-3'-phosphate
  modified_base 9: mod_base = OTHER; note = 2'-deoxy-2'-fluoroadenosine-3'-phosphate
  modified_base 10: mod_base = OTHER; note = 2'-deoxy-2'-fluoroadenosine-3'-phosphate
  modified_base 11: mod_base = OTHER; note = 2'-deoxy-2'-fluorouridine-3'-phosphate
  modified_base 12: mod_base = OTHER; note = 2'-O-methyluridine-3'-phosphate
  modified_base 13: mod_base = OTHER; note = 2'-O-methyluridine-3'-phosphate
  modified_base 14: mod_base = OTHER; note = 2'-O-methylguanosine-3'-phosphate
  modified_base 15: mod_base = OTHER; note = 2'-O-methylguanosine-3'-phosphate
  modified_base 16: mod_base = OTHER; note = 2'-O-methyladenosine-3'-phosphate
  modified_base 17: mod_base = OTHER; note = 2'-O-methyluridine-3'-phosphate
  modified_base 18: mod_base = OTHER; note = 2'-O-methylguanosine-3'-phosphate
  modified_base 19: mod_base = OTHER; note = 2'-O-methyladenosine-3'-phosphate
  modified_base 20: mod_base = OTHER; note = 2'-O-methyladenosine-3'-phosphate
  modified_base 21: mod_base = OTHER; note = 2'-O-methyladenosine
cctgcaaaaatttggatgaaa

SEQ ID NO: 3772 - RNA, 21 nt, synthetic construct
  source 1..21: mol_type = other RNA
  modified_base 1: mod_base = OTHER; note = 2'-O-methylcytidine-3'-phosphate
  modified_base 2: mod_base = OTHER; note = 2'-O-methyluridine-3'-phosphate
  modified_base 3: mod_base = OTHER; note = 2'-O-methylguanosine-3'-phosphate
  modified_base 4: mod_base = OTHER; note = 2'-O-methylcytidine-3'-phosphate
  modified_base 5: mod_base = OTHER; note = 2'-O-methyladenosine-3'-phosphate
  modified_base 6: mod_base = OTHER; note = 2'-O-methyladenosine-3'-phosphate
  modified_base 7: mod_base = OTHER; note = 2'-deoxy-2'-fluoroadenosine-3'-phosphate
  modified_base 8: mod_base = OTHER; note = 2'-O-methyladenosine-3'-phosphate
  modified_base 9: mod_base = OTHER; note = 2'-deoxy-2'-fluoroadenosine-3'-phosphate
  modified_base 10: mod_base = OTHER; note = 2'-deoxy-2'-fluorouridine-3'-phosphate
  modified_base 11: mod_base = OTHER; note = 2'-deoxy-2'-fluorouridine-3'-phosphate
  modified_base 12: mod_base = OTHER; note = 2'-O-methyluridine-3'-phosphate
  modified_base 13: mod_base = OTHER; note = 2'-O-methylguanosine-3'-phosphate
  modified_base 14: mod_base = OTHER; note = 2'-O-methylguanosine-3'-phosphate
  modified_base 15: mod_base = OTHER; note = 2'-O-methyladenosine-3'-phosphate
  modified_base 16: mod_base = OTHER; note = 2'-O-methyluridine-3'-phosphate
  modified_base 17: mod_base = OTHER; note = 2'-O-methylguanosine-3'-phosphate
  modified_base 18: mod_base = OTHER; note = 2'-O-methyladenosine-3'-phosphate
  modified_base 19: mod_base = OTHER; note = 2'-O-methyladenosine-3'-phosphate
  modified_base 20: mod_base = OTHER; note = 2'-O-methyladenosine-3'-phosphate
  modified_base 21: mod_base = OTHER; note = 2'-O-methyladenosine
ctgcaaaaatttggatgaaaa

SEQ ID NO: 3773 - RNA, 21 nt, synthetic construct
  source 1..21: mol_type = other RNA
  modified_base 1: mod_base = OTHER; note = 2'-O-methyluridine-3'-phosphate
  modified_base 2: mod_base = OTHER; note = 2'-O-methylguanosine-3'-phosphate
  modified_base 3: mod_base = OTHER; note = 2'-O-methylcytidine-3'-phosphate
  modified_base 4: mod_base = OTHER; note = 2'-O-methyladenosine-3'-phosphate
  modified_base 5: mod_base = OTHER; note = 2'-O-methyladenosine-3'-phosphate
  modified_base 6: mod_base = OTHER; note = 2'-O-methyladenosine-3'-phosphate
  modified_base 7: mod_base = OTHER; note = 2'-deoxy-2'-fluoroadenosine-3'-phosphate
  modified_base 8: mod_base = OTHER; note = 2'-O-methyladenosine-3'-phosphate
  modified_base 9: mod_base = OTHER; note = 2'-deoxy-2'-fluorouridine-3'-phosphate
  modified_base 10: mod_base = OTHER; note = 2'-deoxy-2'-fluorouridine-3'-phosphate
  modified_base 11: mod_base = OTHER; note = 2'-deoxy-2'-fluorouridine-3'-phosphate
  modified_base 12: mod_base = OTHER; note = 2'-O-methylguanosine-3'-phosphate
  modified_base 13: mod_base = OTHER; note = 2'-O-methylguanosine-3'-phosphate
  modified_base 14: mod_base = OTHER; note = 2'-O-methyladenosine-3'-phosphate
  modified_base 15: mod_base = OTHER; note = 2'-O-methyluridine-3'-phosphate
  modified_base 16: mod_base = OTHER; note = 2'-O-methylguanosine-3'-phosphate
  modified_base 17: mod_base = OTHER; note = 2'-O-methyladenosine-3'-phosphate
  modified_base 18: mod_base = OTHER; note = 2'-O-methyladenosine-3'-phosphate
  modified_base 19: mod_base = OTHER; note = 2'-O-methyladenosine-3'-phosphate
  modified_base 20: mod_base = OTHER; note = 2'-O-methyladenosine-3'-phosphate
  modified_base 21: mod_base = OTHER; note = 2'-O-methyladenosine
tgcaaaaatttggatgaaaaa

SEQ ID NO: 3774 - RNA, 21 nt, synthetic construct
  source 1..21: mol_type = other RNA
  modified_base 1: mod_base = OTHER; note = 2'-O-methylguanosine-3'-phosphate
  modified_base 2: mod_base = OTHER; note = 2'-O-methylcytidine-3'-phosphate
  modified_base 3: mod_base = OTHER; note = 2'-O-methyladenosine-3'-phosphate
  modified_base 4: mod_base = OTHER; note = 2'-O-methyladenosine-3'-phosphate
  modified_base 5: mod_base = OTHER; note = 2'-O-methyladenosine-3'-phosphate
  modified_base 6: mod_base = OTHER; note = 2'-O-methyladenosine-3'-phosphate
  modified_base 7: mod_base = OTHER; note = 2'-deoxy-2'-fluoroadenosine-3'-phosphate
  modified_base 8: mod_base = OTHER; note = 2'-O-methyluridine-3'-phosphate
  modified_base 9: mod_base = OTHER; note = 2'-deoxy-2'-fluorouridine-3'-phosphate
  modified_base 10: mod_base = OTHER; note = 2'-deoxy-2'-fluorouridine-3'-phosphate
  modified_base 11: mod_base = OTHER; note = 2'-deoxy-2'-fluoroguanosine-3'-phosphate
  modified_base 12: mod_base = OTHER; note = 2'-O-methylguanosine-3'-phosphate
  modified_base 13: mod_base = OTHER; note = 2'-O-methyladenosine-3'-phosphate
  modified_base 14: mod_base = OTHER; note = 2'-O-methyluridine-3'-phosphate
  modified_base 15: mod_base = OTHER; note = 2'-O-methylguanosine-3'-phosphate
  modified_base 16: mod_base = OTHER; note = 2'-O-methyladenosine-3'-phosphate
  modified_base 17: mod_base = OTHER; note = 2'-O-methyladenosine-3'-phosphate
  modified_base 18: mod_base = OTHER; note = 2'-O-methyladenosine-3'-phosphate
  modified_base 19: mod_base = OTHER; note = 2'-O-methyladenosine-3'-phosphate
  modified_base 20: mod_base = OTHER; note = 2'-O-methylcytidine-3'-phosphate
  modified_base 21: mod_base = OTHER; note = 2'-O-methyladenosine
gcaaaaatttggatgaaaaca

SEQ ID NO: 3775 - RNA, 21 nt, synthetic construct
  source 1..21: mol_type = other RNA
  modified_base 1: mod_base = OTHER; note = 2'-O-methylcytidine-3'-phosphate
  modified_base 2: mod_base = OTHER; note = 2'-O-methyladenosine-3'-phosphate
  modified_base 3: mod_base = OTHER; note = 2'-O-methyladenosine-3'-phosphate
  modified_base 4: mod_base = OTHER; note = 2'-O-methyladenosine-3'-phosphate
  modified_base 5: mod_base = OTHER; note = 2'-O-methyladenosine-3'-phosphate
  modified_base 6: mod_base = OTHER; note = 2'-O-methyladenosine-3'-phosphate
  modified_base 7: mod_base = OTHER; note = 2'-deoxy-2'-fluorouridine-3'-phosphate
  modified_base 8: mod_base = OTHER; note = 2'-O-methyluridine-3'-phosphate
  modified_base 9: mod_base = OTHER; note = 2'-deoxy-2'-fluorouridine-3'-phosphate
  modified_base 10: mod_base = OTHER; note = 2'-deoxy-2'-fluoroguanosine-3'-phosphate
  modified_base 11: mod_base = OTHER; note = 2'-deoxy-2'-fluoroguanosine-3'-phosphate
  modified_base 12: mod_base = OTHER; note = 2'-O-methyladenosine-3'-phosphate
  modified_base 13: mod_base = OTHER; note = 2'-O-methyluridine-3'-phosphate
  modified_base 14: mod_base = OTHER; note = 2'-O-methylguanosine-3'-phosphate
  modified_base 15: mod_base = OTHER; note = 2'-O-methyladenosine-3'-phosphate
  modified_base 16: mod_base = OTHER; note = 2'-O-methyladenosine-3'-phosphate
  modified_base 17: mod_base = OTHER; note = 2'-O-methyladenosine-3'-phosphate
  modified_base 18: mod_base = OTHER; note = 2'-O-methyladenosine-3'-phosphate
  modified_base 19: mod_base = OTHER; note = 2'-O-methylcytidine-3'-phosphate
  modified_base 20: mod_base = OTHER; note = 2'-O-methyluridine-3'-phosphate
  modified_base 21: mod_base = OTHER; note = 2'-O-methyladenosine
caaaaatttggatgaaaacta

SEQ ID NO: 3776 - RNA, 21 nt, synthetic construct
  source 1..21: mol_type = other RNA
  modified_base 1: mod_base = OTHER; note = 2'-O-methyladenosine-3'-phosphate
  modified_base 2: mod_base = OTHER; note = 2'-O-methyladenosine-3'-phosphate
  modified_base 3: mod_base = OTHER; note = 2'-O-methyladenosine-3'-phosphate
  modified_base 4: mod_base = OTHER; note = 2'-O-methyladenosine-3'-phosphate
  modified_base 5: mod_base = OTHER; note = 2'-O-methyladenosine-3'-phosphate
  modified_base 6: mod_base = OTHER; note = 2'-O-methyluridine-3'-phosphate
  modified_base 7: mod_base = OTHER; note = 2'-deoxy-2'-fluorouridine-3'-phosphate
  modified_base 8: mod_base = OTHER; note = 2'-O-methyluridine-3'-phosphate
  modified_base 9: mod_base = OTHER; note = 2'-deoxy-2'-fluoroguanosine-3'-phosphate
  modified_base 10: mod_base = OTHER; note = 2'-deoxy-2'-fluoroguanosine-3'-phosphate
  modified_base 11: mod_base = OTHER; note = 2'-deoxy-2'-fluoroadenosine-3'-phosphate
  modified_base 12: mod_base = OTHER; note = 2'-O-methyluridine-3'-phosphate
  modified_base 13: mod_base = OTHER; note = 2'-O-methylguanosine-3'-phosphate
  modified_base 14: mod_base = OTHER; note = 2'-O-methyladenosine-3'-phosphate
  modified_base 15: mod_base = OTHER; note = 2'-O-methyladenosine-3'-phosphate
  modified_base 16: mod_base = OTHER; note = 2'-O-methyladenosine-3'-phosphate
  modified_base 17: mod_base = OTHER; note = 2'-O-methyladenosine-3'-phosphate
  modified_base 18: mod_base = OTHER; note = 2'-O-methylcytidine-3'-phosphate
  modified_base 19: mod_base = OTHER; note = 2'-O-methyluridine-3'-phosphate
  modified_base 20: mod_base = OTHER; note = 2'-O-methyladenosine-3'-phosphate
  modified_base 21: mod_base = OTHER; note = 2'-O-methyladenosine
aaaaatttggatgaaaactaa

SEQ ID NO: 3777 - RNA, 21 nt, synthetic construct
  source 1..21: mol_type = other RNA
  modified_base 1: mod_base = OTHER; note = 2'-O-methyladenosine-3'-phosphate
  modified_base 2: mod_base = OTHER; note = 2'-O-methyladenosine-3'-phosphate
  modified_base 3: mod_base = OTHER; note = 2'-O-methyladenosine-3'-phosphate
  modified_base 4: mod_base = OTHER; note = 2'-O-methyladenosine-3'-phosphate
  modified_base 5: mod_base = OTHER; note = 2'-O-methyluridine-3'-phosphate
  modified_base 6: mod_base = OTHER; note = 2'-O-methyluridine-3'-phosphate
  modified_base 7: mod_base = OTHER; note = 2'-deoxy-2'-fluorouridine-3'-phosphate
  modified_base 8: mod_base = OTHER; note = 2'-O-methylguanosine-3'-phosphate
  modified_base 9: mod_base = OTHER; note = 2'-deoxy-2'-fluoroguanosine-3'-phosphate
  modified_base 10: mod_base = OTHER; note = 2'-deoxy-2'-fluoroadenosine-3'-phosphate
  modified_base 11: mod_base = OTHER; note = 2'-deoxy-2'-fluorouridine-3'-phosphate
  modified_base 12: mod_base = OTHER; note = 2'-O-methylguanosine-3'-phosphate
  modified_base 13: mod_base = OTHER; note = 2'-O-methyladenosine-3'-phosphate
  modified_base 14: mod_base = OTHER; note = 2'-O-methyladenosine-3'-phosphate
  modified_base 15: mod_base = OTHER; note = 2'-O-methyladenosine-3'-phosphate
  modified_base 16: mod_base = OTHER; note = 2'-O-methyladenosine-3'-phosphate
  modified_base 17: mod_base = OTHER; note = 2'-O-methylcytidine-3'-phosphate
  modified_base 18: mod_base = OTHER; note = 2'-O-methyluridine-3'-phosphate
  modified_base 19: mod_base = OTHER; note = 2'-O-methyladenosine-3'-phosphate
  modified_base 20: mod_base = OTHER; note = 2'-O-methylcytidine-3'-phosphate
  modified_base 21: mod_base = OTHER; note = 2'-O-methyladenosine
aaaatttggatgaaaactaca

SEQ ID NO: 3778 - RNA, 21 nt, synthetic construct
  source 1..21: mol_type = other RNA
  modified_base 1: mod_base = OTHER; note = 2'-O-methyladenosine-3'-phosphate
  modified_base 2: mod_base = OTHER; note = 2'-O-methyladenosine-3'-phosphate
  modified_base 3: mod_base = OTHER; note = 2'-O-methyladenosine-3'-phosphate
  modified_base 4: mod_base = OTHER; note = 2'-O-methyluridine-3'-phosphate
  modified_base 5: mod_base = OTHER; note = 2'-O-methyluridine-3'-phosphate
  modified_base 6: mod_base = OTHER; note = 2'-O-methyluridine-3'-phosphate
  modified_base 7: mod_base = OTHER; note = 2'-deoxy-2'-fluoroguanosine-3'-phosphate
  modified_base 8: mod_base = OTHER; note = 2'-O-methylguanosine-3'-phosphate
  modified_base 9: mod_base = OTHER; note = 2'-deoxy-2'-fluoroadenosine-3'-phosphate
  modified_base 10: mod_base = OTHER; note = 2'-deoxy-2'-fluorouridine-3'-phosphate
  modified_base 11: mod_base = OTHER; note = 2'-deoxy-2'-fluoroguanosine-3'-phosphate
  modified_base 12: mod_base = OTHER; note = 2'-O-methyladenosine-3'-phosphate
  modified_base 13: mod_base = OTHER; note = 2'-O-methyladenosine-3'-phosphate
  modified_base 14: mod_base = OTHER; note = 2'-O-methyladenosine-3'-phosphate
  modified_base 15: mod_base = OTHER; note = 2'-O-methyladenosine-3'-phosphate
  modified_base 16: mod_base = OTHER; note = 2'-O-methylcytidine-3'-phosphate
  modified_base 17: mod_base = OTHER; note = 2'-O-methyluridine-3'-phosphate
  modified_base 18: mod_base = OTHER; note = 2'-O-methyladenosine-3'-phosphate
  modified_base 19: mod_base = OTHER; note = 2'-O-methylcytidine-3'-phosphate
  modified_base 20: mod_base = OTHER; note = 2'-O-methyluridine-3'-phosphate
  modified_base 21: mod_base = OTHER; note = 2'-O-methyladenosine
aaatttggatgaaaactacta

SEQ ID NO: 3779 - RNA, 21 nt, synthetic construct
  source 1..21: mol_type = other RNA
  modified_base 1: mod_base = OTHER; note = 2'-O-methyladenosine-3'-phosphate
  modified_base 2: mod_base = OTHER; note = 2'-O-methyladenosine-3'-phosphate
  modified_base 3: mod_base = OTHER; note = 2'-O-methyluridine-3'-phosphate
  modified_base 4: mod_base = OTHER; note = 2'-O-methyluridine-3'-phosphate
  modified_base 5: mod_base = OTHER; note = 2'-O-methyluridine-3'-phosphate
  modified_base 6: mod_base = OTHER; note = 2'-O-methylguanosine-3'-phosphate
  modified_base 7: mod_base = OTHER; note = 2'-deoxy-2'-fluoroguanosine-3'-phosphate
  modified_base 8: mod_base = OTHER; note = 2'-O-methyladenosine-3'-phosphate
  modified_base 9: mod_base = OTHER; note = 2'-deoxy-2'-fluorouridine-3'-phosphate
  modified_base 10: mod_base = OTHER; note = 2'-deoxy-2'-fluoroguanosine-3'-phosphate
  modified_base 11: mod_base = OTHER; note = 2'-deoxy-2'-fluoroadenosine-3'-phosphate
  modified_base 12: mod_base = OTHER; note = 2'-O-methyladenosine-3'-phosphate
  modified_base 13: mod_base = OTHER; note = 2'-O-methyladenosine-3'-phosphate
  modified_base 14: mod_base = OTHER; note = 2'-O-methyladenosine-3'-phosphate
  modified_base 15: mod_base = OTHER; note = 2'-O-methylcytidine-3'-phosphate
  modified_base 16: mod_base = OTHER; note = 2'-O-methyluridine-3'-phosphate
  modified_base 17: mod_base = OTHER; note = 2'-O-methyladenosine-3'-phosphate
  modified_base 18: mod_base = OTHER; note = 2'-O-methylcytidine-3'-phosphate
  modified_base 19: mod_base = OTHER; note = 2'-O-methyluridine-3'-phosphate
  modified_base 20: mod_base = OTHER; note = 2'-O-methylguanosine-3'-phosphate
  modified_base 21: mod_base = OTHER; note = 2'-O-methyladenosine
aatttggatgaaaactactga

SEQ ID NO: 3780 - RNA, 21 nt, synthetic construct
  source 1..21: mol_type = other RNA
  modified_base 1: mod_base = OTHER; note = 2'-O-methyladenosine-3'-phosphate
  modified_base 2: mod_base = OTHER; note = 2'-O-methyluridine-3'-phosphate
  modified_base 3: mod_base = OTHER; note = 2'-O-methyluridine-3'-phosphate
  modified_base 4: mod_base = OTHER; note = 2'-O-methyluridine-3'-phosphate
  modified_base 5: mod_base = OTHER; note = 2'-O-methylguanosine-3'-phosphate
  modified_base 6: mod_base = OTHER; note = 2'-O-methylguanosine-3'-phosphate
  modified_base 7: mod_base = OTHER; note = 2'-deoxy-2'-fluoroadenosine-3'-phosphate
  modified_base 8: mod_base = OTHER; note = 2'-O-methyluridine-3'-phosphate
  modified_base 9: mod_base = OTHER; note = 2'-deoxy-2'-fluoroguanosine-3'-phosphate
  modified_base 10: mod_base = OTHER; note = 2'-deoxy-2'-fluoroadenosine-3'-phosphate
  modified_base 11: mod_base = OTHER; note = 2'-deoxy-2'-fluoroadenosine-3'-phosphate
  modified_base 12: mod_base = OTHER; note = 2'-O-methyladenosine-3'-phosphate
  modified_base 13: mod_base = OTHER; note = 2'-O-methyladenosine-3'-phosphate
  modified_base 14: mod_base = OTHER; note = 2'-O-methylcytidine-3'-phosphate
  modified_base 15: mod_base = OTHER; note = 2'-O-methyluridine-3'-phosphate
  modified_base 16: mod_base = OTHER; note = 2'-O-methyladenosine-3'-phosphate
  modified_base 17: mod_base = OTHER; note = 2'-O-methylcytidine-3'-phosphate
  modified_base 18: mod_base = OTHER; note = 2'-O-methyluridine-3'-phosphate
  modified_base 19: mod_base = OTHER; note = 2'-O-methylguanosine-3'-phosphate
  modified_base 20: mod_base = OTHER; note = 2'-O-methylcytidine-3'-phosphate
  modified_base 21: mod_base = OTHER; note = 2'-O-methyladenosine
atttggatgaaaactactgca

SEQ ID NO: 3781 - RNA, 21 nt, synthetic construct
  source 1..21: mol_type = other RNA
  modified_base 1: mod_base = OTHER; note = 2'-O-methyluridine-3'-phosphate
  modified_base 2: mod_base = OTHER; note = 2'-O-methyluridine-3'-phosphate
  modified_base 3: mod_base = OTHER; note = 2'-O-methyluridine-3'-phosphate
  modified_base 4: mod_base = OTHER; note = 2'-O-methylguanosine-3'-phosphate
  modified_base 5: mod_base = OTHER; note = 2'-O-methylguanosine-3'-phosphate
  modified_base 6: mod_base = OTHER; note = 2'-O-methyladenosine-3'-phosphate
  modified_base 7: mod_base = OTHER; note = 2'-deoxy-2'-fluorouridine-3'-phosphate
  modified_base 8: mod_base = OTHER; note = 2'-O-methylguanosine-3'-phosphate
  modified_base 9: mod_base = OTHER; note = 2'-deoxy-2'-fluoroadenosine-3'-phosphate
  modified_base 10: mod_base = OTHER; note = 2'-deoxy-2'-fluoroadenosine-3'-phosphate
  modified_base 11: mod_base = OTHER; note = 2'-deoxy-2'-fluoroadenosine-3'-phosphate
  modified_base 12: mod_base = OTHER; note = 2'-O-methyladenosine-3'-phosphate
  modified_base 13: mod_base = OTHER; note = 2'-O-methylcytidine-3'-phosphate
  modified_base 14: mod_base = OTHER; note = 2'-O-methyluridine-3'-phosphate
  modified_base 15: mod_base = OTHER; note = 2'-O-methyladenosine-3'-phosphate
  modified_base 16: mod_base = OTHER; note = 2'-O-methylcytidine-3'-phosphate
  modified_base 17: mod_base = OTHER; note = 2'-O-methyluridine-3'-phosphate
  modified_base 18: mod_base = OTHER; note = 2'-O-methylguanosine-3'-phosphate
  modified_base 19: mod_base = OTHER; note = 2'-O-methylcytidine-3'-phosphate
  modified_base 20: mod_base = OTHER; note = 2'-O-methylcytidine-3'-phosphate
  modified_base 21: mod_base = OTHER; note = 2'-O-methyladenosine
tttggatgaaaactactgcca

SEQ ID NO: 3782 - RNA, 21 nt, synthetic construct
  source 1..21: mol_type = other RNA
  modified_base 1: mod_base = OTHER; note = 2'-O-methyluridine-3'-phosphate
  modified_base 2: mod_base = OTHER; note = 2'-O-methyluridine-3'-phosphate
  modified_base 3: mod_base = OTHER; note = 2'-O-methylguanosine-3'-phosphate
  modified_base 4: mod_base = OTHER; note = 2'-O-methylguanosine-3'-phosphate
  modified_base 5: mod_base = OTHER; note = 2'-O-methyladenosine-3'-phosphate
  modified_base 6: mod_base = OTHER; note = 2'-O-methyluridine-3'-phosphate
  modified_base 7: mod_base = OTHER; note = 2'-deoxy-2'-fluoroguanosine-3'-phosphate
  modified_base 8: mod_base = OTHER; note = 2'-O-methyladenosine-3'-phosphate
  modified_base 9: mod_base = OTHER; note = 2'-deoxy-2'-fluoroadenosine-3'-phosphate
  modified_base 10: mod_base = OTHER; note = 2'-deoxy-2'-fluoroadenosine-3'-phosphate
  modified_base 11: mod_base = OTHER; note = 2'-deoxy-2'-fluoroadenosine-3'-phosphate
  modified_base 12: mod_base = OTHER; note = 2'-O-methylcytidine-3'-phosphate
  modified_base 13: mod_base = OTHER; note = 2'-O-methyluridine-3'-phosphate
  modified_base 14: mod_base = OTHER; note = 2'-O-methyladenosine-3'-phosphate
  modified_base 15: mod_base = OTHER; note = 2'-O-methylcytidine-3'-phosphate
  modified_base 16: mod_base = OTHER; note = 2'-O-methyluridine-3'-phosphate
  modified_base 17: mod_base = OTHER; note = 2'-O-methylguanosine-3'-phosphate
  modified_base 18: mod_base = OTHER; note = 2'-O-methylcytidine-3'-phosphate
  modified_base 19: mod_base = OTHER; note = 2'-O-methylcytidine-3'-phosphate
  modified_base 20: mod_base = OTHER; note = 2'-O-methylguanosine-3'-phosphate
  modified_base 21: mod_base = OTHER; note = 2'-O-methyladenosine
ttggatgaaaactactgccga

SEQ ID NO: 3783 - RNA, 21 nt, synthetic construct
  source 1..21: mol_type = other RNA
  modified_base 1: mod_base = OTHER; note = 2'-O-methyluridine-3'-phosphate
  modified_base 2: mod_base = OTHER; note = 2'-O-methylguanosine-3'-phosphate
  modified_base 3: mod_base = OTHER; note = 2'-O-methylguanosine-3'-phosphate
  modified_base 4: mod_base = OTHER; note = 2'-O-methyladenosine-3'-phosphate
  modified_base 5: mod_base = OTHER; note = 2'-O-methyluridine-3'-phosphate
  modified_base 6: mod_base = OTHER; note = 2'-O-methylguanosine-3'-phosphate
  modified_base 7: mod_base = OTHER; note = 2'-deoxy-2'-fluoroadenosine-3'-phosphate
  modified_base 8: mod_base = OTHER; note = 2'-O-methyladenosine-3'-phosphate
  modified_base 9: mod_base = OTHER; note = 2'-deoxy-2'-fluoroadenosine-3'-phosphate
  modified_base 10: mod_base = OTHER; note = 2'-deoxy-2'-fluoroadenosine-3'-phosphate
  modified_base 11: mod_base = OTHER; note = 2'-deoxy-2'-fluorocytidine-3'-phosphate
  modified_base 12: mod_base = OTHER; note = 2'-O-methyluridine-3'-phosphate
  modified_base 13: mod_base = OTHER; note = 2'-O-methyladenosine-3'-phosphate
  modified_base 14: mod_base = OTHER; note = 2'-O-methylcytidine-3'-phosphate
  modified_base 15: mod_base = OTHER; note = 2'-O-methyluridine-3'-phosphate
  modified_base 16: mod_base = OTHER; note = 2'-O-methylguanosine-3'-phosphate
  modified_base 17: mod_base = OTHER; note = 2'-O-methylcytidine-3'-phosphate
  modified_base 18: mod_base = OTHER; note = 2'-O-methylcytidine-3'-phosphate
  modified_base 19: mod_base = OTHER; note = 2'-O-methylguanosine-3'-phosphate
  modified_base 20: mod_base = OTHER; note = 2'-O-methylcytidine-3'-phosphate
  modified_base 21: mod_base = OTHER; note = 2'-O-methyladenosine
tggatgaaaactactgccgca

SEQ ID NO: 3784 - RNA, 21 nt, synthetic construct
  source 1..21: mol_type = other RNA
  modified_base 1: mod_base = OTHER; note = 2'-O-methylguanosine-3'-phosphate
  modified_base 2: mod_base = OTHER; note = 2'-O-methylguanosine-3'-phosphate
  modified_base 3: mod_base = OTHER; note = 2'-O-methyladenosine-3'-phosphate
  modified_base 4: mod_base = OTHER; note = 2'-O-methyluridine-3'-phosphate
  modified_base 5: mod_base = OTHER; note = 2'-O-methylguanosine-3'-phosphate
  modified_base 6: mod_base = OTHER; note = 2'-O-methyladenosine-3'-phosphate
  modified_base 7: mod_base = OTHER; note = 2'-deoxy-2'-fluoroadenosine-3'-phosphate
  modified_base 8: mod_base = OTHER; note = 2'-O-methyladenosine-3'-phosphate
  modified_base 9: mod_base = OTHER; note = 2'-deoxy-2'-fluoroadenosine-3'-phosphate
  modified_base 10: mod_base = OTHER; note = 2'-deoxy-2'-fluorocytidine-3'-phosphate
  modified_base 11: mod_base = OTHER; note = 2'-deoxy-2'-fluorouridine-3'-phosphate
  modified_base 12: mod_base = OTHER; note = 2'-O-methyladenosine-3'-phosphate
  modified_base 13: mod_base = OTHER; note = 2'-O-methylcytidine-3'-phosphate
  modified_base 14: mod_base = OTHER; note = 2'-O-methyluridine-3'-phosphate
  modified_base 15: mod_base = OTHER; note = 2'-O-methylguanosine-3'-phosphate
  modified_base 16: mod_base = OTHER; note = 2'-O-methylcytidine-3'-phosphate
  modified_base 17: mod_base = OTHER; note = 2'-O-methylcytidine-3'-phosphate
  modified_base 18: mod_base = OTHER; note = 2'-O-methylguanosine-3'-phosphate
  modified_base 19: mod_base = OTHER; note = 2'-O-methylcytidine-3'-phosphate
  modified_base 20: mod_base = OTHER; note = 2'-O-methyladenosine-3'-phosphate
  modified_base 21: mod_base = OTHER; note = 2'-O-methyladenosine
ggatgaaaactactgccgcaa

SEQ ID NO: 3785 - RNA, 21 nt, synthetic construct
  source 1..21: mol_type = other RNA
  modified_base 1: mod_base = OTHER; note = 2'-O-methylguanosine-3'-phosphate
  modified_base 2: mod_base = OTHER; note = 2'-O-methyladenosine-3'-phosphate
  modified_base 3: mod_base = OTHER; note = 2'-O-methyluridine-3'-phosphate
  modified_base 4: mod_base = OTHER; note = 2'-O-methylguanosine-3'-phosphate
  modified_base 5: mod_base = OTHER; note = 2'-O-methyladenosine-3'-phosphate
  modified_base 6: mod_base = OTHER; note = 2'-O-methyladenosine-3'-phosphate
  modified_base 7: mod_base = OTHER; note = 2'-deoxy-2'-fluoroadenosine-3'-phosphate
  modified_base 8: mod_base = OTHER; note = 2'-O-methyladenosine-3'-phosphate
  modified_base 9: mod_base = OTHER; note = 2'-deoxy-2'-fluorocytidine-3'-phosphate
  modified_base 10: mod_base = OTHER; note = 2'-deoxy-2'-fluorouridine-3'-phosphate
  modified_base 11: mod_base = OTHER; note = 2'-deoxy-2'-fluoroadenosine-3'-phosphate
  modified_base 12: mod_base = OTHER; note = 2'-O-methylcytidine-3'-phosphate
  modified_base 13: mod_base = OTHER; note = 2'-O-methyluridine-3'-phosphate
  modified_base 14: mod_base = OTHER; note = 2'-O-methylguanosine-3'-phosphate
  modified_base 15: mod_base = OTHER; note = 2'-O-methylcytidine-3'-phosphate
  modified_base 16: mod_base = OTHER; note = 2'-O-methylcytidine-3'-phosphate
  modified_base 17: mod_base = OTHER; note = 2'-O-methylguanosine-3'-phosphate
  modified_base 18: mod_base = OTHER; note = 2'-O-methylcytidine-3'-phosphate
  modified_base 19: mod_base = OTHER; note = 2'-O-methyladenosine-3'-phosphate
  modified_base 20: mod_base = OTHER; note = 2'-O-methyladenosine-3'-phosphate
  modified_base 21: mod_base = OTHER; note = 2'-O-methyladenosine
gatgaaaactactgccgcaaa

SEQ ID NO: 3786 - RNA, 21 nt, synthetic construct
  source 1..21: mol_type = other RNA
  modified_base 1: mod_base = OTHER; note = 2'-O-methyladenosine-3'-phosphate
  modified_base 2: mod_base = OTHER; note = 2'-O-methyluridine-3'-phosphate
  modified_base 3: mod_base = OTHER; note = 2'-O-methylguanosine-3'-phosphate
  modified_base 4: mod_base = OTHER; note = 2'-O-methyladenosine-3'-phosphate
  modified_base 5: mod_base = OTHER; note = 2'-O-methyladenosine-3'-phosphate
  modified_base 6: mod_base = OTHER; note = 2'-O-methyladenosine-3'-phosphate
  modified_base 7: mod_base = OTHER; note = 2'-deoxy-2'-fluoroadenosine-3'-phosphate
  modified_base 8: mod_base = OTHER; note = 2'-O-methylcytidine-3'-phosphate
  modified_base 9: mod_base = OTHER; note = 2'-deoxy-2'-fluorouridine-3'-phosphate
  modified_base 10: mod_base = OTHER; note = 2'-deoxy-2'-fluoroadenosine-3'-phosphate
  modified_base 11: mod_base = OTHER; note = 2'-deoxy-2'-fluorocytidine-3'-phosphate
  modified_base 12: mod_base = OTHER; note = 2'-O-methyluridine-3'-phosphate
  modified_base 13: mod_base = OTHER; note = 2'-O-methylguanosine-3'-phosphate
  modified_base 14: mod_base = OTHER; note = 2'-O-methylcytidine-3'-phosphate
  modified_base 15: mod_base = OTHER; note = 2'-O-methylcytidine-3'-phosphate
  modified_base 16: mod_base = OTHER; note = 2'-O-methylguanosine-3'-phosphate
  modified_base 17: mod_base = OTHER; note = 2'-O-methylcytidine-3'-phosphate
  modified_base 18: mod_base = OTHER; note = 2'-O-methyladenosine-3'-phosphate
  modified_base 19: mod_base = OTHER; note = 2'-O-methyladenosine-3'-phosphate
  modified_base 20: mod_base = OTHER; note = 2'-O-methyluridine-3'-phosphate
  modified_base 21: mod_base = OTHER; note = 2'-O-methyladenosine
atgaaaactactgccgcaata

SEQ ID NO: 3787 - RNA, 21 nt, synthetic construct
  source 1..21: mol_type = other RNA
  modified_base 1: mod_base = OTHER; note = 2'-O-methyluridine-3'-phosphate
  modified_base 2: mod_base = OTHER; note = 2'-O-methylguanosine-3'-phosphate
  modified_base 3: mod_base = OTHER; note = 2'-O-methyladenosine-3'-phosphate
  modified_base 4: mod_base = OTHER; note = 2'-O-methyladenosine-3'-phosphate
  modified_base 5: mod_base = OTHER; note = 2'-O-methyladenosine-3'-phosphate
  modified_base 6: mod_base = OTHER; note = 2'-O-methyladenosine-3'-phosphate
  modified_base 7: mod_base = OTHER; note = 2'-deoxy-2'-fluorocytidine-3'-phosphate
  modified_base 8: mod_base = OTHER; note = 2'-O-methyluridine-3'-phosphate
  modified_base 9: mod_base = OTHER; note = 2'-deoxy-2'-fluoroadenosine-3'-phosphate
  modified_base 10: mod_base = OTHER; note = 2'-deoxy-2'-fluorocytidine-3'-phosphate
  modified_base 11: mod_base = OTHER; note = 2'-deoxy-2'-fluorouridine-3'-phosphate
  modified_base 12: mod_base = OTHER; note = 2'-O-methylguanosine-3'-phosphate
  modified_base 13: mod_base = OTHER; note = 2'-O-methylcytidine-3'-phosphate
  modified_base 14: mod_base = OTHER; note = 2'-O-methylcytidine-3'-phosphate
  modified_base 15: mod_base = OTHER; note = 2'-O-methylguanosine-3'-phosphate
  modified_base 16: mod_base = OTHER; note = 2'-O-methylcytidine-3'-phosphate
  modified_base 17: mod_base = OTHER; note = 2'-O-methyladenosine-3'-phosphate
  modified_base 18: mod_base = OTHER; note = 2'-O-methyladenosine-3'-phosphate
  modified_base 19: mod_base = OTHER; note = 2'-O-methyluridine-3'-phosphate
  modified_base 20: mod_base = OTHER; note = 2'-O-methylcytidine-3'-phosphate
  modified_base 21: mod_base = OTHER; note = 2'-O-methyladenosine
tgaaaactactgccgcaatca

SEQ ID NO: 3788 - RNA, 21 nt, synthetic construct
  source 1..21: mol_type = other RNA
  modified_base 1: mod_base = OTHER; note = 2'-O-methylguanosine-3'-phosphate
  modified_base 2: mod_base = OTHER; note = 2'-O-methyladenosine-3'-phosphate
  modified_base 3: mod_base = OTHER; note = 2'-O-methyladenosine-3'-phosphate
  modified_base 4: mod_base = OTHER; note = 2'-O-methyladenosine-3'-phosphate
  modified_base 5: mod_base = OTHER; note = 2'-O-methyladenosine-3'-phosphate
  modified_base 6: mod_base = OTHER; note = 2'-O-methylcytidine-3'-phosphate
  modified_base 7: mod_base = OTHER; note = 2'-deoxy-2'-fluorouridine-3'-phosphate
  modified_base 8: mod_base = OTHER; note = 2'-O-methyladenosine-3'-phosphate
  modified_base 9: mod_base = OTHER; note = 2'-deoxy-2'-fluorocytidine-3'-phosphate
  modified_base 10: mod_base = OTHER; note = 2'-deoxy-2'-fluorouridine-3'-phosphate
  modified_base 11: mod_base = OTHER; note = 2'-deoxy-2'-fluoroguanosine-3'-phosphate
  modified_base 12: mod_base = OTHER; note = 2'-O-methylcytidine-3'-phosphate
  modified_base 13: mod_base = OTHER; note = 2'-O-methylcytidine-3'-phosphate
  modified_base 14: mod_base = OTHER; note = 2'-O-methylguanosine-3'-phosphate
  modified_base 15: mod_base = OTHER; note = 2'-O-methylcytidine-3'-phosphate
  modified_base 16: mod_base = OTHER; note = 2'-O-methyladenosine-3'-phosphate
  modified_base 17: mod_base = OTHER; note = 2'-O-methyladenosine-3'-phosphate
  modified_base 18: mod_base = OTHER; note = 2'-O-methyluridine-3'-phosphate
  modified_base 19: mod_base = OTHER; note = 2'-O-methylcytidine-3'-phosphate
  modified_base 20: mod_base = OTHER; note = 2'-O-methylcytidine-3'-phosphate
  modified_base 21: mod_base = OTHER; note = 2'-O-methyladenosine
gaaaactactgccgcaatcca

SEQ ID NO: 3789 - RNA, 21 nt, synthetic construct
  source 1..21: mol_type = other RNA
  modified_base 1: mod_base = OTHER; note = 2'-O-methyladenosine-3'-phosphate
  modified_base 2: mod_base = OTHER; note = 2'-O-methyladenosine-3'-phosphate
  modified_base 3: mod_base = OTHER; note = 2'-O-methyladenosine-3'-phosphate
  modified_base 4: mod_base = OTHER; note = 2'-O-methyladenosine-3'-phosphate
  modified_base 5: mod_base = OTHER; note = 2'-O-methylcytidine-3'-phosphate
  modified_base 6: mod_base = OTHER; note = 2'-O-methyluridine-3'-phosphate
  modified_base 7: mod_base = OTHER; note = 2'-deoxy-2'-fluoroadenosine-3'-phosphate
  modified_base 8: mod_base = OTHER; note = 2'-O-methylcytidine-3'-phosphate
  modified_base 9: mod_base = OTHER; note = 2'-deoxy-2'-fluorouridine-3'-phosphate
  modified_base 10: mod_base = OTHER; note = 2'-deoxy-2'-fluoroguanosine-3'-phosphate
  modified_base 11: mod_base = OTHER; note = 2'-deoxy-2'-fluorocytidine-3'-phosphate
  modified_base 12: mod_base = OTHER; note = 2'-O-methylcytidine-3'-phosphate
  modified_base 13: mod_base = OTHER; note = 2'-O-methylguanosine-3'-phosphate
  modified_base 14: mod_base = OTHER; note = 2'-O-methylcytidine-3'-phosphate
  modified_base 15: mod_base = OTHER; note = 2'-O-methyladenosine-3'-phosphate
  modified_base 16: mod_base = OTHER; note = 2'-O-methyladenosine-3'-phosphate
  modified_base 17: mod_base = OTHER; note = 2'-O-methyluridine-3'-phosphate
  modified_base 18: mod_base = OTHER; note = 2'-O-methylcytidine-3'-phosphate
  modified_base 19: mod_base = OTHER; note = 2'-O-methylcytidine-3'-phosphate
  modified_base 20: mod_base = OTHER; note = 2'-O-methyluridine-3'-phosphate
  modified_base 21: mod_base = OTHER; note = 2'-O-methyladenosine
aaaactactgccgcaatccta

SEQ ID NO: 3790 - RNA, 21 nt, synthetic construct
  source 1..21: mol_type = other RNA
  modified_base 1: mod_base = OTHER; note = 2'-O-methyladenosine-3'-phosphate
  modified_base 2: mod_base = OTHER; note = 2'-O-methyladenosine-3'-phosphate
  modified_base 3: mod_base = OTHER; note = 2'-O-methyladenosine-3'-phosphate
  modified_base 4: mod_base = OTHER; note = 2'-O-methylcytidine-3'-phosphate
  modified_base 5: mod_base = OTHER; note = 2'-O-methyluridine-3'-phosphate
  modified_base 6: mod_base = OTHER; note = 2'-O-methyladenosine-3'-phosphate
  modified_base 7: mod_base = OTHER; note = 2'-deoxy-2'-fluorocytidine-3'-phosphate
  modified_base 8: mod_base = OTHER; note = 2'-O-methyluridine-3'-phosphate
  modified_base 9: mod_base = OTHER; note = 2'-deoxy-2'-fluoroguanosine-3'-phosphate
  modified_base 10: mod_base = OTHER; note = 2'-deoxy-2'-fluorocytidine-3'-phosphate
  modified_base 11: mod_base = OTHER; note = 2'-deoxy-2'-fluorocytidine-3'-phosphate
  modified_base 12: mod_base = OTHER; note = 2'-O-methylguanosine-3'-phosphate
  modified_base 13: mod_base = OTHER; note = 2'-O-methylcytidine-3'-phosphate
  modified_base 14: mod_base = OTHER; note = 2'-O-methyladenosine-3'-phosphate
  modified_base 15: mod_base = OTHER; note = 2'-O-methyladenosine-3'-phosphate
  modified_base 16: mod_base = OTHER; note = 2'-O-methyluridine-3'-phosphate
  modified_base 17: mod_base = OTHER; note = 2'-O-methylcytidine-3'-phosphate
  modified_base 18: mod_base = OTHER; note = 2'-O-methylcytidine-3'-phosphate
  modified_base 19: mod_base = OTHER; note = 2'-O-methyluridine-3'-phosphate
  modified_base 20: mod_base = OTHER; note = 2'-O-methylguanosine-3'-phosphate
  modified_base 21: mod_base = OTHER; note = 2'-O-methyladenosine
aaactactgccgcaatcctga

SEQ ID NO: 3791 - RNA, 21 nt, synthetic construct
  source 1..21: mol_type = other RNA
  modified_base 1: mod_base = OTHER; note = 2'-O-methyladenosine-3'-phosphate
  modified_base 2: mod_base = OTHER; note = 2'-O-methyladenosine-3'-phosphate
  modified_base 3: mod_base = OTHER; note = 2'-O-methylcytidine-3'-phosphate
  modified_base 4: mod_base = OTHER; note = 2'-O-methyluridine-3'-phosphate
  modified_base 5: mod_base = OTHER; note = 2'-O-methyladenosine-3'-phosphate
  modified_base 6: mod_base = OTHER; note = 2'-O-methylcytidine-3'-phosphate
  modified_base 7: mod_base = OTHER; note = 2'-deoxy-2'-fluorouridine-3'-phosphate
  modified_base 8: mod_base = OTHER; note = 2'-O-methylguanosine-3'-phosphate
  modified_base 9: mod_base = OTHER; note = 2'-deoxy-2'-fluorocytidine-3'-phosphate
  modified_base 10: mod_base = OTHER; note = 2'-deoxy-2'-fluorocytidine-3'-phosphate
  modified_base 11: mod_base = OTHER; note = 2'-deoxy-2'-fluoroguanosine-3'-phosphate
  modified_base 12: mod_base = OTHER; note = 2'-O-methylcytidine-3'-phosphate
  modified_base 13: mod_base = OTHER; note = 2'-O-methyladenosine-3'-phosphate
  modified_base 14: mod_base = OTHER; note = 2'-O-methyladenosine-3'-phosphate
  modified_base 15: mod_base = OTHER; note = 2'-O-methyluridine-3'-phosphate
  modified_base 16: mod_base = OTHER; note = 2'-O-methylcytidine-3'-phosphate
  modified_base 17: mod_base = OTHER; note = 2'-O-methylcytidine-3'-phosphate
  modified_base 18: mod_base = OTHER; note = 2'-O-methyluridine-3'-phosphate
  modified_base 19: mod_base = OTHER; note = 2'-O-methylguanosine-3'-phosphate
  modified_base 20: mod_base = OTHER; note = 2'-O-methyladenosine-3'-phosphate
  modified_base 21: mod_base = OTHER; note = 2'-O-methyladenosine
aactactgccgcaatcctgaa

SEQ ID NO: 3792 - RNA, 21 nt, synthetic construct
  source 1..21: mol_type = other RNA
  modified_base 1: mod_base = OTHER; note = 2'-O-methyluridine-3'-phosphate
  modified_base 2: mod_base = OTHER; note = 2'-O-methyladenosine-3'-phosphate
  modified_base 3: mod_base = OTHER; note = 2'-O-methylcytidine-3'-phosphate
  modified_base 4: mod_base = OTHER; note = 2'-O-methyluridine-3'-phosphate
  modified_base 5: mod_base = OTHER; note = 2'-O-methylguanosine-3'-phosphate
  modified_base 6: mod_base = OTHER; note = 2'-O-methylcytidine-3'-phosphate
  modified_base 7: mod_base = OTHER; note = 2'-deoxy-2'-fluorocytidine-3'-phosphate
  modified_base 8: mod_base = OTHER; note = 2'-O-methylguanosine-3'-phosphate
  modified_base 9: mod_base = OTHER; note = 2'-deoxy-2'-fluorocytidine-3'-phosphate
  modified_base 10: mod_base = OTHER; note = 2'-deoxy-2'-fluoroadenosine-3'-phosphate
  modified_base 11: mod_base = OTHER; note = 2'-deoxy-2'-fluoroadenosine-3'-phosphate
  modified_base 12: mod_base = OTHER; note = 2'-O-methyluridine-3'-phosphate
  modified_base 13: mod_base = OTHER; note = 2'-O-methylcytidine-3'-phosphate
  modified_base 14: mod_base = OTHER; note = 2'-O-methylcytidine-3'-phosphate
  modified_base 15: mod_base = OTHER; note = 2'-O-methyluridine-3'-phosphate
  modified_base 16: mod_base = OTHER; note = 2'-O-methylguanosine-3'-phosphate
  modified_base 17: mod_base = OTHER; note = 2'-O-methyladenosine-3'-phosphate
  modified_base 18: mod_base = OTHER; note = 2'-O-methylcytidine-3'-phosphate
  modified_base 19: mod_base = OTHER; note = 2'-O-methylguanosine-3'-phosphate
  modified_base 20: mod_base = OTHER; note = 2'-O-methylguanosine-3'-phosphate
  modified_base 21: mod_base = OTHER; note = 2'-O-methyladenosine
tactgccgcaatcctgacgga

SEQ ID NO: 3793 - RNA, 21 nt, synthetic construct
  source 1..21: mol_type = other RNA
  modified_base 1: mod_base = OTHER; note = 2'-O-methyladenosine-3'-phosphate
  modified_base 2: mod_base = OTHER; note = 2'-O-methylcytidine-3'-phosphate
  modified_base 3: mod_base = OTHER; note = 2'-O-methyluridine-3'-phosphate
  modified_base 4: mod_base = OTHER; note = 2'-O-methylguanosine-3'-phosphate
  modified_base 5: mod_base = OTHER; note = 2'-O-methylcytidine-3'-phosphate
  modified_base 6: mod_base = OTHER; note = 2'-O-methylcytidine-3'-phosphate
  modified_base 7: mod_base = OTHER; note = 2'-deoxy-2'-fluoroguanosine-3'-phosphate
  modified_base 8: mod_base = OTHER; note = 2'-O-methylcytidine-3'-phosphate
  modified_base 9: mod_base = OTHER; note = 2'-deoxy-2'-fluoroadenosine-3'-phosphate
  modified_base 10: mod_base = OTHER; note = 2'-deoxy-2'-fluoroadenosine-3'-phosphate
  modified_base 11: mod_base = OTHER; note = 2'-deoxy-2'-fluorouridine-3'-phosphate
  modified_base 12: mod_base = OTHER; note = 2'-O-methylcytidine-3'-phosphate
  modified_base 13: mod_base = OTHER; note = 2'-O-methylcytidine-3'-phosphate
  modified_base 14: mod_base = OTHER; note = 2'-O-methyluridine-3'-phosphate
  modified_base 15: mod_base = OTHER; note = 2'-O-methylguanosine-3'-phosphate
  modified_base 16: mod_base = OTHER; note = 2'-O-methyladenosine-3'-phosphate
  modified_base 17: mod_base = OTHER; note = 2'-O-methylcytidine-3'-phosphate
  modified_base 18: mod_base = OTHER; note = 2'-O-methylguanosine-3'-phosphate
  modified_base 19: mod_base = OTHER; note = 2'-O-methylguanosine-3'-phosphate
  modified_base 20: mod_base = OTHER; note = 2'-O-methyladenosine-3'-phosphate
  modified_base 21: mod_base = OTHER; note = 2'-O-methyladenosine
actgccgcaatcctgacggaa

SEQ ID NO: 3794 - RNA, 21 nt, synthetic construct
  source 1..21: mol_type = other RNA
  modified_base 1: mod_base = OTHER; note = 2'-O-methylcytidine-3'-phosphate
  modified_base 2: mod_base = OTHER; note = 2'-O-methyluridine-3'-phosphate
  modified_base 3: mod_base = OTHER; note = 2'-O-methylguanosine-3'-phosphate
  modified_base 4: mod_base = OTHER; note = 2'-O-methylcytidine-3'-phosphate
  modified_base 5: mod_base = OTHER; note = 2'-O-methylcytidine-3'-phosphate
  modified_base 6: mod_base = OTHER; note = 2'-O-methylguanosine-3'-phosphate
  modified_base 7: mod_base = OTHER; note = 2'-deoxy-2'-fluorocytidine-3'-phosphate
  modified_base 8: mod_base = OTHER; note = 2'-O-methyladenosine-3'-phosphate
  modified_base 9: mod_base = OTHER; note = 2'-deoxy-2'-fluoroadenosine-3'-phosphate
  modified_base 10: mod_base = OTHER; note = 2'-deoxy-2'-fluorouridine-3'-phosphate
  modified_base 11: mod_base = OTHER; note = 2'-deoxy-2'-fluorocytidine-3'-phosphate
  modified_base 12: mod_base = OTHER; note = 2'-O-methylcytidine-3'-phosphate
  modified_base 13: mod_base = OTHER; note = 2'-O-methyluridine-3'-phosphate
  modified_base 14: mod_base = OTHER; note = 2'-O-methylguanosine-3'-phosphate
  modified_base 15: mod_base = OTHER; note = 2'-O-methyladenosine-3'-phosphate
  modified_base 16: mod_base = OTHER; note = 2'-O-methylcytidine-3'-phosphate
  modified_base 17: mod_base = OTHER; note = 2'-O-methylguanosine-3'-phosphate
  modified_base 18: mod_base = OTHER; note = 2'-O-methylguanosine-3'-phosphate
  modified_base 19: mod_base = OTHER; note = 2'-O-methyladenosine-3'-phosphate
  modified_base 20: mod_base = OTHER; note = 2'-O-methyladenosine-3'-phosphate
  modified_base 21: mod_base = OTHER; note = 2'-O-methyladenosine
ctgccgcaatcctgacggaaa

SEQ ID NO: 3795 - RNA, 21 nt, synthetic construct
  source 1..21: mol_type = other RNA
  modified_base 1: mod_base = OTHER; note = 2'-O-methyluridine-3'-phosphate
  modified_base 2: mod_base = OTHER; note = 2'-O-methylguanosine-3'-phosphate
  modified_base 3: mod_base = OTHER; note = 2'-O-methylcytidine-3'-phosphate
  modified_base 4: mod_base = OTHER; note = 2'-O-methylcytidine-3'-phosphate
  modified_base 5: mod_base = OTHER; note = 2'-O-methylguanosine-3'-phosphate
  modified_base 6: mod_base = OTHER; note = 2'-O-methylcytidine-3'-phosphate
  modified_base 7: mod_base = OTHER; note = 2'-deoxy-2'-fluoroadenosine-3'-phosphate
  modified_base 8: mod_base = OTHER; note = 2'-O-methyladenosine-3'-phosphate
  modified_base 9: mod_base = OTHER; note = 2'-deoxy-2'-fluorouridine-3'-phosphate
  modified_base 10: mod_base = OTHER; note = 2'-deoxy-2'-fluorocytidine-3'-phosphate
  modified_base 11: mod_base = OTHER; note = 2'-deoxy-2'-fluorocytidine-3'-phosphate
  modified_base 12: mod_base = OTHER; note = 2'-O-methyluridine-3'-phosphate
  modified_base 13: mod_base = OTHER; note = 2'-O-methylguanosine-3'-phosphate
  modified_base 14: mod_base = OTHER; note = 2'-O-methyladenosine-3'-phosphate
  modified_base 15: mod_base = OTHER; note = 2'-O-methylcytidine-3'-phosphate
  modified_base 16: mod_base = OTHER; note = 2'-O-methylguanosine-3'-phosphate
  modified_base 17: mod_base = OTHER; note = 2'-O-methylguanosine-3'-phosphate
  modified_base 18: mod_base = OTHER; note = 2'-O-methyladenosine-3'-phosphate
  modified_base 19: mod_base = OTHER; note = 2'-O-methyladenosine-3'-phosphate
  modified_base 20: mod_base = OTHER; note = 2'-O-methyladenosine-3'-phosphate
  modified_base 21: mod_base = OTHER; note = 2'-O-methyladenosine
tgccgcaatcctgacggaaaa

SEQ ID NO: 3796 - RNA, 21 nt, synthetic construct
  source 1..21: mol_type = other RNA
  modified_base 1: mod_base = OTHER; note = 2'-O-methylguanosine-3'-phosphate
  modified_base 2: mod_base = OTHER; note = 2'-O-methylcytidine-3'-phosphate
  modified_base 3: mod_base = OTHER; note = 2'-O-methylcytidine-3'-phosphate
  modified_base 4: mod_base = OTHER; note = 2'-O-methylguanosine-3'-phosphate
  modified_base 5: mod_base = OTHER; note = 2'-O-methylcytidine-3'-phosphate
  modified_base 6: mod_base = OTHER; note = 2'-O-methyladenosine-3'-phosphate
  modified_base 7: mod_base = OTHER; note = 2'-deoxy-2'-fluoroadenosine-3'-phosphate
  modified_base 8: mod_base = OTHER; note = 2'-O-methyluridine-3'-phosphate
  modified_base 9: mod_base = OTHER; note = 2'-deoxy-2'-fluorocytidine-3'-phosphate
  modified_base 10: mod_base = OTHER; note = 2'-deoxy-2'-fluorocytidine-3'-phosphate
  modified_base 11: mod_base = OTHER; note = 2'-deoxy-2'-fluorouridine-3'-phosphate
  modified_base 12: mod_base = OTHER; note = 2'-O-methylguanosine-3'-phosphate
  modified_base 13: mod_base = OTHER; note = 2'-O-methyladenosine-3'-phosphate
  modified_base 14: mod_base = OTHER; note = 2'-O-methylcytidine-3'-phosphate
  modified_base 15: mod_base = OTHER; note = 2'-O-methylguanosine-3'-phosphate
  modified_base 16: mod_base = OTHER; note = 2'-O-methylguanosine-3'-phosphate
  modified_base 17: mod_base = OTHER; note = 2'-O-methyladenosine-3'-phosphate
  modified_base 18: mod_base = OTHER; note = 2'-O-methyladenosine-3'-phosphate
  modified_base 19: mod_base = OTHER; note = 2'-O-methyladenosine-3'-phosphate
  modified_base 20: mod_base = OTHER; note = 2'-O-methyladenosine-3'-phosphate
  modified_base 21: mod_base = OTHER; note = 2'-O-methyladenosine
gccgcaatcctgacggaaaaa

SEQ ID NO: 3797 - RNA, 21 nt, synthetic construct
  source 1..21: mol_type = other RNA
  modified_base 1: mod_base = OTHER; note = 2'-O-methylcytidine-3'-phosphate
  modified_base 2: mod_base = OTHER; note = 2'-O-methylcytidine-3'-phosphate
  modified_base 3: mod_base = OTHER; note = 2'-O-methylguanosine-3'-phosphate
  modified_base 4: mod_base = OTHER; note = 2'-O-methylcytidine-3'-phosphate
  modified_base 5: mod_base = OTHER; note = 2'-O-methyladenosine-3'-phosphate
  modified_base 6: mod_base = OTHER; note = 2'-O-methyladenosine-3'-phosphate
  modified_base 7: mod_base = OTHER; note = 2'-deoxy-2'-fluorouridine-3'-phosphate
  modified_base 8: mod_base = OTHER; note = 2'-O-methylcytidine-3'-phosphate
  modified_base 9: mod_base = OTHER; note = 2'-deoxy-2'-fluorocytidine-3'-phosphate
  modified_base 10: mod_base = OTHER; note = 2'-deoxy-2'-fluorouridine-3'-phosphate
  modified_base 11: mod_base = OTHER; note = 2'-deoxy-2'-fluoroguanosine-3'-phosphate
  modified_base 12: mod_base = OTHER; note = 2'-O-methyladenosine-3'-phosphate
  modified_base 13: mod_base = OTHER; note = 2'-O-methylcytidine-3'-phosphate
  modified_base 14: mod_base = OTHER; note = 2'-O-methylguanosine-3'-phosphate
  modified_base 15: mod_base = OTHER; note = 2'-O-methylguanosine-3'-phosphate
  modified_base 16: mod_base = OTHER; note = 2'-O-methyladenosine-3'-phosphate
  modified_base 17: mod_base = OTHER; note = 2'-O-methyladenosine-3'-phosphate
  modified_base 18: mod_base = OTHER; note = 2'-O-methyladenosine-3'-phosphate
  modified_base 19: mod_base = OTHER; note = 2'-O-methyladenosine-3'-phosphate
  modified_base 20: mod_base = OTHER; note = 2'-O-methyladenosine-3'-phosphate
  modified_base 21: mod_base = OTHER; note = 2'-O-methyladenosine
ccgcaatcctgacggaaaaaa

SEQ ID NO: 3798 - RNA, 21 nt, synthetic construct
  source 1..21: mol_type = other RNA
  modified_base 1: mod_base = OTHER; note = 2'-O-methylcytidine-3'-phosphate
  modified_base 2: mod_base = OTHER; note = 2'-O-methylguanosine-3'-phosphate
  modified_base 3: mod_base = OTHER; note = 2'-O-methylcytidine-3'-phosphate
  modified_base 4: mod_base = OTHER; note = 2'-O-methyladenosine-3'-phosphate
  modified_base 5: mod_base = OTHER; note = 2'-O-methyladenosine-3'-phosphate
  modified_base 6: mod_base = OTHER; note = 2'-O-methyluridine-3'-phosphate
  modified_base 7: mod_base = OTHER; note = 2'-deoxy-2'-fluorocytidine-3'-phosphate
  modified_base 8: mod_base = OTHER; note = 2'-O-methylcytidine-3'-phosphate
  modified_base 9: mod_base = OTHER; note = 2'-deoxy-2'-fluorouridine-3'-phosphate
  modified_base 10: mod_base = OTHER; note = 2'-deoxy-2'-fluoroguanosine-3'-phosphate
  modified_base 11: mod_base = OTHER; note = 2'-deoxy-2'-fluoroadenosine-3'-phosphate
  modified_base 12: mod_base = OTHER; note = 2'-O-methylcytidine-3'-phosphate
  modified_base 13: mod_base = OTHER; note = 2'-O-methylguanosine-3'-phosphate
  modified_base 14: mod_base = OTHER; note = 2'-O-methylguanosine-3'-phosphate
  modified_base 15: mod_base = OTHER; note = 2'-O-methyladenosine-3'-phosphate
  modified_base 16: mod_base = OTHER; note = 2'-O-methyladenosine-3'-phosphate
  modified_base 17: mod_base = OTHER; note = 2'-O-methyladenosine-3'-phosphate
  modified_base 18: mod_base = OTHER; note = 2'-O-methyladenosine-3'-phosphate
  modified_base 19: mod_base = OTHER; note = 2'-O-methyladenosine-3'-phosphate
  modified_base 20: mod_base = OTHER; note = 2'-O-methylguanosine-3'-phosphate
  modified_base 21: mod_base = OTHER; note = 2'-O-methyladenosine
cgcaatcctgacggaaaaaga

SEQ ID NO: 3799 - RNA, 21 nt, synthetic construct
  source 1..21: mol_type = other RNA
  modified_base 1: mod_base = OTHER; note = 2'-O-methylguanosine-3'-phosphate
  modified_base 2: mod_base = OTHER; note = 2'-O-methylcytidine-3'-phosphate
  modified_base 3: mod_base = OTHER; note = 2'-O-methyladenosine-3'-phosphate
  modified_base 4: mod_base = OTHER; note = 2'-O-methyladenosine-3'-phosphate
  modified_base 5: mod_base = OTHER; note = 2'-O-methyluridine-3'-phosphate
  modified_base 6: mod_base = OTHER; note = 2'-O-methylcytidine-3'-phosphate
  modified_base 7: mod_base = OTHER; note = 2'-deoxy-2'-fluorocytidine-3'-phosphate
  modified_base 8: mod_base = OTHER; note = 2'-O-methyluridine-3'-phosphate
  modified_base 9: mod_base = OTHER; note = 2'-deoxy-2'-fluoroguanosine-3'-phosphate
  modified_base 10: mod_base = OTHER; note = 2'-deoxy-2'-fluoroadenosine-3'-phosphate
  modified_base 11: mod_base = OTHER; note = 2'-deoxy-2'-fluorocytidine-3'-phosphate
  modified_base 12: mod_base = OTHER; note = 2'-O-methylguanosine-3'-phosphate
  modified_base 13: mod_base = OTHER; note = 2'-O-methylguanosine-3'-phosphate
  modified_base 14: mod_base = OTHER; note = 2'-O-methyladenosine-3'-phosphate
  modified_base 15: mod_base = OTHER; note = 2'-O-methyladenosine-3'-phosphate
  modified_base 16: mod_base = OTHER; note = 2'-O-methyladenosine-3'-phosphate
  modified_base 17: mod_base = OTHER; note = 2'-O-methyladenosine-3'-phosphate
  modified_base 18: mod_base = OTHER; note = 2'-O-methyladenosine-3'-phosphate
  modified_base 19: mod_base = OTHER; note = 2'-O-methylguanosine-3'-phosphate
  modified_base 20: mod_base = OTHER; note = 2'-O-methylguanosine-3'-phosphate
  modified_base 21: mod_base = OTHER; note = 2'-O-methyladenosine
gcaatcctgacggaaaaagga

SEQ ID NO: 3800 - RNA, 21 nt, synthetic construct
  source 1..21: mol_type = other RNA
  modified_base 1: mod_base = OTHER; note = 2'-O-methylcytidine-3'-phosphate
  modified_base 2: mod_base = OTHER; note = 2'-O-methyladenosine-3'-phosphate
  modified_base 3: mod_base = OTHER; note = 2'-O-methyladenosine-3'-phosphate
  modified_base 4: mod_base = OTHER; note = 2'-O-methyluridine-3'-phosphate
  modified_base 5: mod_base = OTHER; note = 2'-O-methylcytidine-3'-phosphate
  modified_base 6: mod_base = OTHER; note = 2'-O-methylcytidine-3'-phosphate
  modified_base 7: mod_base = OTHER; note = 2'-deoxy-2'-fluorouridine-3'-phosphate
  modified_base 8: mod_base = OTHER; note = 2'-O-methylguanosine-3'-phosphate
  modified_base 9: mod_base = OTHER; note = 2'-deoxy-2'-fluoroadenosine-3'-phosphate
  modified_base 10: mod_base = OTHER; note = 2'-deoxy-2'-fluorocytidine-3'-phosphate
  modified_base 11: mod_base = OTHER; note = 2'-deoxy-2'-fluoroguanosine-3'-phosphate
  modified_base 12: mod_base = OTHER; note = 2'-O-methylguanosine-3'-phosphate
  modified_base 13: mod_base = OTHER; note = 2'-O-methyladenosine-3'-phosphate
  modified_base 14: mod_base = OTHER; note = 2'-O-methyladenosine-3'-phosphate
  modified_base 15: mod_base = OTHER; note = 2'-O-methyladenosine-3'-phosphate
  modified_base 16: mod_base = OTHER; note = 2'-O-methyladenosine-3'-phosphate
  modified_base 17: mod_base = OTHER; note = 2'-O-methyladenosine-3'-phosphate
  modified_base 18: mod_base = OTHER; note = 2'-O-methylguanosine-3'-phosphate
  modified_base 19: mod_base = OTHER; note = 2'-O-methylguanosine-3'-phosphate
  modified_base 20: mod_base = OTHER; note = 2'-O-methylguanosine-3'-phosphate
  modified_base 21: mod_base = OTHER; note = 2'-O-methyladenosine
caatcctgacggaaaaaggga

SEQ ID NO: 3801 - RNA, 21 nt, synthetic construct
  source 1..21: mol_type = other RNA
  modified_base 1: mod_base = OTHER; note = 2'-O-methyladenosine-3'-phosphate
  modified_base 2: mod_base = OTHER; note = 2'-O-methyladenosine-3'-phosphate
  modified_base 3: mod_base = OTHER; note = 2'-O-methyluridine-3'-phosphate
  modified_base 4: mod_base = OTHER; note = 2'-O-methylcytidine-3'-phosphate
  modified_base 5: mod_base = OTHER; note = 2'-O-methylcytidine-3'-phosphate
  modified_base 6: mod_base = OTHER; note = 2'-O-methyluridine-3'-phosphate
  modified_base 7: mod_base = OTHER; note = 2'-deoxy-2'-fluoroguanosine-3'-phosphate
  modified_base 8: mod_base = OTHER; note = 2'-O-methyladenosine-3'-phosphate
  modified_base 9: mod_base = OTHER; note = 2'-deoxy-2'-fluorocytidine-3'-phosphate
  modified_base 10: mod_base = OTHER; note = 2'-deoxy-2'-fluoroguanosine-3'-phosphate
  modified_base 11: mod_base = OTHER; note = 2'-deoxy-2'-fluoroguanosine-3'-phosphate
  modified_base 12: mod_base = OTHER; note = 2'-O-methyladenosine-3'-phosphate
  modified_base 13: mod_base = OTHER; note = 2'-O-methyladenosine-3'-phosphate
  modified_base 14: mod_base = OTHER; note = 2'-O-methyladenosine-3'-phosphate
  modified_base 15: mod_base = OTHER; note = 2'-O-methyladenosine-3'-phosphate
  modified_base 16: mod_base = OTHER; note = 2'-O-methyladenosine-3'-phosphate
  modified_base 17: mod_base = OTHER; note = 2'-O-methylguanosine-3'-phosphate
  modified_base 18: mod_base = OTHER; note = 2'-O-methylguanosine-3'-phosphate
  modified_base 19: mod_base = OTHER; note = 2'-O-methylguanosine-3'-phosphate
  modified_base 20: mod_base = OTHER; note = 2'-O-methylcytidine-3'-phosphate
  modified_base 21: mod_base = OTHER; note = 2'-O-methyladenosine
aatcctgacggaaaaagggca

SEQ ID NO: 3802 - RNA, 21 nt, synthetic construct
  source 1..21: mol_type = other RNA
  modified_base 1: mod_base = OTHER; note = 2'-O-methyladenosine-3'-phosphate
  modified_base 2: mod_base = OTHER; note = 2'-O-methyluridine-3'-phosphate
  modified_base 3: mod_base = OTHER; note = 2'-O-methylcytidine-3'-phosphate
  modified_base 4: mod_base = OTHER; note = 2'-O-methylcytidine-3'-phosphate
  modified_base 5: mod_base = OTHER; note = 2'-O-methyluridine-3'-phosphate
  modified_base 6: mod_base = OTHER; note = 2'-O-methylguanosine-3'-phosphate
  modified_base 7: mod_base = OTHER; note = 2'-deoxy-2'-fluoroadenosine-3'-phosphate
  modified_base 8: mod_base = OTHER; note = 2'-O-methylcytidine-3'-phosphate
  modified_base 9: mod_base = OTHER; note = 2'-deoxy-2'-fluoroguanosine-3'-phosphate
  modified_base 10: mod_base = OTHER; note = 2'-deoxy-2'-fluoroguanosine-3'-phosphate
  modified_base 11: mod_base = OTHER; note = 2'-deoxy-2'-fluoroadenosine-3'-phosphate
  modified_base 12: mod_base = OTHER; note = 2'-O-methyladenosine-3'-phosphate
  modified_base 13: mod_base = OTHER; note = 2'-O-methyladenosine-3'-phosphate
  modified_base 14: mod_base = OTHER; note = 2'-O-methyladenosine-3'-phosphate
  modified_base 15: mod_base = OTHER; note = 2'-O-methyladenosine-3'-phosphate
  modified_base 16: mod_base = OTHER; note = 2'-O-methylguanosine-3'-phosphate
  modified_base 17: mod_base = OTHER; note = 2'-O-methylguanosine-3'-phosphate
  modified_base 18: mod_base = OTHER; note = 2'-O-methylguanosine-3'-phosphate
  modified_base 19: mod_base = OTHER; note = 2'-O-methylcytidine-3'-phosphate
  modified_base 20: mod_base = OTHER; note = 2'-O-methylcytidine-3'-phosphate
  modified_base 21: mod_base = OTHER; note = 2'-O-methyladenosine
atcctgacggaaaaagggcca

SEQ ID NO: 3803 - RNA, 21 nt, synthetic construct
  source 1..21: mol_type = other RNA
  modified_base 1: mod_base = OTHER; note = 2'-O-methylcytidine-3'-phosphate
  modified_base 2: mod_base = OTHER; note = 2'-O-methyladenosine-3'-phosphate
  modified_base 3: mod_base = OTHER; note = 2'-O-methyluridine-3'-phosphate
  modified_base 4: mod_base = OTHER; note = 2'-O-methylguanosine-3'-phosphate
  modified_base 5: mod_base = OTHER; note = 2'-O-methylguanosine-3'-phosphate
  modified_base 6: mod_base = OTHER; note = 2'-O-methyluridine-3'-phosphate
  modified_base 7: mod_base = OTHER; note = 2'-deoxy-2'-fluoroguanosine-3'-phosphate
  modified_base 8: mod_base = OTHER; note = 2'-O-methylcytidine-3'-phosphate
  modified_base 9: mod_base = OTHER; note = 2'-deoxy-2'-fluorocytidine-3'-phosphate
  modified_base 10: mod_base = OTHER; note = 2'-deoxy-2'-fluoroadenosine-3'-phosphate
  modified_base 11: mod_base = OTHER; note = 2'-deoxy-2'-fluorouridine-3'-phosphate
  modified_base 12: mod_base = OTHER; note = 2'-O-methyladenosine-3'-phosphate
  modified_base 13: mod_base = OTHER; note = 2'-O-methylcytidine-3'-phosphate
  modified_base 14: mod_base = OTHER; note = 2'-O-methyladenosine-3'-phosphate
  modified_base 15: mod_base = OTHER; note = 2'-O-methyladenosine-3'-phosphate
  modified_base 16: mod_base = OTHER; note = 2'-O-methylcytidine-3'-phosphate
  modified_base 17: mod_base = OTHER; note = 2'-O-methylcytidine-3'-phosphate
  modified_base 18: mod_base = OTHER; note = 2'-O-methyladenosine-3'-phosphate
  modified_base 19: mod_base = OTHER; note = 2'-O-methyladenosine-3'-phosphate
  modified_base 20: mod_base = OTHER; note = 2'-O-methylcytidine-3'-phosphate
  modified_base 21: mod_base = OTHER; note = 2'-O-methyladenosine
catggtgccatacaaccaaca

SEQ ID NO: 3804 - RNA, 21 nt, synthetic construct
  source 1..21: mol_type = other RNA
  modified_base 1: mod_base = OTHER; note = 2'-O-methyluridine-3'-phosphate
  modified_base 2: mod_base = OTHER; note = 2'-O-methylguanosine-3'-phosphate
  modified_base 3: mod_base = OTHER; note = 2'-O-methylguanosine-3'-phosphate
  modified_base 4: mod_base = OTHER; note = 2'-O-methyluridine-3'-phosphate
  modified_base 5: mod_base = OTHER; note = 2'-O-methylguanosine-3'-phosphate
  modified_base 6: mod_base = OTHER; note = 2'-O-methylcytidine-3'-phosphate
  modified_base 7: mod_base = OTHER; note = 2'-deoxy-2'-fluorocytidine-3'-phosphate
  modified_base 8: mod_base = OTHER; note = 2'-O-methyladenosine-3'-phosphate
  modified_base 9: mod_base = OTHER; note = 2'-deoxy-2'-fluorouridine-3'-phosphate
  modified_base 10: mod_base = OTHER; note = 2'-deoxy-2'-fluoroadenosine-3'-phosphate
  modified_base 11: mod_base = OTHER; note = 2'-deoxy-2'-fluorocytidine-3'-phosphate
  modified_base 12: mod_base = OTHER; note = 2'-O-methyladenosine-3'-phosphate
  modified_base 13: mod_base = OTHER; note = 2'-O-methyladenosine-3'-phosphate
  modified_base 14: mod_base = OTHER; note = 2'-O-methylcytidine-3'-phosphate
  modified_base 15: mod_base = OTHER; note = 2'-O-methylcytidine-3'-phosphate
  modified_base 16: mod_base = OTHER; note = 2'-O-methyladenosine-3'-phosphate
  modified_base 17: mod_base = OTHER; note = 2'-O-methyladenosine-3'-phosphate
  modified_base 18: mod_base = OTHER; note = 2'-O-methylcytidine-3'-phosphate
  modified_base 19: mod_base = OTHER; note = 2'-O-methyladenosine-3'-phosphate
  modified_base 20: mod_base = OTHER; note = 2'-O-methylguanosine-3'-phosphate
  modified_base 21: mod_base = OTHER; note = 2'-O-methyladenosine
tggtgccatacaaccaacaga

SEQ ID NO: 3805 - RNA, 21 nt, synthetic construct
  source 1..21: mol_type = other RNA
  modified_base 1: mod_base = OTHER; note = 2'-O-methylguanosine-3'-phosphate
  modified_base 2: mod_base = OTHER; note = 2'-O-methyluridine-3'-phosphate
  modified_base 3: mod_base = OTHER; note = 2'-O-methylguanosine-3'-phosphate
  modified_base 4: mod_base = OTHER; note = 2'-O-methylcytidine-3'-phosphate
  modified_base 5: mod_base = OTHER; note = 2'-O-methylcytidine-3'-phosphate
  modified_base 6: mod_base = OTHER; note = 2'-O-methyladenosine-3'-phosphate
  modified_base 7: mod_base = OTHER; note = 2'-deoxy-2'-fluorouridine-3'-phosphate
  modified_base 8: mod_base = OTHER; note = 2'-O-methyladenosine-3'-phosphate
  modified_base 9: mod_base = OTHER; note = 2'-deoxy-2'-fluorocytidine-3'-phosphate
  modified_base 10: mod_base = OTHER; note = 2'-deoxy-2'-fluoroadenosine-3'-phosphate
  modified_base 11: mod_base = OTHER; note = 2'-deoxy-2'-fluoroadenosine-3'-phosphate
  modified_base 12: mod_base = OTHER; note = 2'-O-methylcytidine-3'-phosphate
  modified_base 13: mod_base = OTHER; note = 2'-O-methylcytidine-3'-phosphate
  modified_base 14: mod_base = OTHER; note = 2'-O-methyladenosine-3'-phosphate
  modified_base 15: mod_base = OTHER; note = 2'-O-methyladenosine-3'-phosphate
  modified_base 16: mod_base = OTHER; note = 2'-O-methylcytidine-3'-phosphate
  modified_base 17: mod_base = OTHER; note = 2'-O-methyladenosine-3'-phosphate
  modified_base 18: mod_base = OTHER; note = 2'-O-methylguanosine-3'-phosphate
  modified_base 19: mod_base = OTHER; note = 2'-O-methylcytidine-3'-phosphate
  modified_base 20: mod_base = OTHER; note = 2'-O-methylcytidine-3'-phosphate
  modified_base 21: mod_base = OTHER; note = 2'-O-methyladenosine
gtgccatacaaccaacagcca

SEQ ID NO: 3806 - RNA, 21 nt, synthetic construct
  source 1..21: mol_type = other RNA
  modified_base 1: mod_base = OTHER; note = 2'-O-methylguanosine-3'-phosphate
  modified_base 2: mod_base = OTHER; note = 2'-O-methylcytidine-3'-phosphate
  modified_base 3: mod_base = OTHER; note = 2'-O-methylcytidine-3'-phosphate
  modified_base 4: mod_base = OTHER; note = 2'-O-methyladenosine-3'-phosphate
  modified_base 5: mod_base = OTHER; note = 2'-O-methyluridine-3'-phosphate
  modified_base 6: mod_base = OTHER; note = 2'-O-methyladenosine-3'-phosphate
  modified_base 7: mod_base = OTHER; note = 2'-deoxy-2'-fluorocytidine-3'-phosphate
  modified_base 8: mod_base = OTHER; note = 2'-O-methyladenosine-3'-phosphate
  modified_base 9: mod_base = OTHER; note = 2'-deoxy-2'-fluoroadenosine-3'-phosphate
  modified_base 10: mod_base = OTHER; note = 2'-deoxy-2'-fluorocytidine-3'-phosphate
  modified_base 11: mod_base = OTHER; note = 2'-deoxy-2'-fluorocytidine-3'-phosphate
  modified_base 12: mod_base = OTHER; note = 2'-O-methyladenosine-3'-phosphate
  modified_base 13: mod_base = OTHER; note = 2'-O-methyladenosine-3'-phosphate
  modified_base 14: mod_base = OTHER; note = 2'-O-methylcytidine-3'-phosphate
  modified_base 15: mod_base = OTHER; note = 2'-O-methyladenosine-3'-phosphate
  modified_base 16: mod_base = OTHER; note = 2'-O-methylguanosine-3'-phosphate
  modified_base 17: mod_base = OTHER; note = 2'-O-methylcytidine-3'-phosphate
  modified_base 18: mod_base = OTHER; note = 2'-O-methylcytidine-3'-phosphate
  modified_base 19: mod_base = OTHER; note = 2'-O-methyladenosine-3'-phosphate
  modified_base 20: mod_base = OTHER; note = 2'-O-methyladenosine-3'-phosphate
  modified_base 21: mod_base = OTHER; note = 2'-O-methyladenosine
gccatacaaccaacagccaaa

SEQ ID NO: 3807 - RNA, 21 nt, synthetic construct
  source 1..21: mol_type = other RNA
  modified_base 1: mod_base = OTHER; note = 2'-O-methylcytidine-3'-phosphate
  modified_base 2: mod_base = OTHER; note = 2'-O-methylcytidine-3'-phosphate
  modified_base 3: mod_base = OTHER; note = 2'-O-methyladenosine-3'-phosphate
  modified_base 4: mod_base = OTHER; note = 2'-O-methyluridine-3'-phosphate
  modified_base 5: mod_base = OTHER; note = 2'-O-methyladenosine-3'-phosphate
  modified_base 6: mod_base = OTHER; note = 2'-O-methylcytidine-3'-phosphate
  modified_base 7: mod_base = OTHER; note = 2'-deoxy-2'-fluoroadenosine-3'-phosphate
  modified_base 8: mod_base = OTHER; note = 2'-O-methyladenosine-3'-phosphate
  modified_base 9: mod_base = OTHER; note = 2'-deoxy-2'-fluorocytidine-3'-phosphate
  modified_base 10: mod_base = OTHER; note = 2'-deoxy-2'-fluorocytidine-3'-phosphate
  modified_base 11: mod_base = OTHER; note = 2'-deoxy-2'-fluoroadenosine-3'-phosphate
  modified_base 12: mod_base = OTHER; note = 2'-O-methyladenosine-3'-phosphate
  modified_base 13: mod_base = OTHER; note = 2'-O-methylcytidine-3'-phosphate
  modified_base 14: mod_base = OTHER; note = 2'-O-methyladenosine-3'-phosphate
  modified_base 15: mod_base = OTHER; note = 2'-O-methylguanosine-3'-phosphate
  modified_base 16: mod_base = OTHER; note = 2'-O-methylcytidine-3'-phosphate
  modified_base 17: mod_base = OTHER; note = 2'-O-methylcytidine-3'-phosphate
  modified_base 18: mod_base = OTHER; note = 2'-O-methyladenosine-3'-phosphate
  modified_base 19: mod_base = OTHER; note = 2'-O-methyladenosine-3'-phosphate
  modified_base 20: mod_base = OTHER; note = 2'-O-methylguanosine-3'-phosphate
  modified_base 21: mod_base = OTHER; note = 2'-O-methyladenosine
ccatacaaccaacagccaaga

(The sequence listing continues in the following parts.)
